United States Patent Application Publication US 2011/0182862 A1 - sequence listing, part 18

SEQ ID NO: 25755 - DNA, 975 bp, Muscodor strobelii
  misc_feature: SGI cDNA ID NO. 568793
  misc_feature: Reduced expression when VOC is produced
  misc_feature: Encodes the peptide sequence at SEQ ID NO 25756
atggcgaccgatcagaagcagacgccggcgcctgccagcaagaactacaagggtttcgttgctggtgttttctccggcatcgccaagctttcggtcggtcaccccttcgacacggtaaaagtccgtctccaaaccacagacgcgagccgcttcgcagggcccctccaatgcgtcgtacaaaccgtaaaacatgaaggtgtccggggtctatacaaaggcgcatcgccgccgctcgtcggctggatgttcatggactccctgatgctcggcagtctcaccatctaccgccgactcctcgccgaaaacgtcttcgtccctaagcttgatcacgccgcgccgaaaagtcccgagacggagggcccgatcgcagcgacgtcgcatcccgcagcgcatctcccatctttcggccacggaatcgctggcgtaatggccggaagcaccgtctcctttatcgcagcaccagtcgagcacgtgaaagcgaggctacagatccagtactcggcgaagaaggcagagcgcctgtactccggacccatcgactgtctgcgcaagatctacggtgcgcatggggtgcggggcgtatacaaggggcttgccgcgacgctgatattccgttcgttcttcttcttctggtggggctcctacgatgtcttcacgaagctgctccgcaagaacacaaatctcagcgcgccggcgatcaacttctgggccggtggggttagcgcgcaagtcttctggcttacgagttatcccagtgatgttgttaagcagcggatcatgactgatcccatgggcggcaagttgaacgacgggacgcccagattcaggaattggcgccaggcggcgaccgcggtgtatagggagaacggcgtgaagggctactggaggggattcttgccatgcttcctgagagcttttccggccaacgctatggctttagtcgcatttgaaggcgttatgcgagcgttgccgtaa

SEQ ID NO: 25756 - protein, 324 aa, Muscodor strobelii
  misc_feature: SGI Peptide ID NO. 568793
  misc_feature (14)..(103): Pfam Id: PF00153 Pfam Desc: Mitochondrial carrier protein
  misc_feature (133)..(226): Pfam Id: PF00153 Pfam Desc: Mitochondrial carrier protein
  misc_feature (234)..(324): Pfam Id: PF00153 Pfam Desc: Mitochondrial carrier protein
  misc_feature (234)..(323): Pfam Id: PF00153 Pfam Desc: Mitochondrial carrier protein
  misc_feature (5)..(324): NCBI GI: 46136919 Blast Desc: FG09975.1 [Gibberella zeae PH-1]
  misc_feature (9)..(324): NCBI GI: 67901368 Blast Desc: AN7671.2 [Aspergillus nidulans FGSC A4] gi|40742667|gb|EAA61857.1| AN7671.2 [Aspergillus nidulans FGSC A4] gi|259484012|tpe|CBF79872.1| TPA: mitochondrial carrier FGSC
  misc_feature (1)..(324): NCBI GI: 256732193 Blast Desc: [Nectria haematococca mpVI 77-13-4]
  misc_feature (12)..(324): NCBI GI: 212527278 Blast Desc: mitochondrial carrier protein, [Penicillium marneffei ATCC 18224] gi|210073194|gb|EEA27281.1| mitochondrial carrier protein, [Penicillium marneffei ATCC 18224]
  misc_feature (9)..(324): NCBI GI: 39944184 Blast Desc: MGG_04103 [Magnaporthe grisea 70-15] gi|145014833|gb|EDJ99401.1| MGG_04103 [Magnaporthe grisea 70-15]
  misc_feature (12)..(324): NCBI GI: 242783278 Blast Desc: mitochondrial carrier protein, [Talaromyces stipitatus ATCC 10500] gi|218720302|gb|EED19721.1| mitochondrial carrier protein, [Talaromyces stipitatus ATCC 10500]
  misc_feature (1)..(324): NCBI GI: 261352035 Blast Desc: carrier protein YMC2 [Verticillium albo-atrum VaMs.102]
  misc_feature (15)..(324): NCBI GI: 119497895 Blast Desc: mitochondrial carrier protein, [Neosartorya fischeri NRRL 181] gi|119413869|gb|EAW23808.1| mitochondrial carrier protein, [Neosartorya fischeri NRRL 181]
  misc_feature (1)..(324): NCBI GI: 85100155 Blast Desc: NCU06662 [Neurospora crassa OR74A] gi|28922441|gb|EAA31673.1| conserved [Neurospora crassa OR74A] gi|28950111|emb|CAD70891.1| conserved [Neurospora crassa]
  misc_feature (12)..(324): NCBI GI: 171692137 Blast Desc: protein product [Podospora anserina] gi|170946017|emb|CAP72818.1| protein product [Podospora anserina]
  misc_feature: Useful for introducing or modulating the production of volatile compounds
MATDQKQTPAPASKNYKGFVAGVFSGIAKLSVGHPFDTVKVRLQTTDASRFAGPLQCVVQTVKHEGVRGLYKGASPPLVGWMFMDSLMLGSLTIYRRLLAENVFVPKLDHAAPKSPETEGPIAATSHPAAHLPSFGHGIAGVMAGSTVSFIAAPVEHVKARLQIQYSAKKAERLYSGPIDCLRKIYGAHGVRGVYKGLAATLIFRSFFFFWWGSYDVFTKLLRKNTNLSAPAINFWAGGVSAQVFWLTSYPSDVVKQRIMTDPMGGKLNDGTPRFRNWRQAATAVYRENGVKGYWRGFLPCFLRAFPANAMALVAFEGVMRALP

SEQ ID NO: 25757 - DNA, 2062 bp, Muscodor strobelii
  misc_feature: SGI EST ID NO. CUFF.61019.0
  misc_feature: Variant of the nucleotide sequence at SEQ ID NO 25755
agaaaacagcttcgagccctcagcttcgaccgactagaagctcgagtagttcttgctagatctcagccctcatggcgaccgatcagaagcagacgccggcgcctgccagcaagaactacaagggtttcgttgctggtgttttctccggcatcgccaagctttcggtcggtcaccccttcgacacggtaaaagtccgtctccaaaccacagacgcgagccgcttcgcagggcccctccaatgcgtcgtacaaaccgtaaaacatgaaggtgtccggggtctatacaaaggcgcatcgccgccgctcgtcggctggatgttcatggactccctgatgctcggcagtctcaccatctaccgccgactcctcgccgaaaacgtcttcgtccctaagcttgatcacgccgcgccgaaaagtcccgagacggagggcccgatcgcagcgacgtcgcatcccgcagcgcatctcccatctttcggccacggaatcgctggcgtaatggccggaagcaccgtctcctttatcgcagcaccagtcgagcacgtgaaagcgaggctacagatccagtactcggcgaagaaggcagagcgcctgtactccggacccatcgactgtctgcgcaagatctacggtgcgcatggggtgcggggcgtatacaaggggcttgccgcgacgctgatattccgttcgttcttcttcttctggtggggctcctacgatgtcttcacgaagctgctccgcaagaacacaaatctcagcgcgccggcgatcaacttctgggccggtggggttagcgcgcaagtcttctggcttacgagttatcccagtgatgttgttaagcagcggatcatgactgatcccatgggcggcaagttgaacgacgggacgcccagattcaggaattggcgccaggcggcgaccgcggtgtatagggagaacggcgtgaagggctactggaggggattcttgccatgcttcctgagagcttttccggccaacgctatggctttagtcgcatttgaaggcgttatgcgagcgttgccgtaattagaactgggttatactatagactgatagaaatcaccattgtacgatatagcggagggatatcccaacctaaataccatgtatatatcacaactcgccaatcatgaagataccgtcactagcgtttcacgtcaagatcacgtgttgccttgcgattgagactctattcatctgacgtctgaggtgagcacctgctctatgcctatactaagtgcatcatgcgccagttttgccattctccttcggtcgatccgtagtcgtcaatcatgagtctcgatttactcgtcatcgtcatcagcctcgtcgttgacgacgttgaagaacttgagctcgtagacgcccttggaggtggagacgacgcgcagccagtcacggagctgcatcttcttaaggaacttcttcgtactgtcgtggcggggtttgatgtcagcgtttacgtctcctacacatcgcgccttggatatagggatataggactgacaggtacttgaggtagcggccggagagctcattgtgggcggtgatctcgaccttgccgtcgccaacctgctggatggtgatggtgtcgccgaggttgccggtgcggccgtcgaccttgatcttgtcctgcaggaacttctcgaaggcggcggtgtcgaagatcttgtcgctggcgggctgagaagcgttgatgacgaacttcttcgtcgtcttggcattcttgccggacttcttctacatcacggagaactgactttagcctactgttttacgccatcatctcgctggagggggtgccagggagactgggccaacagcaaagcggtgtcaagtggtagtacatacagtctgaggagccattgctgcggttgtctgtgcgatgaggatgatggaggacgcaaagaagtcgaatcctgcgcctgcgagatggggtggcgggttatatgtgggcggaagttgctcgattgaagtcgatgaagagaaactttcgttggaggggagcttttttgcggctcgaactttttggtgtatcgctg

SEQ ID NO: 25758 - DNA, 564 bp, Muscodor strobelii
  misc_feature: SGI cDNA ID NO. 568794
  misc_feature: Reduced expression when VOC is produced
  misc_feature: Encodes the peptide sequence at SEQ ID NO 25759
atgcaccagcggccagcgatacaccaaaaagttcgagccgcaaaaaagctcccctccaacgaaagtttctcttcatcgacttcaatcgagcaacttccgcccacatataacccgccaccccatctcgcaggcgcaggattcgacttctttgcgtcctccatcatcctcatcgcacagacaaccgcagcaatggctcctcagactaagaagtccggcaagaatgccaagacgacgaagaagttcgtcatcaacgcttctcagcccgccagcgacaagatcttcgacaccgccgccttcgagaagttcctgcaggacaagatcaaggtcgacggccgcaccggcaacctcggcgacaccatcaccatccagcaggttggcgacggcaaggtcgagatcaccgcccacaatgagctctccggccgctacctcaagtaccttacgaagaagttccttaagaagatgcagctccgtgactggctgcgcgtcgtctccacctccaagggcgtctacgagctcaagttcttcaacgtcgtcaacgacgaggctgatgacgatgacgagtaa

SEQ ID NO: 25759 - protein, 187 aa, Muscodor strobelii
  misc_feature: SGI Peptide ID NO. 568794
  misc_feature (74)..(187): Pfam Id: PF01776 Pfam Desc: Ribosomal L22e protein family
  misc_feature (64)..(187): NCBI GI: 46136917 Blast Desc: FG09974.1 [Gibberella zeae PH-1]
  misc_feature (64)..(187): NCBI GI: 85100151 Blast Desc: 60S ribosomal protein L22 [Neurospora crassa OR74A] gi|28922440|gb|EAA31672.1| 60S ribosomal protein L22 [Neurospora crassa OR74A] gi|28950110|emb|CAD70890.1| ribosomal protein L22
  misc_feature (66)..(187): NCBI GI: 39944186 Blast Desc: MGG_04104 [Magnaporthe grisea 70-15] gi|145014834|gb|EDJ99402.1| MGG_04104 [Magnaporthe grisea 70-15]
  misc_feature (64)..(187): NCBI GI: 171692139 Blast Desc: protein product [Podospora anserina] gi|170946018|emb|CAP72819.1| protein product [Podospora anserina]
  misc_feature (64)..(187): NCBI GI: 116206800 Blast Desc: 60S ribosomal protein L22 [Chaetomium globosum CBS 148.51] gi|88183290|gb|EAQ90758.1| 60S ribosomal protein L22 [Chaetomium globosum CBS 148.51]
  misc_feature (64)..(187): NCBI GI: 169614251 Blast Desc: SNOG_10263 [Phaeosphaeria nodorum SN15] gi|160707309|gb|EAT82598.2| SNOG_10263 [Phaeosphaeria nodorum SN15]
  misc_feature (64)..(187): NCBI GI: 261352034 Blast Desc: 60S ribosomal protein L22 [Verticillium albo-atrum VaMs.102]
  misc_feature (73)..(187): NCBI GI: 189200258 Blast Desc: 60S ribosomal protein L22 [Pyrenophora tritici-repentis Pt-1C-BFP] gi|187983565|gb|EDU49053.1| 60S ribosomal protein L22 [Pyrenophora tritici-repentis Pt-1C-BFP]
  misc_feature (64)..(187): NCBI GI: 225683725 Blast Desc: 60S ribosomal protein L22 [Paracoccidioides brasiliensis Pb03] gi|226293089|gb|EEH48509.1| 60S ribosomal protein L22 [Paracoccidioides brasiliensis Pb18]
  misc_feature (64)..(187): NCBI GI: 242815745 Blast Desc: 60S ribosomal protein L22, [Talaromyces stipitatus ATCC 10500] gi|218714969|gb|EED14392.1| 60S ribosomal protein L22, [Talaromyces stipitatus ATCC 10500]
  misc_feature: Useful for introducing or modulating the production of volatile compounds
MHQRPAIHQKVRAAKKLPSNESFSSSTSIEQLPPTYNPPPHLAGAGFDFFASSIILIAQTTAAMAPQTKKSGKNAKTTKKFVINASQPASDKIFDTAAFEKFLQDKIKVDGRTGNLGDTITIQQVGDGKVEITAHNELSGRYLKYLTKKFLKKMQLRDWLRVVSTSKGVYELKFFNVVNDEADDDDE

SEQ ID NO: 25760 - DNA, 1710 bp, Muscodor strobelii
  misc_feature: SGI EST ID NO. CUFF.61020.1
  misc_feature: Variant of the nucleotide sequence at SEQ ID NO 25758
caaaaagttcgagccgcaaaaaagctcccctccaacgaaagtttctcttcatcgacttcaatcgagcaacttccgcccacatataacccgccaccccatctcgcaggcgcaggattcgacttctttgcgtcctccatcatcctcatcgcacagacaaccgcagcaatggctcctcagactaagaagtccggcaagaatgccaagacgacgaagaagttcgtcatcaacgcttctcagcccgccagcgacaagatcttcgacaccgccgccttcgagaagttcctgcaggacaagatcaaggtcgacggccgcaccggcaacctcggcgacaccatcaccatccagcaggttggcgacggcaaggtcgagatcaccgcccacaatgagctctccggccgctacctcaagtaccttacgaagaagttccttaagaagatgcagctccgtgactggctgcgcgtcgtctccacctccaagggcgtctacgagctcaagttcttcaacgtcgtcaacgacgaggctgatgacgatgacgagtaaatcgagactcatgattgacgactacggatcgaccgaaggagaatggcaaaactggcgcatgatgcacttagtataggcatagagcaggtgctcacctcagacgtcagatgaatagagtctcaatcgcaaggcaacacgtgatcttgacgtgaaacgctagtgacggtatcttcatgattggcgagttgtgatatatacatggtatttaggttgggatatccctccgctatatcgtacaatggtgatttctatcagtctatagtataacccagttctaattacggcaacgctcgcataacgccttcaaatgcgactaaagccatagcgttggccggaaaagctctcaggaagcatggcaagaatcccctccagtagcccttcacgccgttctccctatacaccgcggtcgccgcctggcgccaattcctgaatctgggcgtcccgtcgttcaacttgccgcccatgggatcagtcatgatccgctgcttaacaacatcactgggataactcgtaagccagaagacttgcgcgctaaccccaccggcccagaagttgatcgccggcgcgctgagatttgtgttcttgcggagcagcttcgtgaagacatcgtaggagccccaccagaagaagaagaacgaacggaatatcagcgtcgcggcaagccccttgtatacgccccgcaccccatgcgcaccgtagatcttgcgcagacagtcgatgggtccggagtacaggcgctctgccttcttcgccgagtactggatctgtagcctcgctttcacgtgctcgactggtgctgcgataaaggagacggtgcttccggccattacgccagcgattccgtggccgaaagatgggagatgcgctgcgggatgcgacgtcgctgcgatcgggccctccgtctcgggacttttcggcgcggcgtgatcaagcttagggacgaagacgttttcggcgaggagtcggcggtagatggtgagactgccgagcatcagggagtccatgaacatccagccgacgagcggcggcgatgcgcctttgtatagaccccggacaccttcatgttttacggtttgtacgacgcattggaggggccctgcgaagcggctcgcgtctgtggtttggagacggacttttaccgtgtcgaaggggtgaccgactggaatgtta

SEQ ID NO: 25761 - DNA, 1374 bp, Muscodor strobelii
  misc_feature: SGI cDNA ID NO. 568795
  misc_feature: Encodes the peptide sequence at SEQ ID NO 25762
atgttaagtttactcctcacactagcaggcgtagcatctgcgcagcagcggtatcaaatcgatactgacgataatatcaaagccgccgcaaaagatcttgcataccaggtgatgtcatattaccatggtaacatatccggcaacattatcggcatcctcgacggccctcctgactccggaaggggagagtactactggtggcaagctggcgcattatgggggacgatgatcgattactggcatttaacgggcgacgacacatataacgacttggtcactcaagccttgttggcgcaggtcggcgaacatcagaactacgaacctcgaaactggactgcatcgctaggaaatgacgaccagggcttttggggcatgactgtgatgcttgccgctgaagagaaatatcctgatcctccccctgatcaaccacaatggttagagttagcccaggctgtctggaacacgcaacaagaacgcatcgactacgataactgtggtggcggtttacgatggcaaattccctacggtaacagaggatttgattacaaaaatagtatcgcacagggcatcttctttaacatgggagctcgtctcgcccgttacacaggcaaccaaacatatgccgaggaggccgagaagatatatgactggtcaaagaacatcggacttttagatgataagtacaacgtttgggatggtgtgcacattggagacaattgtacaaaagtcagcatggagtcctactcatattcgaatgcggtcttcacgctgggccttgcgtacatgtacgatttcaccaaggatcaaaaatggaggacgcgcctcgatggcttcctcaacacaacaatcgctacctttttcaaaaatgacaccgcaatcgaaccccaatgcgagctctcccagacctgtaaaaccgatatgttcacatataaaggctacgttcaccgatggctatcgacggcgacgcagattgtacccgacttatccgaaacaatcctaccgctcttaaggaaatctgcgcagtcctgcgtgaatcaatgtactgggaccgaagtcgggaagatctgtgggttcgcatgggcaagtggaaaaaatgatgggctctacggagctggacaacaaatggatgctttggccgcagtctcgtcacttttgatcgattcatccaaagccccagtcacgaattctacaggcggtacaagtcagggagatccaagcgcgggcatcggaaccggtagcgtaataccggagccacctccggtcacgacaggcgacaaggccggtgccagtatcctgactatcgttgtactggcgctagcgacgtattctctatggttcatgtgcacaggtgagaccgtagccgggcagaaatag

SEQ ID NO: 25762 - protein, 457 aa, Muscodor strobelii
  misc_feature: SGI Peptide ID NO. 568795
  misc_feature (17)..(397): Pfam Id: PF03663 Pfam Desc: Glycosyl hydrolase family 76
  misc_feature (3)..(450): NCBI GI: 171693745 Blast Desc: protein product [Podospora anserina] gi|170946821|emb|CAP73625.1| protein product [Podospora anserina]
  misc_feature (1)..(451): NCBI GI: 164426438 Blast Desc: NCU04262 [Neurospora crassa OR74A] gi|157071335|gb|EAA32017.2| conserved [Neurospora crassa OR74A]
  misc_feature (1)..(451): NCBI GI: 16944622 Blast Desc: DFG5 protein [Neurospora crassa]
  misc_feature (1)..(450): NCBI GI: 145610715 Blast Desc: MGG_00951 [Magnaporthe grisea 70-15] gi|145018095|gb|EDK02374.1| MGG_00951 [Magnaporthe grisea 70-15]
  misc_feature (16)..(451): NCBI GI: 85093327 Blast Desc: NCU08127 [Neurospora crassa OR74A] gi|28921118|gb|EAA30434.1| conserved [Neurospora crassa OR74A]
  misc_feature (5)..(451): NCBI GI: 46137743 Blast Desc: FG10387.1 [Gibberella zeae PH-1]
  misc_feature (3)..(448): NCBI GI: 46117484 Blast Desc: FG04584.1 [Gibberella zeae PH-1]
  misc_feature (72)..(451): NCBI GI: 261352110 Blast Desc: mannan endo-1,6-alpha-mannosidase DCW1 [Verticillium albo-atrum VaMs.102]
  misc_feature (1)..(448): NCBI GI: 256729380 Blast Desc: glycoside hydrolase family 76 [Nectria haematococca mpVI 77-13-4]
  misc_feature (10)..(451): NCBI GI: 256720710 Blast Desc: glycoside hydrolase family 76 [Nectria haematococca mpVI 77-13-4]
  misc_feature (1)..(447): SWISSPROT Homolog: EC 3.2.1.101 Mannan endo-1,6-alpha-mannosidase
MLSLLLTLAGVASAQQRYQIDTDDNIKAAAKDLAYQVMSYYHGNISGNIIGILDGPPDSGRGEYYWWQAGALWGTMIDYWHLTGDDTYNDLVTQALLAQVGEHQNYEPRNWTASLGNDDQGFWGMTVMLAAEEKYPDPPPDQPQWLELAQAVWNTQQERIDYDNCGGGLRWQIPYGNRGFDYKNSIAQGIFFNMGARLARYTGNQTYAEEAEKIYDWSKNIGLLDDKYNVWDGVHIGDNCTKVSMESYSYSNAVFTLGLAYMYDFTKDQKWRTRLDGFLNTTIATFFKNDTAIEPQCELSQTCKTDMFTYKGYVHRWLSTATQIVPDLSETILPLLRKSAQSCVNQCTGTEVGKICGFAWASGKNDGLYGAGQQMDALAAVSSLLIDSSKAPVTNSTGGTSQGDPSAGIGTGSVIPEPPPVTTGDKAGASILTIVVLALATYSLWFMCTGETVAGQK

SEQ ID NO: 25763 - DNA, 3341 bp, Muscodor strobelii
  misc_feature: SGI EST ID NO. CUFF.60823.0
  misc_feature: Variant of the nucleotide sequence at SEQ ID NO 25761
atttctctgatattcccttctgatattggatcgatcttgcttaatgattagagtcttgaggcgcccttggtatcgccataaagaagacaatctcactaagcttcattcatgccttgctatccatcatgggtcacaatgcatatcgctgtttagagcgacatcaataagcaccaagaaagatcgtgactctttgaagagccgatattgattattgagaaacacactccgactcctctcgcgagcactcgctagcgattactcgcgatggagagcctctaataagatagacaacttcgatttaagaatggacgacacagctggtctttccagactcttgaggccgtgcaagatctgtctccaacaatgttaagtttctgttgaatcttccacgcagcgtgcctttccagagcggactcctgacatttcaaaaatgcccgaatatcattcaaataataatgctattcagtagaaaggttgtacaaatgcaacacgagatcacagtcgatgccaagacaaaagccggcatccggtattaacatgcctcccgctcttccacacgaattgccaagagtcatcctgacctggggcagtgcaaacttccaaattacaacatcgtgcttaagcatggttgaagttgtctcgtgatgtttcatatagcgacaagtcaattatgtaagtagtttctaacgaaacgaaacttgatgcaaacactgcgctagtattagaagaattataccacaggcgaaaacatagtgttctctaggttgtctaatgcccccacggaattatacggccccaaatagtataagagtgttggcgggtcgcatcttgcgctagagctgctcagcctccatctccaaaccgccgcccatggcccgatgcacgctggcatgtaataaagcatgcaacagcttccactacacagcatgttcaatctcccgtcagcgaccagctgcttgtttaggcgaaccagctatccctcgtattccaggcaaccatttagtgccttactaactcctgaaggtatcgaaaaccgctgtagacatgtagcgatcaaaacacaggactggagttggggtcagagaaggacgaaatcgttacatgcggttgcaactggcgtcagccatcatcatggagatcgttcttgtttcagccggctagagccttgctcaactacttgtatttatcatcatcttctcagaatcagtcgcattaatattactagtatgatggtgaatactttgcaagtctattacgctcgttagccttttggtttgtgtttttaccgtatactttaggattcaaaaatattttaactcgtgaactactattgtatcgccgtgctccgtcttcgataccaccatggcatcggctacgatgttaagtttactcctcacactagcaggcgtagcatctgcgcagcagcggtatcaaatcgatactgacgataatatcaaagccgccgcaaaagatcttgcataccaggtgatgtcatattaccatggtaacatatccggcaacattatcggcatcctcgacggccctcctgactccggaaggggagagtactactggtggcaagctggcgcattatgggggacgatgatcgattactggcatttaacgggcgacgacacatataacgacttggtcactcaagccttgttggcgcaggtcggcgaacatcagaactacgaacctcgaaactggactgcatcgctaggaaatgacgaccagggcttttggggcatgactgtgatgcttgccgctgaagagaaatatcctgatcctccccctgatcaaccacaatggttagagttagcccaggctgtctggaacacgcaacaagaacgcatcgactacgataactgtggtggcggtttacgatggcaaattccctacggtaacagaggatttgattacaaaaatagtatcgcacagggcatcttctttaacatgggagctcgtctcgcccgttacacaggcaaccaaacatatgccgaggaggccgagaagatatatgactggtcaaagaacatcggacttttagatgataagtacaacgtttgggatggtgtgcacattggagacaattgtacaaaagtcagcatggagtcctactcatattcgaatgcggtcttcacgctgggccttgcgtacatgtacgatttcaccaaggatcaaaaatggaggacgcgcctcgatggcttcctcaacacaacaatcgctacctttttcaaaaatgacaccgcaatcgaaccccaatgcgagctctcccagacctgtaaaaccgatatgttcacatataaaggctacgttcaccgatggctatcgacggcgacgcagattgtacccgacttatccgaaacaatcctaccgctcttaaggaaatctgcgcagtcctgcgtgaatcaatgtactgggaccgaagtcgggaagatctgtgggttcgcatgggcaagtggaaaaaatgatgggctctacggagctggacaacaaatggatgctttggccgcagtctcgtcacttttgatcgattcatccaaagccccagtcacgaattctacaggcggtacaagtcagggagatccaagcgcgggcatcggaaccggtagcgtaataccggagccacctccggtcacgacaggcgacaaggccggtgccagtatcctgactatcgttgtactggcgctagcgacgtattctctatggttcatgtgcacaggtgagaccgtagccgggcagaaatagccgcagagcgaattagaccgatggccatctgcacttcatctcaaggaaaaggaacatataagtctcgatagggttattgccttcgtcacggttggggcttacattgtggtataggatcatacatggtaagatcggtccaccaagttggtccaagagcatatgcaggtagctatcgctccggcctcgtccagattgtctgagggagttattttgtatcacgaaaggcgttgcggctatgacatagtatacactactgggcttgggtatcaggcgaggcgtctggtgtcatttcctgtccacagaatgattttaccactctagagctttggaaaaggaagcgtcaacttcacaatttgatcacaattacgtatctcgcggaatccacatgactcattccaggggcaacggaagcacaggacttgacatgatctaacacatgtttgttctgggtagtgaaaagaaccgtgaagtcagttgctggctcttttgtactacactcagctgccttgatgtctcctggagcgtaaatagattatatcctactttccgaatagcactatttagcagatcgtgaagtaggcataattccg

SEQ ID NO: 25764 - DNA, 456 bp, Muscodor strobelii
  misc_feature: SGI cDNA ID NO. 568796
  misc_feature: Elevated expression when VOC is produced
  misc_feature: Encodes the peptide sequence at SEQ ID NO 25765
atgttcacatataaaggctacgttcaccgatggctatcgacggcgacgcagattgtacccgacttatccgaaacaatcctaccgctcttaaggaaatctgcgcagtcctgcgtgaatcaatgtactgggaccgaagtcgggaagatctgtgggttcgcatgggcaagtggaaaaaatgatgggctctacggagctggacaacaaatggatgctttggccgcagtctcgtcacttttgatcgattcatccaaagccccagtcacgaattctacaggcggtacaagtcagggagatccaagcgcgggcatcggaaccggtagcgtaataccggagccacctccggtcacgacaggcgacaaggccggtgccagtatcctgactatcgttgtactggcgctagcgacgtattctctatggttcatgtgcacaggtgagaccgtagccgggcagaaatag

SEQ ID NO: 25765 - protein, 151 aa, Muscodor strobelii
  misc_feature: SGI Peptide ID NO. 568796
  misc_feature (3)..(91): Pfam Id: PF03663 Pfam Desc: Glycosyl hydrolase family 76
  misc_feature (1)..(145): NCBI GI: 46137743 Blast Desc: FG10387.1 [Gibberella zeae PH-1]
  misc_feature (1)..(145): NCBI GI: 261352110 Blast Desc: mannan endo-1,6-alpha-mannosidase DCW1 [Verticillium albo-atrum VaMs.102]
  misc_feature (1)..(142): NCBI GI: 256729380 Blast Desc: glycoside hydrolase family 76 [Nectria haematococca mpVI 77-13-4]
  misc_feature (1)..(145): NCBI GI: 256720710 Blast Desc: glycoside hydrolase family 76 [Nectria haematococca mpVI 77-13-4]
  misc_feature (1)..(142): NCBI GI: 46117484 Blast Desc: FG04584.1 [Gibberella zeae PH-1]
  misc_feature (1)..(145): NCBI GI: 85093327 Blast Desc: NCU08127 [Neurospora crassa OR74A] gi|28921118|gb|EAA30434.1| conserved [Neurospora crassa OR74A]
  misc_feature (1)..(132): NCBI GI: 164426438 Blast Desc: NCU04262 [Neurospora crassa OR74A] gi|157071335|gb|EAA32017.2| conserved [Neurospora crassa OR74A]
  misc_feature (1)..(132): NCBI GI: 16944622 Blast Desc: DFG5 protein [Neurospora crassa]
  misc_feature (1)..(144): NCBI GI: 171693745 Blast Desc: protein product [Podospora anserina] gi|170946821|emb|CAP73625.1| protein product [Podospora anserina]
  misc_feature (9)..(144): NCBI GI: 116197799 Blast Desc: CHGG_07055 [Chaetomium globosum CBS 148.51] gi|88178334|gb|EAQ85802.1| CHGG_07055 [Chaetomium globosum CBS 148.51]
  misc_feature (3)..(135): SWISSPROT Homolog: EC 3.2.1.101 Mannan endo-1,6-alpha-mannosidase
  misc_feature: Useful for introducing or modulating the production of volatile compounds
MFTYKGYVHRWLSTATQIVPDLSETILPLLRKSAQSCVNQCTGTEVGKICGFAWASGKNDGLYGAGQQMDALAAVSSLLIDSSKAPVTNSTGGTSQGDPSAGIGTGSVIPEPPPVTTGDKAGASILTIVVLALATYSLWFMCTGETVAGQK

SEQ ID NO: 25766 - DNA, 1603 bp, Muscodor strobelii
  misc_feature: SGI EST ID NO. CUFF.60823.1
  misc_feature: Variant of the nucleotide sequence at SEQ ID NO 25764
cgagagaacccactgacgccgattgtgcgatagggcttttggggcatgactgtgatgcttgccgctgaagagaaatatcctgatcctccccctgatcaaccacaatggttagagttagcccaggctgtctggaacacgcaacaagaacgcatcgactacgataactgtggtggcggtttacgatggcaaattccctacggtaacagaggatttgattacaaaaatagtatcgcacagggcatcttctttaacatgggagctcgtctcgcccgttacacaggcaaccaaacatatgccgaggaggccgagaagatatatgactggtcaaagaacatcggacttttagatgataagtacaacgtttgggatggtgtgcacattggagacaattgtacaaaagtcagcatggagtcctactcatattcgaatgcggtcttcacgctgggccttgcgtacatgtacgatttcaccaaggatcaaaaatggaggacgcgcctcgatggcttcctcaacacaacaatcgctacctttttcaaaaatgacaccgcaatcgaaccccaatgcgagctctcccagacctgtaaaaccgatatgttcacatataaaggctacgttcaccgatggctatcgacggcgacgcagattgtacccgacttatccgaaacaatcctaccgctcttaaggaaatctgcgcagtcctgcgtgaatcaatgtactgggaccgaagtcgggaagatctgtgggttcgcatgggcaagtggaaaaaatgatgggctctacggagctggacaacaaatggatgctttggccgcagtctcgtcacttttgatcgattcatccaaagccccagtcacgaattctacaggcggtacaagtcagggagatccaagcgcgggcatcggaaccggtagcgtaataccggagccacctccggtcacgacaggcgacaaggccggtgccagtatcctgactatcgttgtactggcgctagcgacgtattctctatggttcatgtgcacaggtgagaccgtagccgggcagaaatagccgcagagcgaattagaccgatggccatctgcacttcatctcaaggaaaaggaacatataagtctcgatagggttattgccttcgtcacggttggggcttacattgtggtataggatcatacatggtaagatcggtccaccaagttggtccaagagcatatgcaggtagctatcgctccggcctcgtccagattgtctgagggagttattttgtatcacgaaaggcgttgcggctatgacatagtatacactactgggcttgggtatcaggcgaggcgtctggtgtcatttcctgtccacagaatgattttaccactctagagctttggaaaaggaagcgtcaacttcacaatttgatcacaattacgtatctcgcggaatccacatgactcattccaggggcaacggaagcacaggacttgacatgatctaacacatgtttgttctgggtagtgaaaagaaccgtgaagtcagttgctggctcttttgtactacactcagctgccttgatgtctcctggagcgtaaatagattatatcctactttccgaatagca

SEQ ID NO: 25767 - DNA, 1200 bp, Muscodor strobelii
  misc_feature: SGI cDNA ID NO. 568797
  misc_feature: Encodes the peptide sequence at SEQ ID NO 25768
atgctcctgccaagaaccggagctgtgatatcatctttcgttcttcccgcgttgccggctcttacacccagccctaaatccctggaccgatctttctctctaagtgctcaacgtgacgcatcgaaagtctgtgttgtcgacgcctcggtcggagatgctggtcctgctctcatagcagctgcgatagaatgtaacaacggaggcaccgtggtgctgttgccagacacaacatacaccattgcttcaccaacggacttgacatttctacagagcattgatatcttgattcttggtactatcgtatttagtgacgatgtcgaatattggcaaacaaaggcgtttgcatatgcatatcaggacgctcgcctgttctggagatttggcggtgccgatgtgaatatctatggattaggcctcggaactttagatggtcttggtcagacatggtggactgcgaagagggctaatgagagtacatggcgcccgattctgtttggcacagatggcctcaccggaggcactgtctcgggactgaatatgaagaactctccaatgtggttcaatgttataatgaactcgacagacatgcttataacagatatcaatatctggaatgaagtaacaaactcaaactgcgtatccttcaagccgaactctaccaacatcttgatccaaaatctacagtgcaacggctctcatggaatatctgtcggaagcttaggtcaatatcagggccaatacgacatagtcgaggacatatatgtgtacaacatctcaatgagcaatgcatcggacggcgcgcggatcaagatttggcctggcgttccgcctaacaccacaggttcaagctctggtggaggcgcgggctatgtgcggaatgtcacatatgaggcattctataatgacaataacgattgggcaatcgaactcacgcagtgttattttgcctcaagtcaggaggcttgtgatctctatccggccgttcttcagattgaagatatcctcttcaaagatttctatggtacgacatccagtgaccacgatcccaaagtcgggaccctaatctgcagcgatccaagcgtatgcaagaatgttcgcgccgagaacataaacatctcgccacctagcggagacacagcgcagtgggtgtgtacaaatatggacgagggccttctggacatcaattgtgttaatagttga

SEQ ID NO: 25768 - protein, 399 aa, Muscodor strobelii
  misc_feature: SGI Peptide ID NO. 568797
  misc_feature (64)..(396): Pfam Id: PF00295 Pfam Desc: Glycosyl hydrolases family 28
  misc_feature (212)..(297): Pfam Id: PF00295 Pfam Desc: Glycosyl hydrolases family 28
  misc_feature (126)..(203): Pfam Id: PF00295 Pfam Desc: Glycosyl hydrolases family 28
  misc_feature (8)..(396): NCBI GI: 145243774 Blast Desc: An11g04040 [Aspergillus niger] gi|89113904|gb|ABD61563.1| exo-polygalacturonase A [Aspergillus niger] gi|134079080|emb|CAK48389.1| protein product [Aspergillus
  misc_feature (15)..(397): NCBI GI: 261357129 Blast Desc: exopolygalacturonase [Verticillium albo-atrum VaMs.102]
  misc_feature (19)..(397): NCBI GI: 256734866 Blast Desc: NECHADRAFT_90495 [Nectria haematococca mpVI 77-13-4]
  misc_feature (1)..(396): NCBI GI: 119485859 Blast Desc: polygalacturonase, [Neosartorya fischeri NRRL 181] gi|119410428|gb|EAW20375.1| polygalacturonase, [Neosartorya fischeri NRRL 181]
  misc_feature (12)..(398): NCBI GI: 256722677 Blast Desc: NECHADRAFT_53111 [Nectria haematococca mpVI 77-13-4]
  misc_feature (15)..(396): NCBI GI: 109945444 Blast Desc: exopolygalacturonase [Fusarium oxysporum f. sp. lycopersici] gi|109945446|dbj|BAE97160.1| exopolygalacturonase [Fusarium oxysporum f. sp. lycopersici] exopolygalacturonase f.
  misc_feature (15)..(396): NCBI GI: 109945464 Blast Desc: exopolygalacturonase [Fusarium oxysporum f. sp. melonis] gi|109945494|dbj|BAE97184.1| exopolygalacturonase [Fusarium oxysporum f. sp. tulipae] gi|109945496|dbj|BAE97185.1|
  misc_feature (5)..(396): NCBI GI: 115386594 Blast Desc: exopolygalacturonase precursor [Aspergillus terreus NIH2624] gi|114190836|gb|EAU32536.1| exopolygalacturonase precursor [Aspergillus terreus NIH2624]
  misc_feature (15)..(396): NCBI GI: 109945424 Blast Desc: exopolygalacturonase [Fusarium oxysporum f. sp. fragariae]
  misc_feature (15)..(396): NCBI GI: 109945416 Blast Desc: exopolygalacturonase [Fusarium oxysporum f. sp. cucumerinum] gi|109945418|dbj|BAE97146.1| exopolygalacturonase [Fusarium oxysporum f. sp. cucumerinum] exopolygalacturonase f.
  misc_feature (25)..(396): SWISSPROT Homolog: EC 3.2.1.67 Galacturan 1,4-alpha-galacturonidase
MLLPRTGAVISSFVLPALPALTPSPKSLDRSFSLSAQRDASKVCVVDASVGDAGPALIAAAIECNNGGTVVLLPDTTYTIASPTDLTFLQSIDILILGTIVFSDDVEYWQTKAFAYAYQDARLFWRFGGADVNIYGLGLGTLDGLGQTWWTAKRANESTWRPILFGTDGLTGGTVSGLNMKNSPMWFNVIMNSTDMLITDINIWNEVTNSNCVSFKPNSTNILIQNLQCNGSHGISVGSLGQYQGQYDIVEDIYVYNISMSNASDGARIKIWPGVPPNTTGSSSGGGAGYVRNVTYEAFYNDNNDWAIELTQCYFASSQEACDLYPAVLQIEDILFKDFYGTTSSDHDPKVGTLICSDPSVCKNVRAENINISPPSGDTAQWVCTNMDEGLLDINCVNS

SEQ ID NO: 25769 - DNA, 1971 bp, Muscodor strobelii
  misc_feature: SGI EST ID NO. CUFF.60762.0
  misc_feature: Variant of the nucleotide sequence at SEQ ID NO 25767
agactgcgtatccttcaagccgaactctaccaacatcttgatccaaaatctacagtgcaacggctctcatggaatatctgtcggaagcttaggtcaatatcagggccaatacgacatagtcgaggacatatatgtgtacaacatctcaatgagcaatgcatcggacggcgcgcggatcaagatttggcctggcgttccgcctaacaccacaggttcaagctctggtggaggcgcgggctatgtgcggaatgtcacatatgaggcattctataatgacaataacgattgggcaatcgaactcacgcagtgttattttgcctcaagtcaggaggcttgtgatctctatccggtatggacatgttcgcatacttctatcattcaaacgaagttgacaatatctaggccgttcttcagattgaagatatcctcttcaaagatttctatggtacgacatccagtgaccacgatcccaaagtcgggaccctaatctgcagcgatccaagcgtatgcaagaatgttcgcgccgagaacataaacatctcgccacctagcggagacacagcgcagtgggtgtgtacaaatatggacgagggccttctggacatcaattgtgttaatagttgattaaatggcaactataatcaaatgtcaattggcaaaagcttctgcttgcatttacgtatgatgagttggatgccacctgacgagttcaccctgtctgtctcgattcgtactcattcatcatgtttgggttcgtccttgtctaagaatgtgacgtttcatcgcccctcgaactggaattaagatgctcggtgttatcgtcgagcctgtcgaagaaataccagatatcttgtcctatatgttcgctgcggaactcgctgcagaacacattgcgggtatagtatggtgtgtactcaacgccggcaacatagggctgaaggctctaccaattagctgataacatcccctttaaaacccaaaccttttcttcctccgcgttcgagaatgtatatgccccaaaatcccctgtgtcatcgcagtttcgtctgaacgagtcttcccatctgttaagccaaggttcgtaaacgtcttcgtaccatgatgttccgtatcgagcttcgatgtcatcctcgtccaccgagcactcaccctcgggattcccaggccaacttgtcttataccatagatagcttgctccccagcccgggaacaaacgatatttcaagcctgattctttggagttctgggaatagatggtgtcggatgcttttgcagcaccgtccttgagcttggcgcgtactttccccttcgtatttattgtattgagcgtcgctgatcgaagcccaaaagccggaccgccaaacccgacaactaaagacgttcgatggcatcccatgcaggcgagcctcttcctggcccggggacaaggtcaagaatctcaccacggttatgcacggcttttctacaactcataagttcaaattgttcaatcaaagtggctgctaggtgcgccctaacgggatagtccaaggattgggtagtattgagtatttgcggggttgatcatgcgtgccatagttgcataacggatcttgcttggcatattcgaattgcgttgaccaagctgaggccgatgcattagtgagttgacatattatggccttttattctccttgtaaagagcacgacccgcgcagtgtaaatgaaataacgctagttaattgaggtttgccattgctggagttgactggccttttagtcgaggtgtgaaataaaggacatgcctcaattattaccaacttagctataagtagtacctccgttcatgtacgtgatgttttatctggggctcgcagccggagtggtggcattcccatatgtaccaagccatgtcggtgttcgggagtcggacgtcaatcgatgcaacaccgatagcttcgaaccacaagcacaactaacggttgctgctcg

SEQ ID NO: 25770 - DNA, 453 bp, Muscodor strobelii
  misc_feature: SGI cDNA ID NO. 568798
  misc_feature: Encodes the peptide sequence at SEQ ID NO 25771
atgtcgactactattttgactcagactggcacagactggcagaaaagtgccgcggcttctattgagtctttcgcacacgctgtgacaccgagcagtcaggccatgcttcggctagtctcttgttacgactcagtcacgttcgacttttctgattggaaaccagaggaattgaacgagaatacgacatcattctattggggcatttcagaaggttcggttgatattagttgcttcaacttaaagaaaaacaagttgatgagtgacatgcatgctgcaaccttgagcactgacagcgacgatgccgagtccggtaaagacatagtttgcatccacgattggtgtgtccatcaggctcgagctcaggatagttatatcccagggcagagatacttccggttcgaaagagggcgttatgcaagtgccctgccgctccaaggcttgagactcaagtaa

SEQ ID NO: 25771 - protein, 150 aa, Muscodor strobelii
  misc_feature: SGI Peptide ID NO. 568798
MSTTILTQTGTDWQKSAAASIESFAHAVTPSSQAMLRLVSCYDSVTFDFSDWKPEELNENTTSFYWGISEGSVDISCFNLKKNKLMSDMHAATLSTDSDDAESGKDIVCIHDWCVHQARAQDSYIPGQRYFRFERGRYASALPLQGLRLK

SEQ ID NO: 25772 - DNA, 1352 bp, Muscodor strobelii
  misc_feature: SGI EST ID NO. CUFF.60766.0
  misc_feature: Variant of the nucleotide sequence at SEQ ID NO 25770
tacccaagcaccgatgacggcagagtaagaaagaggctaggatcaacacgaagtcggcgtcaatgctgcattaggcaagtatctcacgtaaaacacaccaatccagccatacggcgcactgaacacagcgatcacatgtcagtaacaagacataccatagcgtttcggacagcccgttggctgatatgtatgtatatattgaatagtatgtcagaaacttgtttcaactccatgagttgatttggagatgacattttgcttctcattctcacactttgtatcttacaactgacattctcacttgcgtccaacttgcatccagcttggtcctgtcttaaataacattgagctcggaatatagaccctctcacacaagatgtcgactactattttgactcagactggcacagactggcagaaaagtgccgcggcttctattgagtctttcgcacacgctgtgacaccgagcagtcaggccatgcttcggctagtctcttgttacgactcagtcacgttcgacttttctgattggaaaccagaggaattgaacgagaatacgacatcattctattggggcatttcagaaggttcggttgatattagttgcttcaacttaaagaaaaacaagttgatgagtgacatgcatgctgcaaccttgagcactgacagcgacgatgccgagtccggtaaagacatagtttgcatccacgattggtgtgtccatcaggctcgagctcaggatagttatatcccagggcagagatacttccggttcgaaagagggcgttatgcaagtgccctgccgctccaaggcttgagactcaagtaaagacggaaacaatgggtatcacatgaattcggcgcaatagtagttgtaaaatatcggcaagcgaagtcaacttttttatggcggtcattttgaaatcgttgggaaggcgttatcgagcgtttgggattcaagaacttcatggcggtttggtttcagttacactctcccgacccactagcaggtacgcggggttgggtcgcgcggtttagctggattcttccaacaccatcatcggtcaagcatttcagcaatatgaattctcttctacatcaacatggcaataattatgtcgttcagtgcatgaatatggagatctaggtacttgcacggcgggttagtctttcaatttataagagagtacgatgctgcattcatattacttgtcattgcttccgacagataccaggccttagcatgaagtgtgtttttaaaataatttttcatgaggtctacacaatacagtactaagaatcacggaataagtagattataagtcgttggtttccatcatttgcgttacaaa

SEQ ID NO: 25773 - DNA, 555 bp, Muscodor strobelii
  misc_feature: SGI cDNA ID NO. 568799
  misc_feature: Elevated expression when VOC is produced
  misc_feature: Encodes the peptide sequence at SEQ ID NO 25774
atgaaacacgcaactcaagtcgaacaagacgaatctcttcgtaatacgcgttccgctcaggtcgatctgaggcagaactatcccaagtcaaaattcgcagatcctacactatttcccaccttcactgatctgcctcaacttgtcgacccttcaggatggccgtcttccgagcagaaaccccaagacgctggatcagggtctttggcgaacacatggtatctgttggcgcagatcaaagagaacatgactatcaccaaacctacgctcatcgtcacggactggacaggtcgtgacttcgtgctgctattcgaggataacgccgtaagcttgaaaagatttcgcaaacgatacactatgattatactgtgtgcaaggagaacaaagcgatataataaaaacgatgagctccgtattccggctgatggtggtactgaagtccaagtgatacctggaagccttgaccggatccttgagatgcgggaagagaaaggttacttacgtcgagctaaatcaaacttaggaatgccaaacccgaaactggcagaccgagcataa

SEQ ID NO: 25774 - protein, 184 aa, Muscodor strobelii
  misc_feature: SGI Peptide ID NO. 568799
  misc_feature (80)..(169): NCBI GI: 261352109 Blast Desc: conserved [Verticillium albo-atrum VaMs.102]
  misc_feature (71)..(162): NCBI GI: 171693743 Blast Desc: protein product [Podospora anserina] gi|170946820|emb|CAP73624.1| protein product [Podospora anserina]
  misc_feature (72)..(127): NCBI GI: 116197797 Blast Desc: [Chaetomium globosum CBS 148.51] gi|88178333|gb|EAQ85801.1| [Chaetomium globosum CBS 148.51]
  misc_feature (38)..(161): NCBI GI: 154300042 Blast Desc: [Botryotinia fuckeliana B05.10] gi|150856823|gb|EDN32015.1| [Botryotinia fuckeliana B05.10]
  misc_feature: Useful for introducing or modulating the production of volatile compounds
MKHATQVEQDESLRNTRSAQVDLRQNYPKSKFADPTLFPTFTDLPQLVDPSGWPSSEQKPQDAGSGSLANTWYLLAQIKENMTITKPTLIVTDWTGRDFVLLFEDNAVSLKRFRKRYTMIILCARRTKRYNKNDELRIPADGGTEVQVIPGSLDRILEMREEKGYLRRAKSNLGMPNPKLADRA

SEQ ID NO: 25775 - DNA, 1438 bp, Muscodor strobelii
  misc_feature: SGI EST ID NO. CUFF.60769.0
  misc_feature: Variant of the nucleotide sequence at SEQ ID NO 25773
ctgtactagaatatagagcaatgatcaaaccatgataaaggtcctgagttccttgcagcacccggcgcctataggtatttgattcacttgccaaacctagacctaaactcaagcctgatatcggatctccgcacaagcttttgaaagtggatcagtatacaaaagtcatgaaacacgcaactcaagtcgaacaagacgaatctcttcgtaatacgcgttccgctcaggtcgatctgaggcagaactatcccaagtcaaaattcgcagatcctacactatttcccaccttcactgatctgcctcaacttgtcgacccttcaggatggccgtcttccgagcagaaaccccaagacgctggatcagggtctttggcgaacacatggtatctgttggcgcagatcaaagagaacatgactatcaccaaacctacgctcatcgtcacggactggacaggtcgtgacttcgtgctgctattcgaggataacgccgtaagcttgaaaagatttcgcaaacgatacactatgattatactgtgtgcaaggagaacaaagcgatataataaaaacgatgagctccgtattccggctgatggtggtactgaagtccaagtgatacctggaagccttgaccggatccttgaggtgggcgttttattgaacagtgaggaagctcagcggagatgcgcggcttgcggaaagacggaaggcagcctactcaagtgtacagcgtgtcaggtgacgccatattgcggaaaggaatgccaaacccgaaactggcagaccgagcataaagcttcctgtaagatcatacaagcattggagaatataacggcacacgtggcctagttcgaggcttgctgggctacgcacgattataatgcgagagggaaaattgagagttgaacaaagcctaagctctcggttgcaattgtgaactcggacaagcgatccgctcgctcttagctattcttgatcataaattcttctgaaattgctaagtagatagcgtgaggtccgtcgagctgaggaaaagaagtgtaggaaccagaacgtcagaaagagctttttggcttgcgggatcgtccttttaggcttgcatacatatcaagaatgtattagaatgcaaggggcatctatccacagtcaccaccgttgtcagaaggcttatgcgtcaatatcaagattatatcatgtcaatattaggcatgctgaatgtaaggggagatattagtaatgcttttgaattactcggtcaaactcgtactctttgcataacattggatacaagagctgatgactagcagatagttcaacgagtccattgataatgcgtactggaagttttaaaacgatgagctggataaaagaagtagaaacataaggcccattgagttccgaatgcctctctggagcgttacctaagaggactccaagagcgg

SEQ ID NO: 25776 - DNA, 615 bp, Muscodor strobelii
  misc_feature: SGI cDNA ID NO. 568800
  misc_feature: Encodes the peptide sequence at SEQ ID NO 25777
atgaaacacgcaactcaagtcgaacaagacgaatctcttcgtaatacgcgttccgctcaggtcgatctgaggcagaactatcccaagtcaaaattcgcagatcctacactatttcccaccttcactgatctgcctcaacttgtcgacccttcaggatggccgtcttccgagcagaaaccccaagacgctggatcagggtctttggcgaacacatggtatctgttggcgcagatcaaagagaacatgactatcaccaaacctacgctcatcgtcacggactggacaggtcgtgacttcgtgctgctattcgaggataacgcccgatataataaaaacgatgagctccgtattccggctgatggtggtactgaagtccaagtgatacctggaagccttgaccggatccttgaggtgggcgttttattgaacagtgaggaagctcagcggagatgcgcggcttgcggaaagacggaaggcagcctactcaagtgtacagcgtgtcaggtgacgccatattgcggaaaggaatgccaaacccgaaactggcagaccgagcataaagcttcctgtaagatcatacaagcattggagaatataacggcacacgtggcctag

SEQ ID NO: 25777 - protein, 204 aa, Muscodor strobelii
  misc_feature: SGI Peptide ID NO. 568800
  misc_feature (151)..(190): Pfam Id: PF01753 Pfam Desc: MYND finger
  misc_feature (71)..(199): NCBI GI: 171693743 Blast Desc: protein product [Podospora anserina] gi|170946820|emb|CAP73624.1| protein product [Podospora anserina]
  misc_feature (31)..(196): NCBI GI: 261352109 Blast Desc: conserved [Verticillium albo-atrum VaMs.102]
  misc_feature (38)..(199): NCBI GI: 154300042 Blast Desc: [Botryotinia fuckeliana B05.10] gi|150856823|gb|EDN32015.1| [Botryotinia fuckeliana B05.10]
  misc_feature (143)..(195): NCBI GI: 169846118 Blast Desc: [Coprinopsis cinerea okayama7#130] gi|116509102|gb|EAU91997.1| [Coprinopsis cinerea okayama7#130]
  misc_feature (140)..(196): NCBI GI: 167533183 Blast Desc: [Monosiga brevicollis MX1] gi|163773392|gb|EDQ87033.1| [Monosiga brevicollis MX1]
  misc_feature (24)..(194): NCBI GI: 46139505 Blast Desc: FG11267.1 [Gibberella zeae PH-1]
  misc_feature (30)..(194): NCBI GI: 256733710 Blast Desc: NECHADRAFT_78092 [Nectria haematococca mpVI 77-13-4]
  misc_feature (151)..(203): NCBI GI: 170101132 Blast Desc: [Laccaria bicolor S238N-H82] gi|164643138|gb|EDR07391.1| [Laccaria bicolor S238N-H82]
  misc_feature (145)..(192): NCBI GI: 238845315 Blast Desc: conserved [Microsporum canis CBS 113480]
  misc_feature (34)..(190): NCBI GI: 170104306 Blast Desc: [Laccaria bicolor S238N-H82] gi|164641820|gb|EDR06079.1| [Laccaria bicolor S238N-H82]
MKHATQVEQDESLRNTRSAQVDLRQNYPKSKFADPTLFPTFTDLPQLVDPSGWPSSEQKPQDAGSGSLANTWYLLAQIKENMTITKPTLIVTDWTGRDFVLLFEDNARYNKNDELRIPADGGTEVQVIPGSLDRILEVGVLLNSEEAQRRCAACGKTEGSLLKCTACQVTPYCGKECQTRNWQTEHKASCKIIQALENITAHVA

SEQ ID NO: 25778 - DNA, 1438 bp, Muscodor strobelii; identical to SEQ ID NO: 25775
  misc_feature: SGI EST ID NO. CUFF.60769.0
  misc_feature: Variant of the nucleotide sequence at SEQ ID NO 25776

SEQ ID NO: 25779 - DNA, 2265 bp, Muscodor strobelii
  misc_feature: SGI cDNA ID NO. 568801
  misc_feature: Encodes the peptide sequence at SEQ ID NO 25780
atgtttcgagtagccatcaatcaactgtttgggacaaaacagctcaatagtagagctccggcaatcattgaagacttcccatctccatggctccaacgatttggaaaaaagctatttcccgaggacaattttcattctggtttagcaccagaattccccccaataaatgatcctttgtattatgacatattccccaccccaggcagcttccaacccccgaaaaacttcgaggaagccgaacgggtcttccatgccgaggacagacagaaacaccggggtaggctcggacaggaaacgtggcgggccacagctttgaatcacatcgttggttttcctccgctcgggtatatttccggtggacacagcctcgtagatcgaggaaccgaatccgtactcgaagaattctatgaaaggggaagaataaccgtcaacgaaaacgaatggctggctctcttccgcaaggacagatggtatgactcgatcgacgacttcccattaacgccagacaaagataggggaacaatctggagcatagacaaccccgaatattgggatgtaattagcatttcattcgagttagcagaccgcatgctcaaagcactgattcaagatgggaacgaatttgaccagaaccgctccgtcgtcgactcgacacagagatttacagacctgaccgcctccacatattttaccataggtcgggatgaggaagacgcctatggttccaccgacttggtcggcacagacatccttgtcaccatcaattttcgagaggttgaacaactgataactcagaaactaagtattgctgaacgatgcaatcaccactttcaacttgctgttacggtactccacgagagtatgcatgctattctttatgctcgccgtaacaaagatacgttgccgataaccaagcgagatgagctggatgagctggtagaacttggcgcgaccagagaccaagaaccttatgtcgatgctaccggcctcactgaaattggatacgatggcgaagtcggatttttcgggggcaaattaagttgcaatccccgcaaagtgccaatctcatgtcttgtagagcaatacccgagtgccgaagcagacacagacacggctattccagggagaagcccgttcctcgatgcaaattccataatgttcagggaattcgtgccagccatctatacctccaagttactgtcccaggggttctgggaagatgacgcgtatccaaataaatcgcagaatcgctttcatcgaaacccaatcatcaggtcccggacggccaatgggggccatacaactaaaaatgtggcgctgccgaaagtccgggtgtatctcaactcacttcctcaggtctatcgggaggatgcattgacgaagcagtgttacgaggaaaagcaggaccactggaatactcttcgagcaggctggagcgcttacgtcgatgaaagtatgaagattctgctgacattctggcgagtacttatagccaacttcgcagaggcgtttgaaaaacgggatgaaatcaagtgcggtaatgtcgctgataaactcctgaggaggacgagatggtcgaggcacgactgggacaggttaaaagactcattgccgaatgcagatgacctggaggatatatggtttttctgggccattggtacgcgggacttgttttacttggacttcaagactcttgtcttctccggctcacctcgtgattatttagctttgcttatgtgtgcagcaacgcctttgcgacacgaagagctcatactggaacggcatagcatacgcccgcccttctatttcacgcacacgccaagtagagccgcctcggccgcaggacggctggccataagaaaggttgggccccgtggcgccgtcgaagaagtgacagctgatgccagtgaactgcatgataagtttttcggccgaggaacagtctctgccggcggtttcacccagcttgactaccttcagcaagtacagcatttacttcaactgctccacaccgacggaaagttggtctcgatagcctgtgtcaggtgtatcgagtcttgttacttggaccttttacagcaacgacaagaactggaacagcaatacccaaaccagggccacactttcaaatgggcggcgacttggccgttccaattccccaagggtgaaaacaccgtatgtgcttacgatccggcgcattttggttacaggccgaaaaggaggaacgacgacggcagttgggctttcgtggaatcaggtccatga

SEQ ID NO: 25780 - protein, 754 aa, Muscodor strobelii
  misc_feature: SGI Peptide ID NO. 568801
  misc_feature (31)..(202): NCBI GI: 85089861 Blast Desc: NCU09292 [Neurospora crassa OR74A] gi|28919473|gb|EAA28908.1| NCU09292 [Neurospora crassa OR74A]
MFRVAINQLFGTKQLNSRAPAIIEDFPSPWLQRFGKKLFPEDNFHSGLAPEFPPINDPLYYDIFPTPGSFQPPKNFEEAERVFHAEDRQKHRGRLGQETWRATALNHIVGFPPLGYISGGHSLVDRGTESVLEEFYERGRITVNENEWLALFRKDRWYDSIDDFPLTPDKDRGTIWSIDNPEYWDVISISFELADRMLKALIQDGNEFDQNRSVVDSTQRFTDLTASTYFTIGRDEEDAYGSTDLVGTDILVTINFREVEQLITQKLSIAERCNHHFQLAVTVLHESMHAILYARRNKDTLPITKRDELDELVELGATRDQEPYVDATGLTEIGYDGEVGFFGGKLSCNPRKVPISCLVEQYPSAEADTDTAIPGRSPFLDANSIMFREFVPAIYTSKLLSQGFWEDDAYPNKSQNRFHRNPIIRSRTANGGHTTKNVALPKVRVYLNSLPQVYREDALTKQCYEEKQDHWNTLRAGWSAYVDESMKILLTFWRVLIANFAEAFEKRDEIKCGNVADKLLRRTRWSRHDWDRLKDSLPNADDLEDIWFFWAIGTRDLFYLDFKTLVFSGSPRDYLALLMCAATPLRHEELILERHSIRPPFYFTHTPSRAASAAGRLAIRKVGPRGAVEEVTADASELHDKFFGRGTVSAGGFTQLDYLQQVQHLLQLLHTDGKLVSIACVRCIESCYLDLLQQRQELEQQYPNQGHTFKWAATWPFQFPKGENTVCAYDPAHFGYRPKRRNDDGSWAFVESGP

SEQ ID NO: 25781 - DNA, 918 bp, Muscodor strobelii
  misc_feature: SGI cDNA ID NO. 568802
  misc_feature: Encodes the peptide sequence at SEQ ID NO 25782
atgtttggtgatatgctaaggaaagggcgcgaagtcctgaagcccaccccagtcaaaaagaaggatccaaaggcgcctgtacaagtcatctacagatcaaacgatattgccattcctagcgactatctcaagtctaatcctgttgatgcaaagccgatcacctacaaacgaatcgacttcgaaaattcgatcttgccggagtataaggggtgttatgcagtcgttctagacaatgttctcagtccctctgaatctgcgcagctcatcgagctcgctgaggccagcgttatggacgaggacaaagaggatggttcttcgtggcggccagctctagtcaatattggtggaggcttcgaagtagaaatcccggactaccgaaaaggtcatcgtatcatttgggacacgcaggaaatcgtcgacagaatctgggcacgtctcgctaccgtacccgaggtcaaggacagcctgcagacgctacctggtgccgtatcaggtatgagggtcgacaaaaataagtacgaattcgtcagagtcaatcaccgtatgcgcttcttgaaatatgtccctggcgacttcttcaaaccacattgcgatggcccgtatggagaaccaacgccagatggtggatatgtccagacatatatgacggtacacttatacctcaacgactcgcaacaagaagctgggccaagtgtggacctaatcggcggtgcaacatcattcttatcgcgagatgacacacggaagatagatgtcgacccgaaggcgggtagagtgctcatctttcaacacgctcgtttgagacactcaggcgcagacattcaagcaggaacaaagttcacggttcgcacagatatcatgtatagggaaaaggcatccataggagaggaccacaaggatgggatggatacaacttag

SEQ ID NO: 25782 - protein, 305 aa, Muscodor strobelii
  misc_feature: SGI Peptide ID NO. 568802
  misc_feature (26)..(288): NCBI GI: 145610711 Blast Desc: MGG_00953 [Magnaporthe grisea 70-15] gi|145018093|gb|EDK02372.1| MGG_00953 [Magnaporthe grisea 70-15]
  misc_feature (26)..(297): NCBI GI: 46137753 Blast Desc: FG10392.1 [Gibberella zeae PH-1]
  misc_feature (28)..(297): NCBI GI: 256720706 Blast Desc: NECHADRAFT_96702 [Nectria haematococca mpVI 77-13-4]
  misc_feature (16)..(301): NCBI GI: 261352107 Blast Desc: conserved [Verticillium albo-atrum VaMs.102]
  misc_feature (15)..(288): NCBI GI: 171693741 Blast Desc: protein product [Podospora anserina] gi|170946819|emb|CAP73623.1| protein product [Podospora anserina]
  misc_feature (26)..(290): NCBI GI: 16944620 Blast Desc: conserved [Neurospora crassa]
  misc_feature (26)..(290): NCBI GI: 164426440 Blast Desc: NCU04260 [Neurospora crassa OR74A] gi|157071336|gb|EAA32015.2| conserved [Neurospora crassa OR74A]
  misc_feature (23)..(289): NCBI GI: 119194795 Blast Desc: CIMG_01772 [Coccidioides immitis RS]
  misc_feature (23)..(289): NCBI GI: 240105155 Blast Desc: CPC735_047180 [Coccidioides posadasii C735 delta SOWgp]
  misc_feature (27)..(297): NCBI GI: 154303970 Blast Desc: BC1G_08869 [Botryotinia fuckeliana B05.10] gi|150854453|gb|EDN29645.1| BC1G_08869 [Botryotinia fuckeliana B05.10]
MFGDMLRKGREVLKPTPVKKKDPKAPVQVIYRSNDIAIPSDYLKSNPVDAKPITYKRIDFENSILPEYKGCYAVVLDNVLSPSESAQLIELAEASVMDEDKEDGSSWRPALVNIGGGFEVEIPDYRKGHRIIWDTQEIVDRIWARLATVPEVKDSLQTLPGAVSGMRVDKNKYEFVRVNHRMRFLKYVPGDFFKPHCDGPYGEPTPDGGYVQTYMTVHLYLNDSQQEAGPSVDLIGGATSFLSRDDTRKIDVDPKAGRVLIFQHARLRHSGADIQAGTKFTVRTDIMYREKASIGEDHKDGMDTT

SEQ ID NO: 25783 - DNA, 1877 bp, Muscodor strobelii
  misc_feature: SGI EST ID NO. CUFF.60796.0
  misc_feature: Variant of the nucleotide sequence at SEQ ID NO 25781
tggaacaggctttgtcttaatttcggcactgattctagactcttggccccatttgtcctgaagctataatttcctcctgtcccccagcacggaatcttacctgttcaatgctttcactatcatttcgttctggtgagcgacattgcagttcgactactaattatcaatacgcagttgttgataagtacttacctctcatgggctcacggactagttgtccaccacgtctatacacctactcatccggtcgaacccaaggatttaaggcggtctgctgtctcgttgcagagaactccaagcccaaatagggtcttctgaaatgccgtcctactgcctgtagaaatggatttacatgtacaggtaggcaagttggactcgcgctaactgttgtcggcgatctgcattttacccatatcgttgactagtagatatggcatgcctatgagatggacaaattttttatctcaatgtcagaccatttgtttacaagattcgatcatgtgtcctttttctcagaaaacaagcgggcaggattgatggattgtcatatgtttgagtaatatgcagcaatagggcgttcaagttttgctgcctgttgcccagtgccactacacccgccatgtgctgcgcctcattaggctgcctgatatacccggcgcttttcaaactgttgtctttcaatgtgtacacagaatgtaccgatataaatacagcgttagacgaggaatcggatatctccaaaacttccgtctcccttccgatctgattgtgctgcctgcaaaagctctctatcccaataagacaacctatcttagtcccgttaattcaaagatgtttggtgatatgctaaggaaagggcgcgaagtcctgaagcccaccccagtcaaaaagaaggatccaaaggcgcctgtacaagtcatctacagatcaaacgatattgccattcctagcgactatctcaagtctaatcctgttgatgcaaagccgatcacctacaaacgaatcgacttcgaaaattcgatcttgccggagtataaggggtgttatgcagtcgttctagacaatgttctcagtccctctgaatctgcgcagctcatcgagctcgctgaggccagcgttatggacgaggacaaagaggatggttcttcgtggcggccagctctagtcaatattggtggaggcttcgaagtagaaatcccggactaccgaaaaggtcatcgtatcatttgggacacgcaggaaatcgtcgacagaatctgggcacgtctcgctaccgtacccgaggtcaaggacagcctgcagacgctacctggtgccgtatcaggtatgagggtcgacaaaaataagtacgaattcgtcagagtcaatcaccgtatgcgcttcttgaaatatgtccctggcgacttcttcaaaccacattgcgatggcccgtatggagaaccaacgccagatggtggatatgtccagacatatatgacggtacacttatacctcaacgactcgcaacaagaagctgggccaagtgtggacctaatcggcggtgcaacatcattcttatcgcgagatgacacacggaagatagatgtcgacccgaaggcgggtagagtgctcatctttcaacacgctcgtttgagacactcaggcgcagacattcaagcaggaacaaagttcacggttcgcacagatatcatgtatagggaaaaggcatccataggagaggaccacaaggatgggatggatacaacttagatagcccgcagctgctttcagtaatacacagcagatgtatccgaccaagcaatgacccgcgctcttagagattacatttcgtggttctacctcggaatttaacgccgtcattaatcaatacctccgtg

SEQ ID NO: 25784 - DNA, 1008 bp, Muscodor strobelii
  misc_feature: SGI cDNA ID NO. 568803
  misc_feature: Reduced expression when VOC is produced
  misc_feature: Encodes the peptide sequence at SEQ ID NO 25785
atgcgattctctaatgctttaatggccctcgcggccagcgctgcaaccgcttcccctatcagcgaaggagatgctggcatggctcacatgcaacttgaggatagagcggcttctgctgttgccgcgaacaccggtctaaagggtttcaactacggtgctttcttcaacaaccaacaagccaaggtccaggccgatttcgcctacgagttcaaccgtgctaaaagcttgcccggaacctctggatggactagcgctcgtttatacactatggtccaatggggaactacgtcaagcgttatcagcgctattcctgctgccatcgaaactaacaccaagctcctgttaggaatgtggatttctggtaacacggcggccatcaacaacgagatcacagctctgaaagcagccattagcaaatacggcacaaagttcaccgacctcgtcattggtatttcagtcggtagcgaggatctatacagagattccgttggcgaggttggtacatccgccgactacctgatttccagcattgccaaggttcgcagcgccgttgctggaacagcattggcgaagacaccaattggccacgtcgacacttacaatgctttcctgaatggcacgaacgccaaggtcattcctaagatcgattggctcgggtttgacggctacccatattgggagtctaccttggccaactcgatcagcaatgctgagacccgattcttcgatggatacaataagaccgtcaagttggccgctggaaagcctgtctgggttactgagacaggctggcccgtgaccggcaagaagcagaaccttgccgttcccagtgccgctaatgcccgtatctactggcagaagattgcctgctctctcatcaagaagaaggtcaacctcttctggtacgacctccaggaggctcagtacggcaatccttcccctgacttcggtatctacggtgccggtgatcttggaaccctcaagcctcgttactctcttgcctgttaa

SEQ ID NO: 25785 - protein, 335 aa, Muscodor strobelii
  misc_feature: SGI Peptide ID NO. 568803
  misc_feature (46)..(335): NCBI GI: 39969581 Blast Desc: MGG_10400 [Magnaporthe grisea 70-15] gi|145015129|gb|EDJ99697.1| MGG_10400 [Magnaporthe grisea 70-15]
  misc_feature (41)..(335): NCBI GI: 189196040 Blast Desc: GPI-anchored cell wall beta-1,3-endoglucanase EglC [Pyrenophora tritici-repentis Pt-1C-BFP] gi|187980237|gb|EDU46863.1| GPI-anchored cell wall EglC
  misc_feature (42)..(335): NCBI GI: 169597565 Blast Desc: SNOG_01569 [Phaeosphaeria nodorum SN15] gi|160707547|gb|EAT91218.2| SNOG_01569 [Phaeosphaeria nodorum SN15]
  misc_feature (30)..(335): NCBI GI: 169764309 Blast Desc: [Aspergillus oryzae RIB40] gi|83764480|dbj|BAE54624.1| protein product [Aspergillus oryzae]
  misc_feature (36)..(335): NCBI GI: 212541048 Blast Desc: GPI-anchored cell wall beta-1,3-endoglucanase EglC [Penicillium marneffei ATCC 18224] gi|210067978|gb|EEA22070.1| GPI-anchored cell wall beta-1,3-endoglucanase EglC [Penicillium
  misc_feature (29)..(335): NCBI GI: 226505096 Blast Desc: LOC100274291 [Zea mays] gi|194707254|gb|ACF87711.1| [Zea mays]
  misc_feature (27)..(335): NCBI GI: 145235523 Blast Desc: An03g05290 [Aspergillus niger] gi|134058095|emb|CAK49181.1| protein product [Aspergillus niger]
  misc_feature (47)..(321): NCBI GI: 159128517 Blast Desc: GPI-anchored cell wall beta-1,3-endoglucanase EglC [Aspergillus fumigatus A1163]
  misc_feature (47)..(321): NCBI GI: 70985687 Blast Desc: GPI-anchored cell wall beta-1,3-endoglucanase EglC [Aspergillus fumigatus Af293] gi|66845978|gb|EAL86311.1| GPI-anchored cell wall beta-1,3-endoglucanase EglC [Aspergillus
  misc_feature (36)..(335): NCBI GI: 242799831 Blast Desc: GPI-anchored cell wall beta-1,3-endoglucanase EglC [Talaromyces stipitatus ATCC 10500] gi|218716806|gb|EED16227.1| GPI-anchored cell wall beta-1,3-endoglucanase EglC [Talaromyces
  misc_feature (45)..(335): SWISSPROT Homolog: EC 3.2.1.58 Glucan 1,3-beta-glucosidase
  misc_feature: Useful for introducing or modulating the production of volatile compounds
MRFSNALMALAASAATASPISEGDAGMAHMQLEDRAASAVAANTGLKGFNYGAFFNNQQAKVQADFAYEFNRAKSLPGTSGWTSARLYTMVQWGTTSSVISAIPAAIETNTKLLLGMWISGNTAAINNEITALKAAISKYGTKFTDLVIGISVGSEDLYRDSVGEVGTSADYLISSIAKVRSAVAGTALAKTPIGHVDTYNAFLNGTNAKVIPKIDWLGFDGYPYWESTLANSISNAETRFFDGYNKTVKLAAGKPVWVTETGWPVTGKKQNLAVPSAANARIYWQKIACSLIKKKVNLFWYDLQEAQYGNPSPDFGIYGAGDLGTLKPRYSLAC

SEQ ID NO: 25786 - DNA, 1714 bp, Muscodor strobelii
  misc_feature: SGI EST ID NO. CUFF.60937.0
  misc_feature: Variant of the nucleotide sequence at SEQ ID NO 25784
cgaaaactggggtcgatgatgtgatccctgactcgaatctttcgatcttgattctttaatgcgtacctgacataatagctccctttccttctctcttgtttatttgatcttcatctcatcattctttcgctagtcttctcaccttagattcgtctgttcgttcgttcatagacggagcctaattgtagaagcttccactcgctcatatttcgcgtcttatcttattttcttggaaaatctttagggcttagtagaccataatgcgattctctaatgctttaatggccctcgcggccagcgctgcaaccgcttcccctatcagcgaaggagatgctggcatggctcacatgcaacttgaggatagagcggcttctgctgttgccgcgaacaccggtctaaagggtttcaactacggtgctttcttcaacaaccaacaagccaaggtccaggccgatttcgcctacgagttcaaccgtgctaaaagcttgcccggaacctctggatggactagcgctcgtttatacactatggtccaatggggaactacgtcaagcgttatcagcgctattcctgctgccatcgaaactaacaccaagctcctgttaggaatgtggatttctggtaacacggcggccatcaacaacgagatcacagctctgaaagcagccattagcaaatacggcacaaagttcaccgacctcgtcattggtatttcagtcggtagcgaggatctatacagagattccgttggcgaggttggtacatccgccgactacctgatttccagcattgccaaggttcgcagcgccgttgctggaacagcattggcgaagacaccaattggccacgtcgacacttacaatgctttcctgaatggcacgaacgccaaggtcattcctaagatcgattggctcgggtttgacggctacccatattgggagtctaccttggccaactcgatcagcaatgctgagacccgattcttcgatggatacaataagaccgtcaagttggccgctggaaagcctgtctgggttactgagacaggctggcccgtgaccggcaagaagcagaaccttgccgttcccagtgccgctaatgcccgtatctactggcagaagattgcctgctctctcatcaagaagaaggtcaacctcttctggtacgacctccaggaggctcagtacggcaatccttcccctgacttcggtatctacggtgccggtgatcttggaaccctcaagcctcgttactctcttgcctgttaaactcgtgtcggtatcgaggaccgtttccacgacactgaatgataagcatcgagtaatatggtcgaacgtccatattacgtatttattgggtacatcagcgatagacaaaaagggaatggagcatcacggcgcagtagattttctaggaacgcacaactgtgtaatatcaacaatctcgtgcttcacttcaaacaatgctattcaaggcagccgctcgaaggcatatacttgaaaagcttgtacatccagaataactagtatataattgaatagacaccatgaaatggacgcaaaatacccaacgactttcacacattgctactacctagacaaccgttgaagtagctcccctacccaaatgacctttgagacgtgttgcatgcaatggtggtgtgttcgcaaatcactaccccgaaatcccgaattcatgagaagtgacgcacctc

SEQ ID NO: 25787 - DNA, 987 bp, Muscodor strobelii
  misc_feature: SGI cDNA ID NO. 568804
  misc_feature: Reduced expression when VOC is produced
  misc_feature: Encodes the peptide sequence at SEQ ID NO 25788
atggcagcaagtccaccaccgccaggcatttatgtccccgtacctacattctttgtgggtaagaaggccgcaaattacagtgctacggctgcccctccggacatcgacacacagattgcacattcattgtacctcgctaaagcgggaatccgaggtttagtgatccttggcagtacaggcgaggctgtccatttgacgaacaaggagcgctttgaagtcctctcgagcgtccggaaggcgttcgagaaagagggattcaaggactatcctatcattgccgggacagcaacgcagagtatcgaggagaccgtcgagcagctaaagagcgcgaaagaagcgggctcgcaatggggcatggtgttggtacccggatatttcgctggagccagcacgcaagaaggcattattcagtggttcactgctgttgcggaccagagccccataccagtgatgatttatcactatcctggcgtctctaatatggtcaaagtgacgccctcgacgttcgtcaagctggcagcacaccctaacatcgtcggctgcaagctctcgcacggcgacgtttccgtgcacgcacagatagcatccaacccgtcgatcgaccactctcatttccacacctttacgggtctcggacagcaactgctgcccgttattgcggtaggtggagcaggagcgatcgacgggtgcgccgtgttcttccccaagactgtcgtgcggctatatgctctatccgtgaagaacccattaacagacgaggagctggtagagcgtagaaggctgcagtatagagtcagctcagtagaggagctggttgctaagttcgggaccgtgggcattaaagaggcggttagtcgtctgagaggaatgggtgatcgagacggtactcggttgccgctccatggtggcatacctggcggagatgatgagtggaacaattggaagactcaggttgacgacatgcaggaagaggaagatagactataa

SEQ ID NO: 25788 - protein, 328 aa, Muscodor strobelii
  misc_feature: SGI Peptide ID NO. 568804
  misc_feature (6)..(325): Pfam Id: PF00701 Pfam Desc: Dihydrodipicolinate synthetase family
  misc_feature (44)..(194): Pfam Id: PF00701 Pfam Desc: Dihydrodipicolinate synthetase family
  misc_feature (3)..(328): NCBI GI: 46137389 Blast Desc: FG10210.1 [Gibberella zeae PH-1]
  misc_feature (3)..(328): NCBI GI: 256731825 Blast Desc: [Nectria haematococca mpVI 77-13-4]
  misc_feature (16)..(328): NCBI GI: 156065939 Blast Desc: SS1G_00980 [Sclerotinia sclerotiorum 1980] gi|154691839|gb|EDN91577.1| SS1G_00980 [Sclerotinia sclerotiorum 1980]
  misc_feature (3)..(328): NCBI GI: 39973795 Blast Desc: MGG_00956 [Magnaporthe grisea 70-15] gi|145018088|gb|EDK02367.1| MGG_00956 [Magnaporthe grisea 70-15]
  misc_feature (4)..(328): NCBI GI: 169613012 Blast Desc: SNOG_09634 [Phaeosphaeria nodorum SN15] gi|111061779|gb|EAT82899.1| SNOG_09634 [Phaeosphaeria nodorum SN15]
  misc_feature (4)..(328): NCBI GI: 189211006 Blast Desc: dihydrodipicolinate synthetase family protein [Pyrenophora tritici-repentis Pt-1C-BFP] gi|187977927|gb|EDU44553.1| dihydrodipicolinate synthetase family
  misc_feature (1)..(328): NCBI GI: 261359247 Blast Desc: dihydrodipicolinate synthase [Verticillium albo-atrum VaMs.102]
  misc_feature (6)..(326): NCBI GI: 154296852 Blast Desc: BC1G_12515 [Botryotinia fuckeliana B05.10] gi|150843169|gb|EDN18362.1| BC1G_12515 [Botryotinia fuckeliana B05.10]
  misc_feature (1)..(328): NCBI GI: 116178780 Blast Desc: CHGG_00018 [Chaetomium globosum CBS 148.51] gi|88184315|gb|EAQ91783.1| CHGG_00018 [Chaetomium globosum CBS 148.51]
  misc_feature (1)..(328): NCBI GI: 171680624 Blast Desc: protein product [Podospora anserina] gi|170939939|emb|CAP65165.1| protein product [Podospora anserina]
  misc_feature (47)..(300): SWISSPROT Homolog: EC 4.2.1.52 Dihydrodipicolinate synthase
  misc_feature: Useful for introducing or modulating the production of volatile compounds
MAASPPPPGIYVPVPTFFVGKKAANYSATAAPPDIDTQIAHSLYLAKAGIRGLVILGSTGEAVHLTNKERFEVLSSVRKAFEKEGFKDYPIIAGTATQSIEETVEQLKSAKEAGSQWGMVLVPGYFAGASTQEGIIQWFTAVADQSPIPVMIYHYPGVSNMVKVTPSTFVKLAAHPNIVGCKLSHGDVSVHAQIASNPSIDHSHFHTFTGLGQQLLPVIAVGGAGAIDGCAVFFPKTVVRLYALSVKNPLTDEELVERRRLQYRVSSVEELVAKFGTVGIKEAVSRLRGMGDRDGTRLPLHGGIPGGDDEWNNWKTQVDDMQEEEDRL

SEQ ID NO: 25789 - DNA, 507 bp, Muscodor strobelii
  misc_feature: SGI cDNA ID NO. 568805
  misc_feature: Reduced expression when VOC is produced
  misc_feature: Encodes the peptide sequence at SEQ ID NO 25790
atggtcaaagtgacgccctcgacgttcgtcaagctggcagcacaccctaacatcgtcggctgcaagctctcgcacggcgacgtttccgtgcacgcacagatagcatccaacccgtcgatcgaccactctcatttccacacctttacgggtctcggacagcaactgctgcccgttattgcggtaggtggagcaggagcgatcgacgggtgcgccgtgttcttccccaagactgtcgtgcggctatatgctctatccgtgaagaacccattaacagacgaggagctggtagagcgtagaaggctgcagtatagagtcagctcagtagaggagctggttgctaagttcgggaccgtgggcattaaagaggcggttagtcgtctgagaggaatgggtgatcgagacggtactcggttgccgctccatggtggcatacctggcggagatgatgagtggaacaattggaagactcaggttgacgacatgcaggaagaggaagatagactataa

SEQ ID NO: 25790 - protein, 168 aa, Muscodor strobelii
  misc_feature: SGI Peptide ID NO. 568805
  misc_feature (2)..(168): NCBI GI: 46137389 Blast Desc: FG10210.1 [Gibberella zeae PH-1]
  misc_feature (2)..(168): NCBI GI: 256731825 Blast Desc: [Nectria haematococca mpVI 77-13-4]
  misc_feature (2)..(168): NCBI GI: 156065939 Blast Desc: SS1G_00980 [Sclerotinia sclerotiorum 1980] gi|154691839|gb|EDN91577.1| SS1G_00980 [Sclerotinia sclerotiorum 1980]
  misc_feature (2)..(168): NCBI GI: 39973795 Blast Desc: MGG_00956 [Magnaporthe grisea 70-15] gi|145018088|gb|EDK02367.1| MGG_00956 [Magnaporthe grisea 70-15]
  misc_feature (2)..(168): NCBI GI: 169613012 Blast Desc: SNOG_09634 [Phaeosphaeria nodorum SN15] gi|111061779|gb|EAT82899.1| SNOG_09634 [Phaeosphaeria nodorum SN15]
  misc_feature (2)..(166): NCBI GI: 156043932 Blast Desc: SS1G_10069 [Sclerotinia sclerotiorum 1980] gi|154694458|gb|EDN94196.1| SS1G_10069 [Sclerotinia sclerotiorum 1980]
  misc_feature (2)..(168): NCBI GI: 189211006 Blast Desc: dihydrodipicolinate synthetase family protein [Pyrenophora tritici-repentis Pt-1C-BFP] gi|187977927|gb|EDU44553.1| dihydrodipicolinate synthetase family
  misc_feature (2)..(166): NCBI GI: 154296852 Blast Desc: BC1G_12515 [Botryotinia fuckeliana B05.10] gi|150843169|gb|EDN18362.1| BC1G_12515 [Botryotinia fuckeliana B05.10]
  misc_feature (4)..(168): NCBI GI: 261359247 Blast Desc: dihydrodipicolinate synthase [Verticillium albo-atrum VaMs.102]
  misc_feature (2)..(168): NCBI GI: 116178780 Blast Desc: CHGG_00018 [Chaetomium globosum CBS 148.51] gi|88184315|gb|EAQ91783.1| CHGG_00018 [Chaetomium globosum CBS 148.51]
  misc_feature: Useful for introducing or modulating the production of volatile compounds
MVKVTPSTFVKLAAHPNIVGCKLSHGDVSVHAQIASNPSIDHSHFHTFTGLGQQLLPVIAVGGAGAIDGCAVFFPKTVVRLYALSVKNPLTDEELVERRRLQYRVSSVEELVAKFGTVGIKEAVSRLRGMGDRDGTRLPLHGGIPGGDDEWNNWKTQVDDMQEEEDRL

SEQ ID NO: 25791 - DNA, 357 bp, Muscodor strobelii
  misc_feature: SGI EST ID NO. CUFF.60940.0
  misc_feature: Variant of the nucleotide sequence at SEQ ID NO 25789
tagaaggctgcagtatagagtcagctcagtagaggagctggttgctaagttcgggaccgtgggcattaaagaggcggttagtcgtctgagaggaatgggtgatcgagacggtactcggttgccgctccatggtggcatacctggcggagatgatgagtggaacaattggaagactcaggttgacgacatgcaggaagaggaagatagactataagcctggtaataccttggacccgacactgcagatgtgaggctcgaaacgttacttaatcgccaaaaccttatttccatgacatattaaacaacaatatctgttttagtcgacactgatctatcttatagcgtgttggtccttat

SEQ ID NO: 25792 - DNA, 1218 bp, Muscodor strobelii
  misc_feature: SGI cDNA ID NO. 568806
  misc_feature: Encodes the peptide sequence at SEQ ID NO 25793
atggcgcaatccgacgatggaaaggccaagagccggcgcccacccaataccgcctttcgccagcagcgtctcaaggcctggcagcctctggcgacgcccaagaccatcatccctctctacatcggcatcggcgtcgtcacagccataataggagccctgctgctctactccagtcggctcgtcaaagtcatcgagctcgactacacaaactgctacacagacgcaccgtccaagaccacccccatgaaatcgtccgacgtctactcgttcttccaaggcaacacctccaaaatcaacgcccagtggtaccgcaccaccaacatcacccacgactataacggcttcaaggtcggcaacctcaccaactgcactctacaattcacgactcccgttgatatgaagggtgtccacatgtactacttcctgaacgggtggtatcagaaccaccgtagctatgtgaagtcattcttcgccgaccagctggccggtaaggacgtctcccatagcaacgtgaagaactcggactgcgggccgctggatatcaatggcacgctatccatatacccctgcggcttgattgccaactcgctcttcaatgacaccatcggctggccggaacagattggcgtcagtggcagcttggaggagcgaacgttccagatgagagatgacaacatcgcctgggacggagacttggagctgtacaaggacactccgttccgcgactctggtgactactcgtccgtcgtgccgcctcccaactggacgcctcagtacccggatggcctgtacagcaaggaattcccgccaccaaatctcaaggaggaccagcacttcattgtctggatgcgaacggcggcgttgcccgccttctacaaactctatgccaccccggctacatcggatccgatgcccgcgggcacatggcaagtcaatattactgacaacttccacacgagcgagtacaacgtgcgcaagaagttggtgctcacgacggtgtcgcagtacacggggggcaagaacgacttcctggggatagcattcctggcggtggcagggttctgcattgttttggcgctcatcaaattggtgcttaattgggtcaagccaagaaggctgggcgatcatacatatctcacctggaacaaggagcaggtacgaaaggggaaggacagagaggggcaggctattgggatgtcgacagggcgagacatgtaa

SEQ ID NO: 25793 - protein, 405 aa, Muscodor strobelii
  misc_feature: SGI Peptide ID NO. 568806
  misc_feature (54)..(377): Pfam Id: PF03381 Pfam Desc: LEM3 (ligand-effect modulator 3) family / CDC50 family
  misc_feature (226)..(377): Pfam Id: PF03381 Pfam Desc: LEM3 (ligand-effect modulator 3) family / CDC50 family
  misc_feature (123)..(201): Pfam Id: PF03381 Pfam Desc: LEM3 (ligand-effect modulator 3) family / CDC50 family
  misc_feature (4)..(405): NCBI GI: 256731692 Blast Desc: NECHADRAFT_69306 [Nectria haematococca mpVI 77-13-4]
  misc_feature (8)..(405): NCBI GI: 261351809 Blast Desc: CDC50 family protein [Verticillium albo-atrum VaMs.102]
  misc_feature (4)..(405): NCBI GI: 46137051 Blast Desc: FG10041.1 [Gibberella zeae PH-1]
  misc_feature (5)..(404): NCBI GI: 119196363 Blast Desc: CIMG_02556 [Coccidioides immitis RS] gi|240110908|gb|EER29064.1| LEM3 family / CDC50 family protein [Coccidioides posadasii C735 delta SOWgp]
  misc_feature (2)..(404): NCBI GI: 145238942 Blast Desc: An07g10420 [Aspergillus niger] gi|134076619|emb|CAK45172.1| protein product [Aspergillus niger]
  misc_feature (5)..(385): NCBI GI: 261192868 Blast Desc: LEM3/CDC50 family protein [Ajellomyces dermatitidis SLH14081] gi|239588975|gb|EEQ71618.1| LEM3/CDC50 family protein [Ajellomyces dermatitidis SLH14081]
  misc_feature (5)..(385): NCBI GI: 239613559 Blast Desc: LEM3/CDC50 family protein [Ajellomyces dermatitidis ER-3]
  misc_feature (6)..(404): NCBI GI: 121702249 Blast Desc: LEM3/CDC50 family protein [Aspergillus clavatus NRRL 1] gi|119397532|gb|EAW07963.1| LEM3/CDC50 family protein [Aspergillus clavatus NRRL 1]
  misc_feature (3)..(404): NCBI GI: 255931597 Blast Desc: Pc12g05080 [Penicillium chrysogenum Wisconsin 54-1255] gi|211581974|emb|CAP80135.1| Pc12g05080 [Penicillium chrysogenum Wisconsin 54-1255]
  misc_feature (6)..(404): NCBI GI: 169764110 Blast Desc: [Aspergillus oryzae RIB40] gi|238490103|ref|XP_002376289.1| LEM3/CDC50 family protein [Aspergillus flavus NRRL3357] gi|83770983|dbj|BAE61116.1| protein
MAQSDDGKAKSRRPPNTAFRQQRLKAWQPLATPKTIIPLYIGIGVVTAIIGALLLYSSRLVKVIELDYTNCYTDAPSKTTPMKSSDVYSFFQGNTSKINAQWYRTTNITHDYNGFKVGNLTNCTLQFTTPVDMKGVHMYYFLNGWYQNHRSYVKSFFADQLAGKDVSHSNVKNSDCGPLDINGTLSIYPCGLIANSLFNDTIGWPEQIGVSGSLEERTFQMRDDNIAWDGDLELYKDTPFRDSGDYSSVVPPPNWTPQYPDGLYSKEFPPPNLKEDQHFIVWMRTAALPAFYKLYATPATSDPMPAGTWQVNITDNFHTSEYNVRKKLVLTTVSQYTGGKNDFLGIAFLAVAGFCIVLALIKLVLNWVKPRRLGDHTYLTWNKEQVRKGKDREGQAIGMSTGRDM

SEQ ID NO: 25794 - DNA, 1714 bp, Muscodor strobelii
  misc_feature: SGI EST ID NO. CUFF.60811.0
  misc_feature: Variant of the nucleotide sequence at SEQ ID NO 25792
gcgggttggccatcgatgagactccatgaaaccaaattcgtggaccccgtcgtcttccatcccatccgacctcaatccattcgacgttcaacgttcaacattcaacattcaacattcaacgctatccattgctcatcggccacaaccacccccgtcatcccggtcacccatcatacctggggacgggccactgcgattcactacagataatcaccacaattacgacaacatcgatacttgacaccatcgcgaccggaagccacgcgagaccacagccgtgaggatctcacgtactcgcgccaacctcacaccatggcgcaatccgacgatggaaaggccaagagccggcgcccacccaataccgcctttcgccagcagcgtctcaaggcctggcagcctctggcgacgcccaagaccatcatccctctctacatcggcatcggcgtcgtcacagccataataggagccctgctgctctactccagtcggctcgtcaaagtcatcgagctcgactacacaaactgctacacagacgcaccgtccaagaccacccccatgaaatcgtccgacgtctactcgttcttccaaggcaacacctccaaaatcaacgcccagtggtaccgcaccaccaacatcacccacgactataacggcttcaaggtcggcaacctcaccaactgcactctacaattcacgactcccgttgatatgaagggtgtccacatgtactacttcctgaacgggtggtatcagaaccaccgtagctatgtgaagtcattcttcgccgaccagctggccggtaaggacgtctcccatagcaacgtgaagaactcggactgcgggccgctggatatcaatggcacgctatccatatacccctgcggcttgattgccaactcgctcttcaatgacaccatcggctggccggaacagattggcgtcagtggcagcttggaggagcgaacgttccagatgagagatgacaacatcgcctgggacggagacttggagctgtacaaggacactccgttccgcgactctggtgactactcgtccgtcgtgccgcctcccaactggacgcctcagtacccggatggcctgtacagcaaggaattcccgccaccaaatctcaaggaggaccagcacttcattgtctggatgcgaacggcggcgttgcccgccttctacaaactctatgccaccccggctacatcggatccgatgcccgcgggcacatggcaagtcaatattactgacaacttccacacgagcgagtacaacgtgcgcaagaagttggtgctcacgacggtgtcgcagtacacggggggcaagaacgacttcctggggatagcattcctggcggtggcagggttctgcattgttttggcgctcatcaaattggtgcttaattgggtcaagccaagaaggctgggcgatcatacatatctcacctggaacaaggagcaggtacgaaaggggaaggacagagaggggcaggctattgggatgtcgacagggcgagacatgtaaaagacgaagggtttgtataaaaggaagggtcactaagaggtttcttaatttcatgttatagtttcatagcaggagttccaatgatgcatttttacgattacatttaggaatagatgggaatgatcatctgaactgttaagagggtatatgttgatgaattcatttgatacctacatacatgccc

SEQ ID NO: 25795 - DNA, 1488 bp, Muscodor strobelii
  misc_feature: SGI cDNA ID NO. 568807
  misc_feature: Reduced expression when VOC is produced
  misc_feature: Encodes the peptide sequence at SEQ ID NO 25796
atggcggacaccacaacgcccgccgacacggccaccctctccgccgcgccctcggccatcccgtccgccgttgcatccgctgtcgcatccgccgtcggtacccctcagtcattgcctcccatggactccgaagagcgtgccaagtccatcaatgtcacgctcgctgacatggtcgccaaggccaccgctctctaccagtccaagaagtacgaggaagccgctgagatcttctcgactgctactgagagtcaggccgagctcaacggcgagatgtccccggccaatgccgatgttctgtttctctacggtcgatgtctctttaaggtcggccagagcaacagcgatgtcctcggtgggaaggctcccgagaagaggaaggcaaacggcgccgataagtccaaggccaagaagcccaaagccgagtcatcagccgcggcaaagcccgccggcgagacacagagcagcgcagagcaggtggcagaagaaggggtagcaattgttgcaggcaccgaagagctcaaggaaagcgttacggacgccaagaagcccctcttccaattcacaggcgacgagaatttcgaggactcggacgaggagcaggaagaggaggaaggcggagaagccgagggcgaagaggaggaagacgatgacctcgccgtggcatttgagatcctcgagctttcgcgcgtgctctttgaaaagcagctggaggcaacggtcgcagagaacactgagggtcctgatcaggacacaactgccgaaaatggagacagtatgacacgtcacatcaaagagcgccttgcagatatacacgatctcctagctgagatctctctggaaaatgagaagttccccgaagccattaaagattgccgcgcaactctaaaatacaagaaagagctttacagtgatgactccgaggttatcgctgaagcgcatttcaagctctccctagcgctcgaattcgcgtccgtcacgaccacgagtgaggatggaggcgacaatgcccccaagaccgtcgacgaggcgatgcgcaacgaagcggccgaagagctagtcaaggccatcgatagcacgaagctcaaactcaagaacaaggaggtggacttggctatgatgcacgcgcccgaggacaacgaagagacacgcaaacaaatcgccgaggtcaaggagatcatcgcggacatggagcaacggcttacggatctccgcaaaccgcctgtggatgtgactgacgccctagggggcgacaacccgttgaccggaatcttgggccaggcgcttggcgaatcttcttctgaggcggctgcaaggattgatgatgcaaagaagagcgccaaggatctgtccggtctggtgcggaagaagaagaaggaccccgaggcagaggcagagacgccggaggagagtaatgggaagcgcaaggctgaggacgaagtcgaggagcaaggcgaggcgaagaaggccaaggttgaggagaccgcttaa

SEQ ID NO: 25796 - protein, 495 aa, Muscodor strobelii
  misc_feature: SGI Peptide ID NO. 568807
  misc_feature (25)..(492): NCBI GI: 256732028 Blast Desc: NECHADRAFT_3366 [Nectria haematococca mpVI 77-13-4]
  misc_feature (48)..(492): NCBI GI: 39940692 Blast Desc: MGG_04894 [Magnaporthe grisea 70-15] gi|145010874|gb|EDJ95530.1| MGG_04894 [Magnaporthe grisea 70-15]
  misc_feature (31)..(475): NCBI GI: 46137033 Blast Desc: FG10032.1 [Gibberella zeae PH-1]
  misc_feature (41)..(474): NCBI GI: 116197883 Blast Desc: CHGG_07097 [Chaetomium globosum CBS 148.51] gi|88178376|gb|EAQ85844.1| CHGG_07097 [Chaetomium globosum CBS 148.51]
  misc_feature (6)..(474): NCBI GI: 261351981 Blast Desc: histone H1-binding protein [Verticillium albo-atrum VaMs.102]
  misc_feature (30)..(458): NCBI GI: 85101889 Blast Desc: NCU04238 [Neurospora crassa OR74A] gi|11595516|emb|CAC18310.1| conserved [Neurospora crassa] gi|28922771|gb|EAA31993.1| [Neurospora crassa OR74A]
  misc_feature (24)..(494): NCBI GI: 171694291 Blast Desc: protein product [Podospora anserina] gi|170947094|emb|CAP73899.1| protein product [Podospora anserina]
  misc_feature (45)..(447): NCBI GI: 154296339 Blast Desc: histone H1-binding protein [Botryotinia fuckeliana B05.10] gi|150843454|gb|EDN18647.1| histone H1-binding protein [Botryotinia fuckeliana B05.10]
  misc_feature (39)..(494): NCBI GI: 156055728 Blast Desc: SS1G_05216 [Sclerotinia sclerotiorum 1980] gi|154703000|gb|EDO02739.1| SS1G_05216 [Sclerotinia sclerotiorum 1980]
  misc_feature (52)..(492): NCBI GI: 119480431 Blast Desc: tetratricopeptide repeat domain protein [Neosartorya fischeri NRRL 181] gi|119408398|gb|EAW18347.1| tetratricopeptide repeat domain protein [Neosartorya fischeri NRRL 181]
  misc_feature: Useful for introducing or modulating the production of volatile compounds
MADTTTPADTATLSAAPSAIPSAVASAVASAVGTPQSLPPMDSEERAKSINVTLADMVAKATALYQSKKYEEAAEIFSTATESQAELNGEMSPANADVLFLYGRCLFKVGQSNSDVLGGKAPEKRKANGADKSKAKKPKAESSAAAKPAGETQSSAEQVAEEGVAIVAGTEELKESVTDAKKPLFQFTGDENFEDSDEEQEEEEGGEAEGEEEEDDDLAVAFEILELSRVLFEKQLEATVAENTEGPDQDTTAENGDSMTRHIKERLADIHDLLAEISLENEKFPEAIKDCRATLKYKKELYSDDSEVIAEAHFKLSLALEFASVTTTSEDGGDNAPKTVDEAMRNEAAEELVKAIDSTKLKLKNKEVDLAMMHAPEDNEETRKQIAEVKEIIADMEQRLTDLRKPPVDVTDALGGDNPLTGILGQALGESSSEAAARIDDAKKSAKDLSGLVRKKKKDPEAEAETPEESNGKRKAEDEVEEQGEAKKAKVEETA

SEQ ID NO: 25797 - DNA, 5437 bp, Muscodor strobelii
  misc_feature: SGI EST ID NO. CUFF.61092.1
  misc_feature: Variant of the nucleotide sequence at SEQ ID NO 25795
cgaactgctgctgcaccgggcagctcagcaatatcttaaccccagctcgccgagcaccagttgcatcacctcacagctcgtaccatccacagctcccaaacgacgtttccagattgtctctcatccattgacatcccaattgcattgcgcgtgcccctaccatctccaacgtttccatctctcgatcgtcattctcgttacgaacattgctcggtgccgtgctgctgctatcaattgcgccgtcgccgcaacatcgcagcagaaccgacgcgtcgttggcaccgcatctagcgacacacccatcgtaccaccctcggttcatcgtccatagatccagaccgagcatctgaccctcatcccttcctcgccatggcggacaccacaacgcccgccgacacggccaccctctccgccgcgccctcggccatcccgtccgccgttgcatccgctgtcgcatccgccgtcggtacccctcagtcattgcctcccatggactccgaagagcgtgccaagtccatcaatgtcacgctcgctgacatggtcgccaaggccaccgctctctaccagtccaagaagtacgaggaagccgctgagatcttctcgactgctactgagagtcaggccgagctcaacggcgagatgtccccggccaatgccgatgttctgtttctctacggtcgatgtctctttaaggtcggccagagcaacagcgatgtcctcggtgggaaggctcccgagaagaggaaggcaaacggcgccgataagtccaaggccaagaagcccaaagccgagtcatcagccgcggcaaagcccgccggcgagacacagagcagcgcagagcaggtggcagaagaaggggtagcaattgttgcaggcaccgaagagctcaaggaaagcgttacggacgccaagaagcccctcttccaattcacaggcgacgagaatttcgaggactcggacgaggagcaggaagaggaggaaggcggagaagccgagggcgaagaggaggaagacgatgacctcgccgtggcatttgagatcctcgagctttcgcgcgtgctctttgaaaagcagctggaggcaacggtcgcagagaacactgagggtcctgatcaggacacaactgccgaaaatggagacagtatgacacgtcacatcaaagagcgccttgcagatatacacgatctcctagctgagatctctctggaaaatgagaagttccccgaagccattaaagattgccgcgcaactctaaaatacaagaaagagctttacagtgatgactccgaggttatcgctgaagcgcatttcaagctctccctagcgctcgaattcgcgtccgtcacgaccacgagtgaggatggaggcgacaatgcccccaagaccgtcgacgaggcgatgcgcaacgaagcggccgaagagctagtcaaggccatcgatagcacgaagctcaaactcaagaacaaggaggtggacttggctatgatgcacgcgcccgaggacaacgaagagacacgcaaacaaatcgccgaggtcaaggagatcatcgcggacatggagcaacggcttacggatctccgcaaaccgcctgtggatgtgactgacgccctagggggcgacaacccgttgaccggaatcttgggccaggcgcttggcgaatcttcttctgaggcggctgcaaggattgatgatgcaaagaagagcgccaaggatctgtccggtctggtgcggaagaagaagaaggaccccgaggcagaggcagagacgccggaggagagtaatgggaagcgcaaggctgaggacgaagtcgaggagcaaggcgaggcgaagaaggccaaggttgaggagaccgcttaagtgtcacctgtcggctgtcaaagctgcctccataagggtactcttaacgcgtgtcactttcgatgggacccaaggcgttgctggaaaagtgtggttgcacggactattattgctactcccttgtgagcttgtacaaaaatagtgagacgaggcttatgacactgtattatcggttatggcgggaagaccttgtatactgcagaaatttcaagaacaagacaggcgagataattaactacgaccagagactcacgcctgaggctctgattgaacgggatatcgccgcggagacgaatacacttgtttcaaagtccagggccattttccggcaatagcatgtgatcttatgagggaacggcgcgtacatttatgtgatgcagatgactccttctactgagccttaggcgtgagtcccgggtcgtagttaattatctcgcctgtcttcttattcttagactttctgcaaatggccctttattttcaaacagatgtaatcgtctccacggcgacaccccgttcaatcatgtttccaggttgcgtatttgattctgacccatccctgaaagtctacgcttctctgaacatgtgagaatcccttgaagccttttcaaatgggctattaccaggttattctattcatttcccatccaatgtcgagagggctcaagactgcaagttgcctgaaatgctcaaacacccctttcctgttcataatcgtgctggaaagtttcatcatctgcaaatcaagtccctctaagaattcggaagtggctcttctcatctcatgttcacatcatcaacggcccgagattccagctcggccttccttttgacatatatccccaacaagccgtctcgagcagccagtgacccttcaagctcagatttcactacgtaaatgcctgccccagtctcttggcacggcgagccttcaagctcagaacggatagcgagtgcatccagctctgccttgacaaaccgcaatggatcggcatcactgccttgcagctccggtttaccatcgtggatgtgcaacggttcgtcactctcttcagtttcagactcggatgactccttactaagtcggcgtttgcgatacaggataaataataggaccccgagcgaaagcagtagtatccctccaagcgatgcgccaacagcgacaccgactttcaaagcttttgacaatgaagtcggcttgctttcggcgctaacgcttgttgaggccctggttgtagttttgatcacactggagatgcttgatgagagaactgtagtgtgctttcccgaaaatatggacgataaaggtttcgactcgactgccgcattctgagctgtaagaaaaattggcactgctctcacaaagacaatcggcggtccagaataataatcgccccccttttttgaagccgcggaaataaacgaatctgtctcggtaggatcgaacaggatcgtctcatcgatcccattatacgccgtggctaaaatgaaagtgccttccgtaagagtcgcgacgcaacttgaggaagtcgcaagctcgccttgccatgtcccaatgtaggaagagtaacgaagcccgctattatgccacaataatgagccaaacgaaaataccccttgaattatgaaaactcacctatagcaacagtacaccgcatccacaccagaaagactaaaagcggtggtcatgcccaccgggcacatccggccgggtgagtacgtatcaataggaaagccactcagatctccgctggtgtaaaactcggggaaacaaggcaatcccccttctaacggcaatgctgatccgtctgaatctccgtatgcatcgcagccactgtccgaacaccaggaaagagtcaaactagtgcatttcggccctggggtgaaaagtgtcgtcagggccgggaaagtagtcgtgtctgttgttgttgaatctagcatgacagttgttaactcgaaacccgattcaatctctttgactcgatgcgcatgctccaagttgttcttgagagaccgtggtggttcggatgtgtattgcgaactgaagattcattccggggctccggaggtatggaaatgagctcgacaggctgtgagagtgtcagaatctgttaatgtgcaaagagtcattcgtgggtagcactcgaggggccggtcgctgtggcttcattctgagcgtttctaaatctgcaatgctaccgtgcggctacctacagccatggcgccatggccagaattacaaccagtatctggaagattgggggctatgctcatcgcaaggcgctctttaacaacgacgactccgtgttcagggaaacaggtgatctacagatggcaaggagcagagttggcaatttggctgatgaatggcgctctggtttaggaccaacggcctcggtcgtctgtacaacatacgcatgatcctgaatctatttatgatggcatcgcagtcttcgattgcctgacatgcctgtagttatgggttgtgacatggctcttgcctgtttccctagtctgcttggtgaccggcatgatagataacgggagacaataccccttacgagacagtcatctatagcgagtgaagtaaagggatgtcgaaatggaattgctcgtcatgttcgatcccattctatcggccgcaataatgaaatgagacgtcatcggtcgagatatgaagcatcgtgaggttcaaccattcaggggcatcgatgcctaccttgggcgtttcgaaagtagaagcggtgaggtatgcacaatgacgcgcgagctgcaggcagtcggtcagtgcaacggacatttgctgtggtgatgagggagagagaggtgagtggatctcacgatagtgcaaagataacgatgttagctgcccctcatttcccgtctttctagtcagtgtaagcccctcactgcccctccatttctagctatctacacgagggtaaaacgggcaatactctacgattgttttgaaatcggaatcgaaaacccataacctagagtttgaaatacgatctttacgtgcacgacaagattgatcgacgaatatttgtgtggaatgtcgatataatgaggtgggtaaccaccgggcaatttgcgggtacctgacttcatgagattacataagacctgcatataggagaagagcctccgaagatcgaagacatccctggcttgttttgacctaacttctcccatcaaccccggccggcatgcggcgtgttttctcacgatccatttccaaacaaatggaatcctattactttgcacacatgctttgtttgaggaaactctgcgtacgagagaagatgctatttcataaggacgttgcaacatggaaaactccggaaacgtagtaaattcgagacacgcttcgcagtaatgtgaattcactgtacgatgctaagggataaaaatgccctgaagatcgagaagatcatcacctattcaagtataagcttaaggtctagaagaccgcaaagaggcgaacagaggtctgaacagagagtccagacaccgtagatcagatagcgagacccagtttttactaccaaaatgtcggtcctagcgactccggctc

SEQ ID NO: 25798 - DNA, 993 bp, Muscodor strobelii
  misc_feature: SGI cDNA ID NO. 568808
  misc_feature: Reduced expression when VOC is produced
  misc_feature: Encodes the peptide sequence at SEQ ID NO 25799
atgcctatagccataacaccccccgctatcccggagacgaaggccgtcgacgcaacctccggcagcaagaagagaaagattatctgcttctccgactttgacggtacgatatttatgcaagacaccggacacgtcctcttcgatgcccacggctgtggatccaagcgccgagaagtcctcgacgagcagatcaagaatggtgaccggtcatttcgcgaggtatcagaagagatgtggggatcattgaacgtccccttcgacgacggcttcgaagtcatggagaagacactagagatcgacccggacttccagaaattccaccaatactgcatcaacaacaacattcccttcaacgtcatctccgccggtctgaagcctatcttgaggcgggtcctcgatactttccttggtgaggagcagtcagcccacatcgacatcgtcgccaacgacgcccagatcaccgaggatggctcaaactggaagccaatctggcgacacgacaacgagctcggccacgacaaggcactttccgtgcaagaagcacgcaaggaggccgagctcctctgcgacgacggcaccatccccctcatcgtcttcatcggcgacggcgtctcagacctgcccgctgcccgcgaggcagacgtcctgttcgcccgccgcggtctcagactcgaggagtactgccaggagaacaagatcgagcacgtctccttcgacaccttcgccgatatccagacggagatcgagcggatccgcgaggaggacgagaagaagaccggtgggaagggcgtccctgctcggttcaacccccgcgctaacctgtggaggagagtcagcagtaagactgctgtgcctagatatgtcattaattcccctacgaaggaggagaagatgtttctttggcctgaggctttctctgagttgaaggttgcccctattgttcctgttgctcctgttattgctgagatgcctactgcttctgtccctgcttga

SEQ ID NO: 25799 - protein, 330 aa, Muscodor strobelii
  misc_feature: SGI Peptide ID NO. 568808
  misc_feature (1)..(309): NCBI GI: 156044724 Blast Desc: SS1G_10466 [Sclerotinia sclerotiorum 1980] gi|154694854|gb|EDN94592.1| SS1G_10466 [Sclerotinia sclerotiorum 1980]
  misc_feature (16)..(330): NCBI GI: 212527156 Blast Desc: 2,3-diketo-5-methylthio-1-phosphopentane phosphatase, [Penicillium marneffei ATCC 18224] gi|210073133|gb|EEA27220.1| 2,3-diketo-5-methylthio-1-phosphopentane phosphatase, marneffei
  misc_feature (25)..(307): NCBI GI: 121711864 Blast Desc: 2,3-diketo-5-methylthio-1-phosphopentane phosphatase, [Aspergillus clavatus NRRL 1] gi|119401699|gb|EAW12121.1| 2,3-diketo-5-methylthio-1-phosphopentane phosphatase, clavatus 1]
  misc_feature (25)..(313): NCBI GI: 238499087 Blast Desc: 2,3-diketo-5-methylthio-1-phosphopentane phosphatase, [Aspergillus flavus NRRL3357] gi|220692531|gb|EED48877.1| 2,3-diketo-5-methylthio-1-phosphopentane phosphatase, flavus
  misc_feature (18)..(309): NCBI GI: 145228339 Blast Desc: An01g00280 [Aspergillus niger] gi|134054565|emb|CAK43420.1| protein product [Aspergillus niger]
  misc_feature (39)..(309): NCBI GI: 119474561 Blast Desc: 2,3-diketo-5-methylthio-1-phosphopentane phosphatase, [Neosartorya fischeri NRRL 181] gi|119407309|gb|EAW17259.1| 2,3-diketo-5-methylthio-1-phosphopentane phosphatase, fischeri
  misc_feature (1)..(263): NCBI GI: 261355734 Blast Desc: conserved [Verticillium albo-atrum VaMs.102]
  misc_feature (24)..(284): NCBI GI: 242782831 Blast Desc: 2,3-diketo-5-methylthio-1-phosphopentane phosphatase, [Talaromyces stipitatus ATCC 10500] gi|218720225|gb|EED19644.1| 2,3-diketo-5-methylthio-1-phosphopentane phosphatase, stipitatus
  misc_feature (25)..(284): NCBI GI: 169778528 Blast Desc: [Aspergillus oryzae RIB40] gi|83772467|dbj|BAE62596.1| protein product [Aspergillus oryzae]
  misc_feature (39)..(309): NCBI GI: 70986440 Blast Desc: 2,3-diketo-5-methylthio-1-phosphopentane phosphatase [Aspergillus fumigatus Af293] gi|66846343|gb|EAL86676.1| 2,3-diketo-5-methylthio-1-phosphopentane phosphatase, fumigatus
  misc_feature (25)..(245): SWISSPROT Homolog: EC 4.2.1.109 Methylthioribulose 1-phosphate dehydratase
  misc_feature: Useful for introducing or modulating the production of volatile compounds
MPIAITPPAIPETKAVDATSGSKKRKIICFSDFDGTIFMQDTGHVLFDAHGCGSKRREVLDEQIKNGDRSFREVSEEMWGSLNVPFDDGFEVMEKTLEIDPDFQKFHQYCINNNIPFNVISAGLKPILRRVLDTFLGEEQSAHIDIVANDAQITEDGSNWKPIWRHDNELGHDKALSVQEARKEAELLCDDGTIPLIVFIGDGVSDLPAAREADVLFARRGLRLEEYCQENKIEHVSFDTFADIQTEIERIREEDEKKTGGKGVPARFNPRANLWRRVSSKTAVPRYVINSPTKEEKMFLWPEAFSELKVAPIVPVAPVIAEMPTASVPA

SEQ ID NO: 25800 - DNA, 1487 bp, Muscodor strobelii
  misc_feature: SGI EST ID NO. CUFF.60814.0
  misc_feature: Variant of the nucleotide sequence at SEQ ID NO 25798
cactgccccaggggctagtgggagacactagtcccaacgtcttgactgagggttctgagatatataagtttttcttcccaccttgactcacgactgccttttctttgtttgctccatatcaaacaaaatccaatcactacttatatcccgaaaggtatagacttgtcatagactgtactctttcttatcatctcttaactcacatcaactactatcctacccgatttcacacaaccaaccatcaaaatgcctatagccataacaccccccgctatcccggagacgaaggccgtcgacgcaacctccggcagcaagaagagaaagattatctgcttctccgactttgacggtacgatatttatgcaagacaccggacacgtcctcttcgatgcccacggctgtggatccaagcgccgagaagtcctcgacgagcagatcaagaatggtgaccggtcatttcgcgaggtatcagaagagatgtggggatcattgaacgtccccttcgacgacggcttcgaagtcatggagaagacactagagatcgacccggacttccagaaattccaccaatactgcatcaacaacaacattcccttcaacgtcatctccgccggtctgaagcctatcttgaggcgggtcctcgatactttccttggtgaggagcagtcagcccacatcgacatcgtcgccaacgacgcccagatcaccgaggatggctcaaactggaagccaatctggcgacacgacaacgagctcggccacgacaaggcactttccgtgcaagaagcacgcaaggaggccgagctcctctgcgacgacggcaccatccccctcatcgtcttcatcggcgacggcgtctcagacctgcccgctgcccgcgaggcagacgtcctgttcgcccgccgcggtctcagactcgaggagtactgccaggagaacaagatcgagcacgtctccttcgacaccttcgccgatatccagacggagatcgagcggatccgcgaggaggacgagaagaagaccggtgggaagggcgtccctgctcggttcaacccccgcgctaacctgtggaggagagtcagcagtaagactgctgtgcctagatatgtcattaattcccctacgaaggaggagaagatgtttctttggcctgaggctttctctgagttgaaggttgcccctattgttcctgttgctcctgttattgctgagatgcctactgcttctgtccctgcttgagtggcttgtaggaatggagaaagttccgtagggaggttacactgaatgaataatgcataatatcggcgttttggggacttgttttactggattggactggattgagaatggtggatggatatacttatggagatacctaggatacacacttggcgcaaggggattttctccttatccatacaggattatagaatctagaaatagaatcgatgaatactgagtagaaactttgatatacgttccagaaa

SEQ ID NO: 25801 - DNA, 3366 bp, Muscodor strobelii
  misc_feature: SGI cDNA ID NO. 568809
  misc_feature: Reduced expression when VOC is produced
  misc_feature: Encodes the peptide sequence at SEQ ID NO 25802
atggtccgcatcataccgcagaggttgaagacctcgacctcgattcactccacctccaacagccgcagcgcgagcccgctacgctcagcaaagggagacaacatggcgtccagagacaccggtctggtcttgaagattgtcatcctccgtgcgagagatctggctgccaaggatcgcggaggcacatctgatccttacatccaattgagttgcggcgagtccaaattcacgacacattgcgtccaaaagaacctcaaccccgagtggaacgtcatctgcaccatccccatcactagcgtcgacaacctgctcctcgatgtccactgctgggataaggaccgcttcggcaaggactacctcggcgagttcgacctggccctcgaggagatcttctccgacgacaagaccgaaaaggccccgaaatggtatcccttgaagagcaagaagaagcagagcaaaaagtccagcccaatcaccggcgaggttctcctccaatgcaccctctacgactccaccgacaaagatgcgcctgatgcccaggtcctggagaagctgcgcgcactcgcttcgaccgtcactctcgaaagctcttcgcgcatccctaccccgaccatgacgcccatgctcggtgcgactcaggcatccaaatcagatgtgccgccctctctcagtcgcaacccgacggacaactcgcaagatgacgaagacgaggacgatcttctcgacgacgacgagacaccagaagatgaggaccccacgcaaccggaagcaatcgagaagaggaaacgaaggctacgcattaaggggctgaagcgcaagaagagaaagaacccctacgagttcattaacggcactagtggcggcagcgacgtggttggcctgatcttcctcgagatcgtcaacatccaagatctaccacccgagtccaacttcaccaagaccagtttcgatatggatcctttcgtcgtcgcctctcttggcaagaagacatatcgcaccaaagtcattcgtcacaacttgaatcccgtattcaacgagaagatgttgttccatgtcctcagccacgagcaagcatactcgttcgcatttaccgtcatcgaccgtgacaagtattccggaaacgacttcatcgcgtcgacttcgttccctgtcaatgagatcatcgacaagagccccaaggcagaccctgagactggtctgtatgacctgaaggagccagccgagtacgtgaaagccccgaagtcacaatcgcgcttcaaaaggttgggcttgtcgaggtctgcctctgcgcagagcctgaccaaggcacgcccgcctctatccaaaaaccccagtacggcttcagcattgacacaagctgatggatctggcgaatccaggctcgctcctacctcctcagctcctacctcgtctccaaatgcaggtcttctacagccagaccagataccgaacatgaacgccgcttctgagtccgagctagatacagaggacaatgacttcaacacgttcacggttccattgaagatgaagaatttggagaaatgggaagccaagcacagtccgactctcactattcgtgccaagtacatgccttacccggctcttcgacaacaattctggcgcgcaatgctcaaacaatacgacactgacgaaagtggcgagatcagcaaggttgagctcactaccatgttggacacgttagggtcgaccctgcgagagtcaaccattgataggttcttccaaagatttccccacaaagccgagagtggtgaagccgagttgacgatgaacgaggcggtcatttgcctggaggatcaacttgatgacaagagccagccgcttcctgccacggagaggctgaagaacatggttccagatggcgacacaatcaaaaacatgctgaacatttcaggtcaaagcgacagccagtcatccaccacggaagagaatgccttcatactcacccctgatgaatcaagcgtccatggaactacgccagccacctcgacaatcgttgtgcccgagcacaatggatctggagaagaaggagacgcgctagaaaaggatgaccttaacatagatcgcagcgaggagcatgttattgaaattcgagaatgtccgatctgtcaccaaccacggctcaacaagcggaaagataccgatatcatcacgcacatcgcgacatgcgcgagtcaagattggcgccaggtcaactctcttatgatgggaggcttcgtcaccgctagtcaggcacaaaggaaatggtactccaaagtcatcacgaagattggctacggcggctacaagctaggggcgaactccgccaacattctggtgcaagatcgcttgactggtcagattaatgaggagaagatgagtgtctatgttcgactaggtatacgtctactttacaaaggtctcaaatccaaggatatggagaaaaagagaattcgcaaaatgcttaaaggtctgagtattaaacaaggcaagaaatatgacgacccggcatccaagtctcagatccagggctttgtcgacttccacaagttagacatgtccgaggtccttcttccagtagaagaattcaagaacttcaacgagttcttctaccgagccttgaagcccgatgcccggccatgttcagcaccagacaaccctcacatcattgtgtcacctgctgactgccgctccgttgtcttcaatacgattgattctgcgacatcaatatggatcaagggacgggaattctctatttcccgactattgggcgatgcttatcccgaagacgccaaacgctacgagaacgggtccctggggattttccgtctcgctccgcaagactatcaccgatttcacatacctgtggacggcatcctacggaagccgaagctcatagagggcgagtactatacagtcaatcctatggctatccgatcggcactggatgtgtacggagaaaacatccgggtgatctgtccgatcgacacagagcaccacggccgggtcatggtgatctgcgtcggtgccatgatggtgggtagtacggtgatcacccgcaacgagggcgatcatgtgaagcgtgccgaggaacttggatactttaagtttggaggcagtacaatcgtagtattgtttgaacctggcaagatggtctacgacgaggacttagtagacaattcaaacagcgctcttgaaacattgatccgagcaggcatgtcggttgggcactcgccccacgtaccgaagcacatgccagatcagcaaaaggatgcatcacaagtgacggaagcagagaagaaggacgcccaacgacgcattggcggtgggttaggagactcgacgccggaggagtcgatttcggcatga

SEQ ID NO: 25802 - protein, 1121 aa, Muscodor strobelii
  misc_feature: SGI Peptide ID NO. 568809
  misc_feature (44)..(124): Pfam Id: PF00168 Pfam Desc: C2 domain
  misc_feature (295)..(381): Pfam Id: PF00168 Pfam Desc: C2 domain
  misc_feature (865)..(1076): Pfam Id: PF02666 Pfam Desc: Phosphatidylserine decarboxylase
  misc_feature (539)..(567): Pfam Id: PF00036 Pfam Desc: EF hand
  misc_feature (437)..(1114): NCBI GI: 261355736 Blast Desc: C2 domain-containing protein [Verticillium albo-atrum VaMs.102]
  misc_feature (534)..(1110): NCBI GI: 156044742 Blast Desc: conserved [Sclerotinia sclerotiorum 1980] gi|154694863|gb|EDN94601.1| conserved [Sclerotinia sclerotiorum 1980]
  misc_feature (1)..(795): NCBI GI: 154291961 Blast Desc: BC1G_14283 [Botryotinia fuckeliana B05.10] gi|150846384|gb|EDN21577.1| BC1G_14283 [Botryotinia fuckeliana B05.10]
  misc_feature (1)..(816): NCBI GI: 242781625 Blast Desc: phosphatidylserine decarboxylase Psd2, [Talaromyces stipitatus ATCC 10500] gi|218719985|gb|EED19404.1| phosphatidylserine decarboxylase Psd2, [Talaromyces stipitatus
  misc_feature (665)..(1115): NCBI GI: 226291966 Blast Desc: phosphatidylserine decarboxylase proenzyme [Paracoccidioides brasiliensis Pb18]
  misc_feature (66)..(1121): NCBI GI: 116180150 Blast Desc: conserved [Chaetomium globosum CBS 148.51] gi|88185000|gb|EAQ92468.1| conserved [Chaetomium globosum CBS 148.51]
  misc_feature (85)..(1117): NCBI GI: 171691969 Blast Desc: protein product [Podospora anserina] gi|170945933|emb|CAP72734.1| protein product [Podospora anserina]
  misc_feature (1)..(1118): NCBI GI: 256732038 Blast Desc: [Nectria haematococca mpVI 77-13-4]
  misc_feature (1)..(1111): NCBI GI: 46136983 Blast Desc: FG10007.1 [Gibberella zeae PH-1]
  misc_feature (1)..(1118): NCBI GI: 145612309 Blast Desc: MGG_07037 [Magnaporthe grisea 70-15] gi|145019498|gb|EDK03726.1| MGG_07037 [Magnaporthe grisea 70-15]
  misc_feature: Useful for introducing or modulating the production of volatile compounds
MVRIIPQRLKTSTSIHSTSNSRSASPLRSAKGDNMASRDTGLVLKIVILRARDLAAKDRGGTSDPYIQLSCGESKFTTHCVQKNLNPEWNVICTIPITSVDNLLLDVHCWDKDRFGKDYLGEFDLALEEIFSDDKTEKAPKWYPLKSKKKQSKKSSPITGEVLLQCTLYDSTDKDAPDAQVLEKLRALASTVTLESSSRIPTPTMTPMLGATQASKSDVPPSLSRNPTDNSQDDEDEDDLLDDDETPEDEDPTQPEAIEKRKRRLRIKGLKRKKRKNPYEFINGTSGGSDVVGLIFLEIVNIQDLPPESNFTKTSFDMDPFVVASLGKKTYRTKVIRHNLNPVFNEKMLFHVLSHEQAYSFAFTVIDRDKYSGNDFIASTSFPVNEIIDKSPKADPETGLYDLKEPAEYVKAPKSQSRFKRLGLSRSASAQSLTKARPPLSKNPSTASALTQADGSGESRLAPTSSAPTSSPNAGLLQPDQIPNMNAASESELDTEDNDFNTFTVPLKMKNLEKWEAKHSPTLTIRAKYMPYPALRQQFWRAMLKQYDTDESGEISKVELTTMLDTLGSTLRESTIDRFFQRFPHKAESGEAELTMNEAVICLEDQLDDKSQPLPATERLKNMVPDGDTIKNMLNISGQSDSQSSTTEENAFILTPDESSVHGTTPATSTIVVPEHNGSGEEGDALEKDDLNIDRSEEHVIEIRECPICHQPRLNKRKDTDIITHIATCASQDWRQVNSLMMGGFVTASQAQRKWYSKVITKIGYGGYKLGANSANILVQDRLTGQINEEKMSVYVRLGIRLLYKGLKSKDMEKKRIRKMLKGLSIKQGKKYDDPASKSQIQGFVDFHKLDMSEVLLPVEEFKNFNEFFYRALKPDARPCSAPDNPHIIVSPADCRSVVFNTIDSATSIWIKGREFSISRLLGDAYPEDAKRYENGSLGIFRLAPQDYHRFHIPVDGILRKPKLIEGEYYTVNPMAIRSALDVYGENIRVICPIDTEHHGRVMVICVGAMMVGSTVITRNEGDHVKRAEELGYFKFGGSTIVVLFEPGKMVYDEDLVDNSNSALETLIRAGMSVGHSPHVPKHMPDQQKDASQVTEAEKKDAQRRIGGGLGDSTPEESISA

SEQ ID NO: 25803 - DNA, 4499 bp, Muscodor strobelii
  misc_feature: SGI EST ID NO. CUFF.60889.0
  misc_feature: Variant of the nucleotide sequence at SEQ ID NO 25801
ccgtgcacccggaactcactgttctctcttctcacgattggattctgcctttccttagatgcgagctttcgacctcataagtctgtttcactttaatcgtttgacttcagttctcccagttaggttgcccattgtgccgactatatcgtatcggttagtcctaccttgacattgattgatcgtgtccactgtctagtgtgtttgtcgagctgtaacagctagccagccacttatgcacagtcgaccgtgtgccccccccccctttgacttttacctgcatgtggacgccagcccgtccataaaagaaatacctctatattcaaaccagactctggcaattagacacgccctagattgtttctcgatctttccctccggttcttgaaaccaccatcaacggtacggcctcgtctgctgcgtagatgtgtcaataaggcagaagacgtctgcaaaacctaagggctgagtttcgagcccggatttgggcttgaagttggcttccgcggctgtgttgttagctaccaccgccagctaaactgcaattgtacttggcagcattggatcggatcgtcacatccaagctggggtctgcaagccgcagctattggaacacaccagtccaaactgacatcattacctctacgcactgcgtctgtgactggtctgaaacttggatttcgacaagccaaatcttcccctcaaccggctcgacccgaccagctgcacctcgcttgcatcatcccttctctgccgcacccattgaaatcgcactatcgacgctctcttataacctccctcccccgcagcattcgttatggtccgcatcataccgcagaggttgaagacctcgacctcgattcactccacctccaacagccgcagcgcgagcccgctacgctcagcaaagggagacaacatggcgtccagagacaccggtctggtcttgaagattgtcatcctccgtgcgagagatctggctgccaaggatcgcggaggcacatctgatccttacatccaattgagttgcggcgagtccaaattcacgacacattgcgtccaaaagaacctcaaccccgagtggaacgtcatctgcaccatccccatcactagcgtcgacaacctgctcctcgatgtccactgctgggataaggaccgcttcggcaaggactacctcggcgagttcgacctggccctcgaggagatcttctccgacgacaagaccgaaaaggccccgaaatggtatcccttgaagagcaagaagaagcagagcaaaaagtccagcccaatcaccggcgaggttctcctccaatgcaccctctacgactccaccgacaaagatgcgcctgatgcccaggtcctggagaagctgcgcgcactcgcttcgaccgtcactctcgaaagctcttcgcgcatccctaccccgaccatgacgcccatgctcggtgcgactcaggcatccaaatcagatgtgccgccctctctcagtcgcaacccgacggacaactcgcaagatgacgaagacgaggacgatcttctcgacgacgacgagacaccagaagatgaggaccccacgcaaccggaagcaatcgagaagaggaaacgaaggctacgcattaaggggctgaagcgcaagaagagaaagaacccctacgagttcattaacggcactagtggcggcagcgacgtggttggcctgatcttcctcgagatcgtcaacatccaagatctaccacccgagtccaacttcaccaagaccagtttcgatatggatcctttcgtcgtcgcctctcttggcaagaagacatatcgcaccaaagtcattcgtcacaacttgaatcccgtattcaacgagaagatgttgttccatgtcctcagccacgagcaagcatactcgttcgcatttaccgtcatcgaccgtgacaagtattccggaaacgacttcatcgcgtcgacttcgttccctgtcaatgagatcatcgacaagagccccaaggcagaccctgagactggtctgtatgacctgaaggagccagccgagtacgtgaaagccccgaagtcacaatcgcgcttcaaaaggttgggcttgtcgaggtctgcctctgcgcagagcctgaccaaggcacgcccgcctctatccaaaaaccccagtacggcttcagcattgacacaagctgatggatctggcgaatccaggctcgctcctacctcctcagctcctacctcgtctccaaatgcaggtcttctacagccagaccagataccgaacatgaacgccgcttctgagtccgagctagatacagaggacaatgacttcaacacgttcacggttccattgaagatgaagaatttggagaaatgggaagccaagcacagtccgactctcactattcgtgccaagtacatgccttacccggctcttcgacaacaattctggcgcgcaatgctcaaacaatacgacactgacgaaagtggcgagatcagcaaggttgagctcactaccatgttggacacgttagggtcgaccctgcgagagtcaaccattgataggttcttccaaagatttccccacaaagccgagagtggtgaagccgagttgacgatgaacgaggcggtcatttgcctggaggatcaacttgatgacaagagccagccgcttcctgccacggagaggctgaagaacatggttccagatggcgacacaatcaaaaacatgctgaacatttcaggtcaaagcgacagccagtcatccaccacggaagagaatgccttcatactcacccctgatgaatcaagcgtccatggaactacgccagccacctcgacaatcgttgtgcccgagcacaatggatctggagaagaaggagacgcgctagaaaaggatgaccttaacatagatcgcagcgaggagcatgttattgaaattcgagaatgtccgatctgtcaccaaccacggctcaacaagcggaaagataccgatatcatcacgcacatcgcgacatgcgcgagtcaagattggcgccaggtcaactctcttatgatgggaggcttcgtcaccgctagtcaggcacaaaggaaatggtactccaaagtcatcacgaagattggctacggcggctacaagctaggggcgaactccgccaacattctggtgcaagatcgcttgactggtcagattaatgaggagaagatgagtgtctatgttcgactaggtatacgtctactttacaaaggtctcaaatccaaggatatggagaaaaagagaattcgcaaaatgcttaaaggtctgagtattaaacaaggcaagaaatatgacgacccggcatccaagtctcagatccagggctttgtcgacttccacaagttagacatgtccgaggtccttcttccagtagaagaattcaagaacttcaacgagttcttctaccgagccttgaagcccgatgcccggccatgttcagcaccagacaaccctcacatcattgtgtcacctgctgactgccgctccgttgtcttcaatacgattgattctgcgacatcaatatggatcaagggacgggaattctctatttcccgactattgggcgatgcttatcccgaagacgccaaacgctacgagaacgggtccctggggattttccgtctcgctccgcaagactatcaccgatttcacatacctgtggacggcatcctacggaagccgaagctcatagagggcgagtactatacagtcaatcctatggctatccgatcggcactggatgtgtacggagaaaacatccgggtgatctgtccgatcgacacagagcaccacggccgggtcatggtgatctgcgtcggtgccatgatggtgggtagtacggtgatcacccgcaacgagggcgatcatgtgaagcgtgccgaggaacttggatactttaagtttggaggcagtacaatcgtagtattgtttgaacctggcaagatggtctacgacgaggacttagtagacaattcaaacagcgctcttgaaacattgatccgagcaggcatgtcggttgggcactcgccccacgtaccgaagcacatgccagatcagcaaaaggatgcatcacaagtgacggaagcagagaagaaggacgcccaacgacgcattggcggtgggttaggagactcgacgccggaggagtcgatttcggcatgacggaaccctggaaacatccatagaggcacctagaaaagctctctgtataagtaccgtgaaatggtaaacagcggaatgaatacatgtttacgtgcgtctgacttcacgcgcattccttcgatagctgtagcaacgactagttgctccatgttcttaatatcggtgtgataattgttttcttataagggctcctatgaatgcccggctacccaattggcgatgaatggtgaagcgacacgtatttaatctccggtcactatcaatccgaataagcacaactctcaacttcatacatgtatccaattaataacaaaatcgc

SEQ ID NO: 25804 - DNA, 2403 bp, Muscodor strobelii
  misc_feature: SGI cDNA ID NO. 568810
  misc_feature: Encodes the peptide sequence at SEQ ID NO 25805
atgattgactcggagaatctgcgcacagcttcgctgtacatcaacaaccagctgttgtcgcgcggcctgttgcgcgatggccagaacatcaactttgcgaatcccgatgcctgcgacggcggccttgaggcttctatgggtcagatcatcagtgttgtcaatgacttgatcttgcgacgagatcgtgatgccgagcaccgcgaatccctctcctctacacttcgtacactacgcgccgacgctcagcgacaggcgacagaacatgaacgtcagacagacaaactcaacgatgcgcaacgacgactcgacacggccgactcgacagagcgcgcgctccgtctgcaggtgaagacggcggagcaggggatccacaagctgaaggacgaggtggccaagatgaagtcgctcgtcgcccagactcggagcgcatgcgccaacgaagtccggaagcgggatcgccagatcgatagtctgaagaaggccgtgtccgacgctgggcgagtgagaggaggtggcaagagccgcgacgtcctcaccatcaatgtgactggagacttcagcggcgcggaaacagagggcagaggcatgcctgccggcgcgacggagagcgacgagtatagtctcaggatggagactaatgagtttttgaccgagcttgccaagggcctgagcgaggagaacgagggcttgcttgcgcttgtgcaacgtactgttgatgggctgcgggagatgagtgggcttgataggccggagaatggtaatgggatggcggctcaacagggtgatgagtttgttacgaggtctgagcagaggaacgcggaagagctcagcgcggaattggaagtgatcgttgagcatcttaggtcgatcctcacgaatccttcttttgtgcctatcgaagaggttgaagtacgtgatcacgcaatcacgcgtctgcgtgctggattggagactatggaggcacggtggagcgatgctgtgcatatgattgacggatggcgtcagcggatggtgtcaggcggtaagtccgtcgacatggaggatctgcagatgggactcagactgagtcctgttcgcgtcaaagacgttgtggagactgagaaggtcgtcccgatgaggctttcgtgtgtccaagaagaggtagaagaggaagacgaggaagttcaagttgtcaccagccattttcaagaagaagcggagcagcaaccgggacgccctcgatctcctagtcccgtcgagtcacttcatctggtgccagcccccggatacgaggcagacgatatggaggacgattccgactcagactccagcatcttccaagacgatcttgaaaatgatttcgatgtcgaagagccaaacgttgagattctacaaatctctaccgcggaatcgatagactcttcccctctgccagaaccacctcagatcagcccactgaaagacaatttctcctctggaaatcgcaacgctgacaaggatgcaccgggtgaagttatacctcacttatcaccagagatacgcacgagttctaccacatcatacgacagtccactatttggcaaatcaggtgaacggccatctcaaacatcgctaaataagaagctcttctcaaagccctccgctccagagccacagtctcaaccccagcgacaacaacggaacacggtccgaatagacgctgccactaccgtcgcatcgcagcctacccgaaccgcaagagcagtcacaaggaaatcagcagaatcgccatccatgtccaccaagacagccaaacggacagcttccgatcccagtccaaaacccagcacaaaagccgaagcgggcacaaagtcttcagagactaaacaagcacgaccccgctcccccatccgtcctcaacccgtaacttcccgtctcccacggcgaaacgcaccacagcagagtccactgaacatggcaaccatccaggctaagctcgcggcctcagagcgagacgcagacgcagctcgtgtacgagctaagctccgggccgtaaggaagacacgggaagttgctccgaacgccgaaagcgcaccaatcgatcaggttccgaagcctcagatcgatggagtaccccagacgcaggattctgaacaggatgaggtgggagaggtgcgggaagacgtagatcctgtgaagaaatcacaggattctgcaacgaggcgtgtgagttttgtacgcgaaggtgatggacaggtcgatgaacttgctgaggaaccacagggaggagaagaagagggaatgggtgataaggtggttgtgaagcggaagagggataggaggacgagtaaagtcgcgagtaggagacggagtacgttgaattcttgggagttgcagagtttgatacaggggggtgttggggagggggctgggactgcgggatga

SEQ ID NO: 25805 - protein, 800 aa, Muscodor strobelii
  misc_feature: SGI Peptide ID NO. 568810
  misc_feature (1)..(792): NCBI GI: 256731684 Blast Desc: NECHADRAFT_41370 [Nectria haematococca mpVI 77-13-4]
  misc_feature (1)..(792): NCBI GI: 46137491 Blast Desc: FG10261.1 [Gibberella zeae PH-1]
  misc_feature (1)..(487): NCBI GI: 39974181 Blast Desc: MGG_00763 [Magnaporthe grisea 70-15] gi|145018303|gb|EDK02582.1| MGG_00763 [Magnaporthe grisea 70-15]
  misc_feature (1)..(601): NCBI GI: 171691735 Blast Desc: protein product [Podospora anserina] gi|170945816|emb|CAP72616.1| protein product [Podospora anserina]
  misc_feature (1)..(460): NCBI GI: 116179840 Blast Desc: CHGG_00548 [Chaetomium globosum CBS 148.51] gi|88184845|gb|EAQ92313.1| CHGG_00548 [Chaetomium globosum CBS 148.51]
  misc_feature (1)..(457): NCBI GI: 85090961 Blast Desc: NCU04570 [Neurospora crassa OR74A] gi|28920048|gb|EAA29433.1| [Neurospora crassa OR74A] gi|28950009|emb|CAD70764.1| [Neurospora crassa]
  misc_feature (3)..(490): NCBI GI: 261351747 Blast Desc: NIMA interactive protein [Verticillium albo-atrum VaMs.102]
  misc_feature (46)..(660): NCBI GI: 156044428 Blast Desc: SS1G_10317 [Sclerotinia sclerotiorum 1980] gi|154694706|gb|EDN94444.1| SS1G_10317 [Sclerotinia sclerotiorum 1980]
  misc_feature (30)..(359): NCBI GI: 154294905 Blast Desc: BC1G_13575 [Botryotinia fuckeliana B05.10] gi|150844533|gb|EDN19726.1| BC1G_13575 [Botryotinia fuckeliana B05.10]
  misc_feature (6)..(356): NCBI GI: 30385731 Blast Desc: NIMA interactive protein [Emericella nidulans] gi|259485472|tpe|CBF82523.1| TPA: NIMA interactive protein [Source:UniProtKB/TrEMBL;Acc:Q86ZN8] [Aspergillus nidulans FGSC
MIDSENLRTASLYINNQLLSRGLLRDGQNINFANPDACDGGLEASMGQIISVVNDLILRRDRDAEHRESLSSTLRTLRADAQRQATEHERQTDKLNDAQRRLDTADSTERALRLQVKTAEQGIHKLKDEVAKMKSLVAQTRSACANEVRKRDRQIDSLKKAVSDAGRVRGGGKSRDVLTINVTGDFSGAETEGRGMPAGATESDEYSLRMETNEFLTELAKGLSEENEGLLALVQRTVDGLREMSGLDRPENGNGMAAQQGDEFVTRSEQRNAEELSAELEVIVEHLRSILTNPSFVPIEEVEVRDHAITRLRAGLETMEARWSDAVHMIDGWRQRMVSGGKSVDMEDLQMGLRLSPVRVKDVVETEKVVPMRLSCVQEEVEEEDEEVQVVTSHFQEEAEQQPGRPRSPSPVESLHLVPAPGYEADDMEDDSDSDSSIFQDDLENDFDVEEPNVEILQISTAESIDSSPLPEPPQISPLKDNFSSGNRNADKDAPGEVIPHLSPEIRTSSTTSYDSPLFGKSGERPSQTSLNKKLFSKPSAPEPQSQPQRQQRNTVRIDAATTVASQPTRTARAVTRKSAESPSMSTKTAKRTASDPSPKPSTKAEAGTKSSETKQARPRSPIRPQPVTSRLPRRNAPQQSPLNMATIQAKLAASERDADAARVRAKLRAVRKTREVAPNAESAPIDQVPKPQIDGVPQTQDSEQDEVGEVREDVDPVKKSQDSATRRVSFVREGDGQVDELAEEPQGGEEEGMGDKVVVKRKRDRRTSKVASRRRSTLNSWELQSLIQGGVGEGAGTAG

SEQ ID NO: 25806 - DNA, 3099 bp, Muscodor strobelii
  misc_feature: SGI EST ID NO. CUFF.60826.0
  misc_feature: Variant of the nucleotide sequence at SEQ ID NO 25804
ggcgtggggactttgtttacttgctgccccgcatagcaaccgcattcctctaaacactcaagaacccatacaattccaggcatagtcaatcaggacgctacaatatttctaagaatctttcaagtagtacaattccacattgtcgatttcttgcccgcaactcttacgacgcaaacagcggtttcaatctgggtcccggaatgcgatctgtgccgactgctggactggaattcgagtcgcatcgcgagacaaacaatcaggatccacacagacagacgaagacgcaggatgattgactcggagaatctgcgcacagcttcgctgtacatcaacaaccagctgttgtcgcgcggcctgttgcgcgatggccagaacatcaactttgcgaatcccgatgcctgcgacggcggccttgaggcttctatgggtcagatcatcagtgttgtcaatgacttgatcttgcgacgagatcgtgatgccgagcaccgcgaatccctctcctctacacttcgtacactacgcgccgacgctcagcgacaggcgacagaacatgaacgtcagacagacaaactcaacgatgcgcaacgacgactcgacacggccgactcgacagagcgcgcgctccgtctgcaggtgaagacggcggagcaggggatccacaagctgaaggacgaggtggccaagatgaagtcgctcgtcgcccagactcggagcgcatgcgccaacgaagtccggaagcgggatcgccagatcgatagtctgaagaaggccgtgtccgacgctgggcgagtgagaggaggtggcaagagccgcgacgtcctcaccatcaatgtgactggagacttcagcggcgcggaaacagagggcagaggcatgcctgccggcgcgacggagagcgacgagtatagtctcaggatggagactaatgagtttttgaccgagcttgccaagggcctgagcgaggagaacgagggcttgcttgcgcttgtgcaacgtactgttgatgggctgcgggagatgagtgggcttgataggccggagaatggtaatgggatggcggctcaacagggtgatgagtttgttacgaggtctgagcagaggaacgcggaagagctcagcgcggaattggaagtgatcgttgagcatcttaggtcgatcctcacgaatccttcttttgtgcctatcgaagaggttgaagtacgtgatcacgcaatcacgcgtctgcgtgctggattggagactatggaggcacggtggagcgatgctgtgcatatgattgacggatggcgtcagcggatggtgtcaggcggtaagtccgtcgacatggaggatctgcagatgggactcagactgagtcctgttcgcgtcaaagacgttgtggagactgagaaggtcgtcccgatgaggctttcgtgtgtccaagaagaggtagaagaggaagacgaggaagttcaagttgtcaccagccattttcaagaagaagcggagcagcaaccgggacgccctcgatctcctagtcccgtcgagtcacttcatctggtgccagcccccggatacgaggcagacgatatggaggacgattccgactcagactccagcatcttccaagacgatcttgaaaatgatttcgatgtcgaagagccaaacgttgagattctacaaatctctaccgcggaatcgatagactcttcccctctgccagaaccacctcagatcagcccactgaaagacaatttctcctctggaaatcgcaacgctgacaaggatgcaccgggtgaagttatacctcacttatcaccagagatacgcacgagttctaccacatcatacgacagtccactatttggcaaatcaggtgaacggccatctcaaacatcgctaaataagaagctcttctcaaagccctccgctccagagccacagtctcaaccccagcgacaacaacggaacacggtccgaatagacgctgccactaccgtcgcatcgcagcctacccgaaccgcaagagcagtcacaaggaaatcagcagaatcgccatccatgtccaccaagacagccaaacggacagcttccgatcccagtccaaaacccagcacaaaagccgaagcgggcacaaagtcttcagagactaaacaagcacgaccccgctcccccatccgtcctcaacccgtaacttcccgtctcccacggcgaaacgcaccacagcagagtccactgaacatggcaaccatccaggctaagctcgcggcctcagagcgagacgcagacgcagctcgtgtacgagctaagctccgggccgtaaggaagacacgggaagttgctccgaacgccgaaagcgcaccaatcgatcaggttccgaagcctcagatcgatggagtaccccagacgcaggattctgaacaggatgaggtgggagaggtgcgggaagacgtagatcctgtgaagaaatcacaggattctgcaacgaggcgtgtgagttttgtacgcgaaggtgatggacaggtcgatgaacttgctgaggaaccacagggaggagaagaagagggaatgggtgataaggtggttgtgaagcggaagagggataggaggacgagtaaagtcgcgagtaggagacggagtacgttgaattcttgggagttgcagagtttgatacaggggggtgttggggagggggctgggactgcgggatgaaagcgatgtgcggtatgagatgggaggggatgggatggggggcctggcgttaggttagggggtaggagttaagtgggtgataggagtggatgatgtattgtttcgatatttgaatcgcatggtgtttggttctttgatcgttgtttgggtgtttagttgtattggaattgaaatgatttttgatgtttatgtgcggttggagtttatgggatgtgtttatgagacgggacatctacctatgatgcttatggtgcattactgagcgtcatgtttattttatgagtggcctacccgcaggcattagttttttgagttctgcttggattgggttgatggtccgtccgtgagagcgcatatctaatcctaggtggtattggagggtgctatgagttatgtcctctaaaatgc

SEQ ID NO: 25807 - DNA, 1023 bp, Muscodor strobelii
  misc_feature: SGI cDNA ID NO. 568811
  misc_feature: Encodes the peptide sequence at SEQ ID NO 25808
atgccttcatttacgcgtatgagtctgctagcattactctcactatcagtggcaggtacacctgttgcaaacatcatagctagagaaccagatcgtgtcgttaggcaaacgacgcctactctgactgctgttgtcacagctacgccaacacatggagaatactttggccctgtggtgatagacggccgaacctactccgttctttatgacactggctctaacggcctctggatcaagaacggctctacggccgcgggtccaaccttttctacaaattatggcagtgggactgtctctggtaacattgtcagcggccgggtcaccatcgcgggatcaaccgtttctaaccaaccatttggtattgcgacagcctgggattctagctacaattcgtatgatggcatacttggactcggacgctctgcagtagcactcagctcgacttctccgacttggttggcaaacgccatgcctcaatataagaagcccgtcttcggagtttccataccctcttccggcgtcacgcctactttttcctttggttttgacgatacaacacatgagcaagggccgctggcaagtgttgccgcttcatcttctacgaacttatggaatatccccgtgaccagtttcaatattcccgcaaacgatacctcaattcaatgcgaccccgacacagggaccacagatatctttgtaccgtatgctgtggcgtggggattttggaatcaagtcgcagttgcgactccccagcccttgactggcccggattatcatcaaaagtggacgttcccctgcgccagcaagtcgtcagttccagacttcaaggttaccatcggtggtgtcaagtacactattgccgcggctgacacttatttcgtcaacacccctagtagtggtgtttgcggtgctcgtctccagggcatctctagtgggtgtatcttaggacagccattcttttatagcaactacgttgcctttgattatgggaataaggtcattggtctgaccggaaggaagtag

SEQ ID NO: 25808 - protein, 340 aa, Muscodor strobelii
  misc_feature: SGI Peptide ID NO. 568811
  misc_feature (53)..(339): Pfam Id: PF00026 Pfam Desc: Eukaryotic aspartyl protease
  misc_feature (86)..(336): Pfam Id: PF00026 Pfam Desc: Eukaryotic aspartyl protease
  misc_feature (45)..(336): NCBI GI: 85092451 Blast Desc: penicillopepsin [Neurospora crassa OR74A] gi|28920806|gb|EAA30165.1| penicillopepsin [Neurospora crassa OR74A]
  misc_feature (44)..(336): NCBI GI: 39960414 Blast Desc: MGG_09351 [Magnaporthe grisea 70-15] gi|145014299|gb|EDJ98867.1| MGG_09351 [Magnaporthe grisea 70-15]
  misc_feature (9)..(336): NCBI GI: 71997011 Blast Desc: F59D6.2 [Caenorhabditis elegans] gi|34146966|gb|AAB65877.2| F59D6.2 [Caenorhabditis elegans]
  misc_feature (7)..(336): NCBI GI: 17561740 Blast Desc: F59D6.3 [Caenorhabditis elegans] gi|2315321|gb|AAB65878.1| F59D6.3 [Caenorhabditis elegans]
  misc_feature (45)..(336): NCBI GI: 212535548 Blast Desc: extracellular aspartic endopeptidase, [Penicillium marneffei ATCC 18224] gi|210070329|gb|EEA24419.1| extracellular aspartic endopeptidase, [Penicillium marneffei ATCC 18224]
  misc_feature (51)..(340): NCBI GI: 261355057 Blast Desc: vacuolar protease A [Verticillium albo-atrum VaMs.102]
  misc_feature (42)..(336): NCBI GI: 67541436 Blast Desc: AN6888.2 [Aspergillus nidulans FGSC A4] gi|4151326|gb|AAD04378.1| aspartic protease [Emericella nidulans] gi|40739097|gb|EAA58287.1| conserved [Aspergillus nidulans FGSC ;
  misc_feature (67)..(339): NCBI GI: 225680203 Blast Desc: pepsin A [Paracoccidioides brasiliensis Pb03]
  misc_feature (53)..(336): NCBI GI: 114572174 Blast Desc: : cathepsin E isoform 3 [Pan troglodytes]
  misc_feature (67)..(339): NCBI GI: 226287844 Blast Desc: saccharopepsin [Paracoccidioides brasiliensis Pb18]
  misc_feature (53)..(328): SWISSPROT Homolog: EC 3.4.23.18 Aspergillopepsin I
MPSFTRMSLLALLSLSVAGTPVANIIAREPDRVVRQTTPTLTAVVTATPTHGEYFGPVVIDGRTYSVLYDTGSNGLWIKNGSTAAGPTFSTNYGSGTVSGNIVSGRVTIAGSTVSNQPFGIATAWDSSYNSYDGILGLGRSAVALSSTSPTWLANAMPQYKKPVFGVSIPSSGVTPTFSFGFDDTTHEQGPLASVAASSSTNLWNIPVTSFNIPANDTSIQCDPDTGTTDIFVPYAVAWGFWNQVAVATPQPLTGPDYHQKWTFPCASKSSVPDFKVTIGGVKYTIAAADTYFVNTPSSGVCGARLQGISSGCILGQPFFYSNYVAFDYGNKVIGLTGRK

SEQ ID NO: 25809 - DNA, 462 bp, Muscodor strobelii
  misc_feature: SGI cDNA ID NO. 568812
  misc_feature: Encodes the peptide sequence at SEQ ID NO 25810
atgtttcatctcacccctacttcaactctccccggacttcggttgcctcaacatgtcaattataaatcgatattatcgctcgccgccgctaacacagctaccgagaaacagtccaaatcattcttcgactgggtaaagaccaattcgggcacgactgcggctatagctacaggcgcattcttggctgctgctcccatggccgtcgcaggtccggtcttggggttcatgggtttcggtgccgctggtcctgctgcaggtggtgtcgcagctggtgtccaggccggcatcggcaacgtcgtcgctccgtccgtttttgcaacgcttcagagcgccgccatgggtggatacggtgccgccgccgttggaggagtggttcaggctgctggtggcataattgcaggtggagcggctctgaggaaatggacagggcgaagctttgggacgactgcgcaacagaagtga

SEQ ID NO: 25810 - protein, 153 aa, Muscodor strobelii
  misc_feature: SGI Peptide ID NO. 568812
  misc_feature (68)..(145): NCBI GI: 85083131 Blast Desc: NCU04486 [Neurospora crassa OR74A] gi|28918139|gb|EAA27819.1| NCU04486 [Neurospora crassa OR74A]
  misc_feature (39)..(141): NCBI GI: 189211789 Blast Desc: [Pyrenophora tritici-repentis Pt-1C-BFP] gi|187979422|gb|EDU46048.1| [Pyrenophora tritici-repentis Pt-1C-BFP]
  misc_feature (39)..(141): NCBI GI: 189211858 Blast Desc: [Pyrenophora tritici-repentis Pt-1C-BFP] gi|187979456|gb|EDU46082.1| [Pyrenophora tritici-repentis Pt-1C-BFP]
  misc_feature (44)..(141): NCBI GI: 189211454 Blast Desc: [Pyrenophora tritici-repentis Pt-1C-BFP] gi|187978150|gb|EDU44776.1| [Pyrenophora tritici-repentis Pt-1C-BFP]
  misc_feature (39)..(141): NCBI GI: 189205230 Blast Desc: [Pyrenophora tritici-repentis Pt-1C-BFP] gi|187986049|gb|EDU51537.1| [Pyrenophora tritici-repentis Pt-1C-BFP]
  misc_feature (23)..(148): NCBI GI: 71001202 Blast Desc: conserved [Aspergillus fumigatus Af293] gi|66852920|gb|EAL93244.1| conserved [Aspergillus fumigatus Af293] gi|159129364|gb|EDP54478.1| conserved [Aspergillus A1163]
  misc_feature (43)..(140): NCBI GI: 154303735 Blast Desc: [Botryotinia fuckeliana B05.10] gi|150854546|gb|EDN29738.1| [Botryotinia fuckeliana B05.10]
  misc_feature (46)..(121): NCBI GI: 256733258 Blast Desc: NECHADRAFT_79370 [Nectria haematococca mpVI 77-13-4]
  misc_feature (68)..(137): NCBI GI: 85083143 Blast Desc: NCU04489 [Neurospora crassa OR74A] gi|28918142|gb|EAA27822.1| [Neurospora crassa OR74A]
  misc_feature (44)..(141): NCBI GI: 169609851 Blast Desc: SNOG_08017 [Phaeosphaeria nodorum SN15] gi|160701928|gb|EAT84293.2| SNOG_08017 [Phaeosphaeria nodorum SN15]
MFHLTPTSTLPGLRLPQHVNYKSILSLAAANTATEKQSKSFFDWVKTNSGTTAAIATGAFLAAAPMAVAGPVLGFMGFGAAGPAAGGVAAGVQAGIGNVVAPSVFATLQSAAMGGYGAAAVGGVVQAAGGIIAGGAALRKWTGRSFGTTAQQK

SEQ ID NO: 25811 - DNA, 1065 bp, Muscodor strobelii
  misc_feature: SGI EST ID NO. CUFF.60893.2
  misc_feature: Variant of the nucleotide sequence at SEQ ID NO 25809
ggaccacgcccttgaagcgctcgacgactatactctgttctaatatgtcacttacctgaacactattgtttattgagtcagtaaggcgataagccactgagtgagttattggagagacattgcttttcaatcgtagtatgtcatctttgtagcgactgcaagctgctgtatcggagcgatcggtgcttcgccgtttgttactgtgcctcccattgatcatatcatcggtcacattctattcgaccatatctaagccccagcttcatgtttcatctcacccctacttcaactctccccggacttcggttgcctcaacatgtcaattataaatcgatgttgactctttttctctaacgtacccagcctatgtaaagctgtaaactaccaattcagaagccttgcgaagttcgtcaaagatgtccaaatcattcttcgactgggtaaagaccaattcgggcacgactgcggctatagctacaggcgcattcttggctgctgctcccatggccgtcgcaggtccggtcttggggttcatgggtttcggtgccgctggtcctgctgcaggtggtgtcgcagctggtgtccaggccggcatcggcaacgtcgtcgctccgtccgtttttgcaacgcttcagagcgccgccatgggtggatacggtgccgccgccgttggaggagtggttcaggctgctggtggcataattgcaggtggagcggctctgaggaaatggacagggcgaagctttgggacgactgcgcaacagaagtgatgagggttaagacaggtaacttcgtgctttgaatttttgtttggtacgtaggctacgatggaagatacgcgacaatagcgccaaacatgctgaaagagagggtagtcatttaaaagcaaaaatgagagaaaataattgatataagagagagattcacggcgacagactccatgattgtgtctgattgcaactttgcgacgatgagtggccacggtgagacagcgcattttccatgaccctcgatcattcgaaacgtgctgaaagcatttgattgagagtcaggtgtagttcctcg

SEQ ID NO: 25812 - DNA, 621 bp, Muscodor strobelii
  misc_feature: SGI cDNA ID NO. 568813
  misc_feature: Encodes the peptide sequence at SEQ ID NO 25813
atgtcggccgtgactcctggcatcgccgctgaccctgctgccttgttggcaaaagggcggaagtgctacgaggaggttaagtaccccaaagccatttcctggctcacaaaggctatcgacacttgtccctgcggtgtccctgtgagtgacaagatctgtgcgtgcaagttgctcttggacgccatcaaggaggaccgtctggagcaagagctccggaaaaaatgcatttgctccgtcaatgcaaatagacgatgcaccaatggtctgcacttagatgcccttgacgcgctcgcagctacccatgaagcacgctcgcatgtcaagatggctttcaccgtggctcagaccatgatcgatctgtttcctcgagaagcaaagggatttctccgtctaggcaagctatttcgtatcgaggaccagtaccgcgccgcctaccgtacatacgagcagggatgccagcttgtggccaagaagaacaacaaccacgtccttctaccagtcctcgttcggagtaaagacaagatcaggagccgggcatttgctgcggatccactgactgctttgccaacggaactagctgttgaggtcttcaaatttgttggatttcgctcggtctggtaa

SEQ ID NO: 25813 - protein, 206 aa, Muscodor strobelii
  misc_feature: SGI Peptide ID NO. 568813
  misc_feature (1)..(206): NCBI GI: 261351748 Blast Desc: conserved [Verticillium albo-atrum VaMs.102]
  misc_feature (14)..(205): NCBI GI: 256732089 Blast Desc: NECHADRAFT_80354 [Nectria haematococca mpVI 77-13-4]
  misc_feature (84)..(205): NCBI GI: 46136819 Blast Desc: FG09925.1 [Gibberella zeae PH-1]
  misc_feature (86)..(193): NCBI GI: 156044432 Blast Desc: [Sclerotinia sclerotiorum 1980] gi|154694708|gb|EDN94446.1| [Sclerotinia sclerotiorum 1980]
  misc_feature (17)..(203): NCBI GI: 189197151 Blast Desc: F-box/TPR repeat containing protein pof3 [Pyrenophora tritici-repentis Pt-1C-BFP] gi|187980861|gb|EDU47487.1| F-box/TPR repeat containing protein pof3 [Pyrenophora tritici-repentis
  misc_feature (91)..(205): NCBI GI: 19075652 Blast Desc: F-box protein Pof3 [Schizosaccharomyces pombe] gi|12230419|sp|O74991.1|POF3_SCHPO RecName: Full=F-box/TPR repeat protein pof3 gi|3184091|emb|CAA19347.1| F-box protein Pof3 pombe]
  misc_feature (110)..(205): NCBI GI: 213403123 Blast Desc: F-box/TPR repeat protein pof3 [Schizosaccharomyces japonicus yFS275] gi|212000381|gb|EEB06041.1| F-box/TPR repeat protein pof3 [Schizosaccharomyces japonicus yFS275]
  misc_feature (80)..(205): NCBI GI: 169616504 Blast Desc: SNOG_11424 [Phaeosphaeria nodorum SN15] gi|160703199|gb|EAT81132.2| SNOG_11424 [Phaeosphaeria nodorum SN15]
  misc_feature (16)..(197): NCBI GI: 145610971 Blast Desc: [Magnaporthe grisea 70-15] gi|145018304|gb|EDK02583.1| [Magnaporthe grisea 70-15]
  misc_feature (65)..(166): NCBI GI: 50292073 Blast Desc: protein product [Candida glabrata] gi|49527781|emb|CAG61430.1| protein product [Candida glabrata]
MSAVTPGIAADPAALLAKGRKCYEEVKYPKAISWLTKAIDTCPCGVPVSDKICACKLLLDAIKEDRLEQELRKKCICSVNANRRCTNGLHLDALDALAATHEARSHVKMAFTVAQTMIDLFPREAKGFLRLGKLFRIEDQYRAAYRTYEQGCQLVAKKNNNHVLLPVLVRSKDKIRSRAFAADPLTALPTELAVEVFKFVGFRSVW

SEQ ID NO: 25814 - DNA, 2322 bp, Muscodor strobelii
  misc_feature: SGI EST ID NO. CUFF.60910.1
  misc_feature: Variant of the nucleotide sequence at SEQ ID NO 25812
cggacccactcgccgcctacaaattggcgaccctcaaccatgcactaccactcgccgtgtcttcacaacaacaacattgccaacaatgtcggccgtgactcctggcatcgccgctgaccctgctgccttgttggcaaaagggcggaagtgctacgaggaggttaagtaccccaaagccatttcctggctcacaaaggctatcgacacttgtccctgcggtgtccctgtgagtgacaagatctgtgcgtgcaagttgctcttggacgccatcaaggaggaccgtctggagcaagagctccggaaaaaatgcatttgctccgtcaatgcaaatagacgatgcaccaatggtctgcacttagatgcccttgacgcgctcgcagctacccatgaagcacgctcgcatgtcaagatggctttcaccgtggctcagaccatgatcgatctgtttcctcgagaagcaaagggatttctccgtctaggcaagctatttcgtatcgaggaccagtaccgcgccgcctaccgtacatacgagcagggatgccagcttgtggccaagaagaacaacaaccacgtccttctaccagtcctcgttcggagtaaagacaagatcaggagccgggcatttgctgcggatccactgactgctttgccaacggaactagctgttgaggtcttcaaatttgttggatttcgctcggtctggtaattattcccctccttcaatctggctatcgcaatctcatacatatgtcattagtctgtcgacgcgtgtttcgcgctcttggagggatttcttggtgaaaagagactctctcactgtagatctttggcagcgactgatcttcacctccatcaacaaaacagttcagctgccacagatgatgcgataccagctacgttctaacagccagatcactgaactgcacattggggactgcctcaaattcgggcttagctccgtgtttctccgatggatggtgacaagatgtactactttgaagattctctcattgtgcgccaccaccagcagtgtcggccaaacgcatcacccacatccgatgcctgtcagttcacttagattgaaaaagcttcatattggttactatgttccaatcagtggaatttggttgaattcggtcatcgagtcttcagcggagacgctggaagacttggccatattgaattgtggcaatcagtcaactgcgcccgttcgtgcggagtttccaactcttcctcgccttaagtccctgcatctttcgagttgtgatgaactacaagcagatgttgaattgatgtcgttcatttatagaacgccgaatatccaagaattttggctcgacaacgtttctgtgctttttcagcctgaggtgtggcctgagtgctattggaatctactcaaacgcttgttcattggtgcagatgtctcttggccacgtcgaacgaacatacttccgtttcaaatcaccgagaacatcgaggagctatatctattgagctgcgatgcagtgcattgcctcttaatcatacctttgcagaccgaacgagacgagcttccagtcctgagcaaacttcgcaaattctttctggcggatttccataacacggatcctacagcccagcgcgcagattggctccaaccctggctcacaccgagtttggaatcaggtgtattggaggaactccaaatcaacccttccccgatccgccgttttggatgaaaagcaagcatctacagttccttggtgttgagaacatctctcactattcgacgtatcctactcccggtgctgctgttttcgcagctctatcttgctttccagctgtgaccgcgatcgacatttttgcagagactctgagcgaaggagaaattgcaagcctcattaccaagaatggtataaaaaaggtctataattcgagacatttctacgatcttcagcaagtacgaacgttggcgcacactaagggccttgctgaggtcatccagaaaaagtatattgatgcagtggctatccacccggaaggattcatttgatgctcacgaaaactcgcacgaaaaggggatctagaagatgcatggcgttacacgaggttgctttaagatataccctttgctttgccttgcaaggttgctgtgcacattcaggattgcgtgcatgggcaggaatacatgattgtgtccggatcgcgaaatcagacgatatgactgttgcaaaaggactccgagtatggataggagatcagacacttggtctctatgaagagttttgagagactgcgtccgtagtgcaatagcaaaaatgaatacaaaatttggctctgaga

SEQ ID NO: 25815 - DNA, 4116 bp, Muscodor strobelii
  misc_feature: SGI cDNA ID NO. 568814
  misc_feature: Encodes the peptide sequence at SEQ ID NO 25816
atgttgcacgcatcctcctcgaacaaccactctctattctccttcagccggaatggaggcccgagcgacaccgacgacagcaccaccgcctccttcgacttcctccccaccgtgagcttcgatgattttcaaaacagcctcgagtccgccaccaccgacttcaaactgacccaattcccctcgccctcgggccacggcagcatcctggctgagaaggccctgctggacgatcccatggcttcccaccaatctgcggcctcccggagaggagatgcatcgcgctcctcgatggcgcccaaccccacaccaaataccgccacctcgagaccgacgagatctggctccatcttgaggagaccgagcacatcttcacggcaagttagcaacgggtcgactgtgtccatatcctcaggcatcatggatgcccctaccgcgccagcagccatgcgggcacgccgtcaaagccattatcctcctgtctcgagcactaacggcaacggcagcactaatattgcgaagccgccgaggaaatcgattggaccgggtgtcatcgaagccgactacgggagccgagtgtcggtcaagcgccggcccagtctgctgtctgctggtactggaaagagcaacggaggcgctcgagcgtctttcgaaacccttagtgggcagtccagtgatgattcgaggcagctgaatgtatcgcgagcgaataaggcacgctccatacagccggccccgagactgtcaacaaccttctcagcgaacttggatagcgcgagtgccacgacgccggagaagagtcgaatgtccacctcgttcccaaagtcgcccagagggaaagcccctgcgctctcttcccggcgagtatcagtcatgccagggtcccatgccactggccttggtgccaggacgatatcacctacagatgcccagcgcatgaagcgaatgtccgcacatcctcagagcttggccactatagcacatgcgccacctcctccaatcgatgtccgccccaactcacgctcgccgtccatgatccctcggaagagctctactccgtcttctttgcgaactacgcccgaggtcagcaacaggaagtcatatagctcaggtctctctgccaactcggccacgagccacaatacacacaggacttcgacaagctcaatccagcgcctttcacaaggtggatcgaccactaggcttcccgcacccaaaagctcaactttgcagaatcctcctgctgaagatgaagaagaggttccgccggtccctgctattcccaaggcctatgaatccccaaaagacatgccacccgaaatatcgtggcttgagaaaaggaagtcaaattacgctctggatactagtagtctccacagcacctcgactgatacgttatcaaatcgaccatctcttgagggaccgataaagctgcaaatgactgccccagcccgtagggctgcgaggaagacaatggctggtgcctcatcagatgttgagcaaaaggagccgtcaaatacatcccgcaaaaatcgacagcctctcagtctcccaccactgaatttgggtcctctaagcaccccaaccgctgctaaaatcgcagctctaaaagaccagagctctgataaggggaagtctagtccacctccttctcggataatagcgaagacgcctacaacgcccatgactgcttcgagaagcacattcttctcaaggaaccgccccgaaaaggacgcagaccggacggtaccagccaaacgcagtactagctcagtccatatgttgagccgtctggatagtcccagtgctgaagatccgaatagttcttccgagtcattatttgctctgtccaaaacgccgtcacggaaacccacccaatcaccatttctgtcatcttctgcgccgaaagctggcaattctcttgaaaatctcatggccaagtcgaaaactattgccgatattagtcacttgacgatcgtggagagcaagacggctgaggctacaccagagcaaaagccaatgggaccaagagcccccaagctaacgaagccaaagtcaccaaccggtgccagtccagaagaaccgccgacgccatcttctatgacaacacttcggcgaaaactgagtctgtcgtggaaacgaagtggctccaaggtcagcaatcatgtttcgaccagctccgtcgataaagcgacagatagacagatacgccaggagagcatgccaccaccacgcattccggtatctgcgtctatgaatatcaacgccacgaaagcaccaagccctagtcacacggcaaagccggtcggaagctatctcgagtctaggcgaagaaagagctctgcttcgagtttgaccacaaccctcagccatgacaagactcgcagtgattggaacgccgcaaagaaggatgtcggcaacagttccttgattgagacatccacacaacctcgcgtctcatctgtgcagaaagtcgttcgtccacgtccctcaactgcttccattaggagccatcacgatccacatgcagacttggaccgtgatgacctcgccgccgaggatgagatgaaaaagcttggcgcaaaaagaaaagaaacagagattgcggctcggacacttgatgcacttcgaaagagggctagccccaaagagcgcgttggcccccaagatgctttgcgaatcgcgatgctaaacatctacgagaaaggcgaaatcatcgactacaacgatatttacttttgcggcactcagaatgccagtaaagtcgtgggcgacttgaatgcatcgcaaccaaattttgggtacgatgatgatcgcggtgattactcgatcattgtgggagatcacttggcttatcgctatgaaatcgttgacgtgcttggcaaaggcagctttgggcaggtagtcagatgcatcgatcacaaaacgggcgttcttgttgcggtgaaaattatccgaaacaagaagagattccatcagcaggctctcgtcgaagtcaacattttgaagaagcttcgtgagtgggatccgaagaacaagcacagcatggtcaacttcacacacagtttctatttccgaggtcatctttgcatttcgaccgagttacttgatatgaacctctacgagtttatcaagtccaactcgttccgtggtttctccctaaaactcattcgacgcttcacgaagcaaatgctcagctcgctgaatctgctcaaacaacacaaggtaattcattgtgatcttaagccagaaaatatcctcctccgccatccactacactccgagattaaagtcatcgacttcggttctagctgcttcgaaaatgagaaagtgtacacatatatccagtcgcgcttctatcgatcgcccgaagtcatattgggcatgacttatggccttcccatcgatatgtggagtgtaggctgcatattggccgaattatacactggcgtgcccatatttcctggtgagaacgaacaagagcaactcgcctgcatcatggaggtttttggaccaccggaaaagcatctcattgagaaaagcacaaggaagaagctgttcttcgattcaatgggcaagcctcgtctgaccgtatcttcgaagggaagaaggcgaagaccctcttcgaaaactctacaacaggctatcaaatgtgacgatgagccgttccttgatttcctaacccgctgtttgagatgggatccagaccgccgcttaaaaccggaagatgccattcgtcatgagttcatcactggtcagaaaacttctgttccagttgccagaactcgtgagtcttctcctatgaaacgtcacaacacaatctctgtaccaagaccgttgcctgacccccctaccgtcaagagcaatgccgtattccggccaagagaggccaccaatgccagcccccagaagctggcaccgggctcaagacgagcatcggcaattaatggtccagcaacggctagcacaggtgtgaagaggacaagcaccagtaacggtcctgtttcatcctctaccgtaggcggttccaacttacctcgcgtagctgggcgaactgctagtggcaagcaggacctggcgtctgtgggtgccagtgttgcgatgagtcgacgagcatga

SEQ ID NO: 25816 - protein, 1371 aa, Muscodor strobelii
  misc_feature: SGI Peptide ID NO. 568814
  misc_feature (953)..(1249): Pfam Id: PF00069 Pfam Desc: Protein kinase domain
  misc_feature (953)..(987): Pfam Id: PF07714 Pfam Desc: Protein tyrosine kinase
  misc_feature (1)..(1371): NCBI GI: 256731795 Blast Desc: NECHADRAFT_41140 [Nectria haematococca mpVI 77-13-4]
  misc_feature (1)..(1371): NCBI GI: 145610979 Blast Desc: MGG_00760 [Magnaporthe grisea 70-15] gi|145018308|gb|EDK02587.1| MGG_00760 [Magnaporthe grisea 70-15]
  misc_feature (1)..(1371): NCBI GI: 171691765 Blast Desc: protein product [Podospora anserina] gi|170945831|emb|CAP72631.1| protein product [Podospora anserina]
  misc_feature (1)..(1371): NCBI GI: 46137159 Blast Desc: FG10095.1 [Gibberella zeae PH-1]
  misc_feature (1)..(1371): NCBI GI: 170674501 Blast Desc: serine/threonine protein kinase [Epichloe festucae]
  misc_feature (79)..(1353): NCBI GI: 85099941 Blast Desc: NCU06638 [Neurospora crassa OR74A] gi|18307426|emb|CAD21489.1| related to dual specificity protein kinase pom1 [Neurospora crassa] gi|28922401|gb|EAA31635.1| crassa
  misc_feature (2)..(1358): NCBI GI: 156065727 Blast Desc: SS1G_00874 [Sclerotinia sclerotiorum 1980] gi|154691733|gb|EDN91471.1| SS1G_00874 [Sclerotinia sclerotiorum 1980]
  misc_feature (506)..(1370): NCBI GI: 261351750 Blast Desc: dual specificity protein kinase pom1 [Verticillium albo-atrum VaMs.102]
  misc_feature (2)..(1358): NCBI GI: 154304859 Blast Desc: BC1G_09015 [Botryotinia fuckeliana B05.10] gi|150853877|gb|EDN29069.1| BC1G_09015 [Botryotinia fuckeliana B05.10]
  misc_feature (2)..(1358): NCBI GI: 261193581 Blast Desc: dual specificity tyrosine-phosphorylation regulated kinase 2 [Ajellomyces dermatitidis SLH14081] gi|239588801|gb|EEQ71444.1| dual specificity regulated kinase 2 2
MLHASSSNNHSLFSFSRNGGPSDTDDSTTASFDFLPTVSFDDFQNSLESATTDFKLTQFPSPSGHGSILAEKALLDDPMASHQSAASRRGDASRSSMAPNPTPNTATSRPTRSGSILRRPSTSSRQVSNGSTVSISSGIMDAPTAPAAMRARRQSHYPPVSSTNGNGSTNIAKPPRKSIGPGVIEADYGSRVSVKRRPSLLSAGTGKSNGGARASFETLSGQSSDDSRQLNVSRANKARSIQPAPRLSTTFSANLDSASATTPEKSRMSTSFPKSPRGKAPALSSRRVSVMPGSHATGLGARTISPTDAQRMKRMSAHPQSLATIAHAPPPPIDVRPNSRSPSMIPRKSSTPSSLRTTPEVSNRKSYSSGLSANSATSHNTHRTSTSSIQRLSQGGSTTRLPAPKSSTLQNPPAEDEEEVPPVPAIPKAYESPKDMPPEISWLEKRKSNYALDTSSLHSTSTDTLSNRPSLEGPIKLQMTAPARRAARKTMAGASSDVEQKEPSNTSRKNRQPLSLPPLNLGPLSTPTAAKIAALKDQSSDKGKSSPPPSRIIAKTPTTPMTASRSTFFSRNRPEKDADRTVPAKRSTSSVHMLSRLDSPSAEDPNSSSESLFALSKTPSRKPTQSPFLSSSAPKAGNSLENLMAKSKTIADISHLTIVESKTAEATPEQKPMGPRAPKLTKPKSPTGASPEEPPTPSSMTTLRRKLSLSWKRSGSKVSNHVSTSSVDKATDRQIRQESMPPPRIPVSASMNINATKAPSPSHTAKPVGSYLESRRRKSSASSLTTTLSHDKTRSDWNAAKKDVGNSSLIETSTQPRVSSVQKVVRPRPSTASIRSHHDPHADLDRDDLAAEDEMKKLGAKRKETEIAARTLDALRKRASPKERVGPQDALRIAMLNIYEKGEIIDYNDIYFCGTQNASKVVGDLNASQPNFGYDDDRGDYSIIVGDHLAYRYEIVDVLGKGSFGQVVRCIDHKTGVLVAVKIIRNKKRFHQQALVEVNILKKLREWDPKNKHSMVNFTHSFYFRGHLCISTELLDMNLYEFIKSNSFRGFSLKLIRRFTKQMLSSLNLLKQHKVIHCDLKPENILLRHPLHSEIKVIDFGSSCFENEKVYTYIQSRFYRSPEVILGMTYGLPIDMWSVGCILAELYTGVPIFPGENEQEQLACIMEVFGPPEKHLIEKSTRKKLFFDSMGKPRLTVSSKGRRRRPSSKTLQQAIKCDDEPFLDFLTRCLRWDPDRRLKPEDAIRHEFITGQKTSVPVARTRESSPMKRHNTISVPRPLPDPPTVKSNAVFRPREATNASPQKLAPGSRRASAINGPATASTGVKRTSTSNGPVSSSTVGGSNLPRVAGRTASGKQDLASVGASVAMSRRA

SEQ ID NO: 25817 - DNA, 6555 bp, Muscodor strobelii
  misc_feature: SGI EST ID NO. CUFF.60905.0
  misc_feature: Variant of the nucleotide sequence at SEQ ID NO 25815
caccatgtcatgtatatcatgtccaaaaatgtaagaagtgcagagattcatgagaatgaggtaaaaatagggggccatagttcaccgatggcgatggcgatgatcggaaggatgagacagaccgttgcttttgcaagcacaacatttcttgagggctgcaggatagcacaatggtacgccagggtaacacagtgatatcaatatctaatttcgctacaagagacggcaatgagggatttgaggattatggacattacggtgacagagctgatgaaacatcgagtattgtgatcttgccgatgcgatgagcaaagcagttgttgtactacagaaaaaatgccaatgttactggtgaaaagaaaaagatatcgaatggggtttggaacatgttccgccatttccccggggaagtccataagcgtacaataataggacttgttggtatatgacggcatgaaatataggcggatggattagtatcctttgattgtcggagcaacacgtagaaaaggatgcgatatcacggtgcaagtggtcatgttgcttccgttctaaacttcaaggacgtccttgacggatttcatctggggtcgataggacttctaggaggcttttagtatggatcagcagggttcacacctcacccccagggcccgccatgacggtcaccggcagtctgcatttctagtagtggacaacaagggcccttacctgaagggcggatagtgcggataataagtgaatacctaatattcggaatcatgttgagagatatcgtactgcatgtttagatattatttgcattggcgaatcatctgtgcagtccatgtggcgtcgatggttgtgcaagcgtctgcaatgcagtttgttggtcgtggatgggcctgtggcctgctcttgaaccactggatagccactggatctgattgagccaaaggtgacggtcttgtccaagctgggaagtgacagtggagtgaaccccgtgcgtctgccagtcgaacctgtccgcttcttcatttacgggcaggagattgagatttggagccgtctacctgcccacgcctttcctgcattcgcaaggagcctctcgacgccttgcttctggcctgtcgcctgtcaatcgtgtcgacgggaaaaaaagacgtgaacaaaacaacatcgcccccagaccaatcagggcgtgcattttgcagagctacctgtccgatttagactccgccaatccctttctccctttgacgctgcctctgacgtcccatcgtcggagaagtcacatcctgcggcaccgacaacatcactctcaccgatttccagagctccgtcgtgccacagctcctcttcaccccctcggaatgtggtaaacgtgtcgctgcactcagctccttagccggactgagactgatcgcgactcctgtgtgggttcgcagcggattctgcccgctgctgctgctgctgctgttgctgcgagaagacagagagagcaaggacaggatactcactgcactgcagcgcacagccttgtatcctgtaccatcgggaccccccctctttaacagcactccgatcttcactctgctcgttctggccctcggaacgcgctcgttgtagtccctatgaatacggacatccatctgaatgctgctggttcgaggccagctacgtactcagcaacgcgatctaccaaggagaatatccatcctgtgaacaagacatcttctgcatcagttgctgccgacgaatcctccatgttgcacgcatcctcctcgaacaaccactctctattctccttcagccggaatggaggcccgagcgacaccgacgacagcaccaccgcctccttcgacttcctccccaccgtgagcttcgatgattttcaaaacagcctcgagtccgccaccaccgacttcaaactgacccaattcccctcgccctcgggccacggcagcatcctggctgagaaggccctgctggacgatcccatggcttcccaccaatctgcggcctcccggagaggagatgcatcgcgctcctcgatggcgcccaaccccacaccaaataccgccacctcgagaccgacgagatctggctccatcttgaggagaccgagcacatcttcacggcaagttagcaacgggtcgactgtgtccatatcctcaggcatcatggatgcccctaccgcgccagcagccatgcgggcacgccgtcaaagccattatcctcctgtctcgagcactaacggcaacggcagcactaatattgcgaagccgccgaggaaatcgattggaccgggtgtcatcgaagccgactacgggagccgagtgtcggtcaagcgccggcccagtctgctgtctgctggtactggaaagagcaacggaggcgctcgagcgtctttcgaaacccttagtgggcagtccagtgatgattcgaggcagctgaatgtatcgcgagcgaataaggcacgctccatacagccggccccgagactgtcaacaaccttctcagcgaacttggatagcgcgagtgccacgacgccggagaagagtcgaatgtccacctcgttcccaaagtcgcccagagggaaagcccctgcgctctcttcccggcgagtatcagtcatgccagggtcccatgccactggccttggtgccaggacgatatcacctacagatgcccagcgcatgaagcgaatgtccgcacatcctcagagcttggccactatagcacatgcgccacctcctccaatcgatgtccgccccaactcacgctcgccgtccatgatccctcggaagagctctactccgtcttctttgcgaactacgcccgaggtcagcaacaggaagtcatatagctcaggtctctctgccaactcggccacgagccacaatacacacaggacttcgacaagctcaatccagcgcctttcacaaggtggatcgaccactaggcttcccgcacccaaaagctcaactttgcagaatcctcctgctgaagatgaagaagaggttccgccggtccctgctattcccaaggcctatgaatccccaaaagacatgccacccgaaatatcgtggcttgagaaaaggaagtcaaattacgctctggatactagtagtctccacagcacctcgactgatacgttatcaaatcgaccatctcttgagggaccgataaagctgcaaatgactgccccagcccgtagggctgcgaggaagacaatggctggtgcctcatcagatgttgagcaaaaggagccgtcaaatacatcccgcaaaaatcgacagcctctcagtctcccaccactgaatttgggtcctctaagcaccccaaccgctgctaaaatcgcagctctaaaagaccagagctctgataaggggaagtctagtccacctccttctcggataatagcgaagacgcctacaacgcccatgactgcttcgagaagcacattcttctcaaggaaccgccccgaaaaggacgcagaccggacggtaccagccaaacgcagtactagctcagtccatatgttgagccgtctggatagtcccagtgctgaagatccgaatagttcttccgagtcattatttgctctgtccaaaacgccgtcacggaaacccacccaatcaccatttctgtcatcttctgcgccgaaagctggcaattctcttgaaaatctcatggccaagtcgaaaactattgccgatattagtcacttgacgatcgtggagagcaagacggctgaggctacaccagagcaaaagccaatgggaccaagagcccccaagctaacgaagccaaagtcaccaaccggtgccagtccagaagaaccgccgacgccatcttctatgacaacacttcggcgaaaactgagtctgtcgtggaaacgaagtggctccaaggtcagcaatcatgtttcgaccagctccgtcgataaagcgacagatagacagatacgccaggagagcatgccaccaccacgcattccggtatctgcgtctatgaatatcaacgccacgaaagcaccaagccctagtcacacggcaaagccggtcggaagctatctcgagtctaggcgaagaaagagctctgcttcgagtttgaccacaaccctcagccatgacaagactcgcagtgattggaacgccgcaaagaaggatgtcggcaacagttccttgattgagacatccacacaacctcgcgtctcatctgtgcagaaagtcgttcgtccacgtccctcaactgcttccattaggagccatcacgatccacatgcagacttggaccgtgatgacctcgccgccgaggatgagatgaaaaagcttggcgcaaaaagaaaagaaacagagattgcggctcggacacttgatgcacttcgaaagagggctagccccaaagagcgcgttggcccccaagatgctttgcgaatcgcgatgctaaacatctacgagaaaggcgaaatcatcgactacaacgatatttacttttgcggcactcagaatgccagtaaagtcgtgggcgacttgaatgcatcgcaaccaaattttgggtacgatgatgatcgcggtgattactcgatcattgtgggagatcacttggcttatcgctatgaaatcgttgacgtgcttggcaaaggcagctttgggcaggtagtcagatgcatcgatcacaaaacgggcgttcttgttgcggtgaaaattatccgaaacaagaagagattccatcagcaggctctcgtcgaagtcaacattttgaagaagcttcgtgagtgggatccgaagaacaagcacagcatggtcaacttcacacacagtttctatttccgaggtcatctttgcatttcgaccgagttacttgatatgaacctctacgagtttatcaagtccaactcgttccgtggtttctccctaaaactcattcgacgcttcacgaagcaaatgctcagctcgctgaatctgctcaaacaacacaaggtaattcattgtgatcttaagccagaaaatatcctcctccgccatccactacactccgagattaaagtcatcgacttcggttctagctgcttcgaaaatgagaaagtgtacacatatatccagtcgcgcttctatcgatcgcccgaagtcatattgggcatgacttatggccttcccatcgatatgtggagtgtaggctgcatattggccgaattatacactggcgtgcccatatttcctggtgagaacgaacaagagcaactcgcctgcatcatggaggtttttggaccaccggaaaagcatctcattgagaaaagcacaaggaagaagctgttcttcgattcaatgggcaagcctcgtctgaccgtatcttcgaagggaagaaggcgaagaccctcttcgaaaactctacaacaggctatcaaatgtgacgatgagccgttccttgatttcctaacccgctgtttgagatgggatccagaccgccgcttaaaaccggaagatgccattcgtcatgagttcatcactggtcagaaaacttctgttccagttgccagaactcgtgagtcttctcctatgaaacgtcacaacacaatctctgtaccaagaccgttgcctgacccccctaccgtcaagagcaatgccgtattccggccaagagaggccaccaatgccagcccccagaagctggcaccgggctcaagacgagcatcggcaattaatggtccagcaacggctagcacaggtgtgaagaggacaagcaccagtaacggtcctgtttcatcctctaccgtaggcggttccaacttacctcgcgtagctgggcgaactgctagtggcaagcaggacctggcgtctgtgggtgccagtgttgcgatgagtcgacgagcatgaggactctcaaattgagcttgggacgcgtttacgcgacgctgcgatggacttaacgattattttgacgaagatgatttgggtattgttttggcgctgctctttgctgcaggatgcccgtcacgaaacgacatccacaggaattttcttctgcatggcgatgtgacgaaccttcagaccctcgaaacttctattttttgccactataaacactacctacgacttgcgaccgttcgatatccctcttacaccctttccctttaagagtcctatatacatagtccgcgttcgaagcatgcaaagcgatacaggcgagcagtcgcggccagacctccctactctcgagggagtgatttgatggacacgatggagaccgcgactgccttgcttcctgttttagtagacttaatatactaccgcggcgaagaaggacggagcgaaacgactcagaggttggtcaacagttttctactgatgccgacgccttccaaatgcccaagacgttgggcagtgcgagtcaatgagacacaagaatataaaataccattgtatgctaatagacttcgagaatggttgggcacgattacgttcatctggatggcgatgccttgtgccaaaacatttatcaattgaaatcatgttccaatttacctacctggcgcactatgagtgttgttgagagcgctttgtacctgcg

SEQ ID NO: 25818 - DNA, 291 bp, Muscodor strobelii
  misc_feature: SGI cDNA ID NO. 568815
  misc_feature: Encodes the peptide sequence at SEQ ID NO 25819
atggcgaacgacaaaataccgaccgtcggcaccctcgaccggccagaaaatgtccatacgcttcttaaaggagaccggggggatgactgcttagagtgcaggctcacaggaggcgccgcattcatgggcctggcagcatacagctactactccggcaacaagcagatcgatgcccagcgcgcaaagatattagccagcaaatcgcccttcggtatacagagtcgcaagtttggaatcgccgccacgtcactggcactggcttacttggggatatggagggctttcctctga

SEQ ID NO: 25819 - protein, 96 aa, Muscodor strobelii
  misc_feature: SGI Peptide ID NO. 568815
  misc_feature (1)..(95): NCBI GI: 85080650 Blast Desc: NCU03997 [Neurospora crassa OR74A] gi|28917651|gb|EAA27346.1| [Neurospora crassa OR74A]
  misc_feature (1)..(95): NCBI GI: 261351726 Blast Desc: conserved [Verticillium albo-atrum VaMs.102]
  misc_feature (8)..(93): NCBI GI: 156043607 Blast Desc: [Sclerotinia sclerotiorum 1980] gi|154695194|gb|EDN94932.1| [Sclerotinia sclerotiorum 1980]
  misc_feature (1)..(95): NCBI GI: 171677911 Blast Desc: protein product [Podospora anserina] gi|170937024|emb|CAP61682.1| protein product [Podospora anserina]
  misc_feature (14)..(95): NCBI GI: 255947270 Blast Desc: Pc22g03610 [Penicillium chrysogenum Wisconsin 54-1255] gi|211591419|emb|CAP97649.1| Pc22g03610 [Penicillium chrysogenum Wisconsin 54-1255]
  misc_feature (23)..(95): NCBI GI: 226280979 Blast Desc: PAAG_06963 [Paracoccidioides brasiliensis Pb01]
  misc_feature (1)..(95): NCBI GI: 212534782 Blast Desc: conserved [Penicillium marneffei ATCC 18224] gi|210069946|gb|EEA24036.1| conserved [Penicillium marneffei ATCC 18224]
  misc_feature (1)..(95): NCBI GI: 242791130 Blast Desc: conserved [Talaromyces stipitatus ATCC 10500] gi|218718285|gb|EED17705.1| conserved [Talaromyces stipitatus ATCC 10500]
  misc_feature (21)..(95): NCBI GI: 238504262 Blast Desc: conserved [Aspergillus flavus NRRL3357] gi|220690833|gb|EED47182.1| conserved [Aspergillus flavus NRRL3357]
  misc_feature (28)..(95): NCBI GI: 261197295 Blast Desc: [Ajellomyces dermatitidis SLH14081] gi|239595680|gb|EEQ78261.1| [Ajellomyces dermatitidis SLH14081] gi|239606664|gb|EEQ83651.1| [Ajellomyces dermatitidis ER-3]
MANDKIPTVGTLDRPENVHTLLKGDRGDDCLECRLTGGAAFMGLAAYSYYSGNKQIDAQRAKILASKSPFGIQSRKFGIAATSLALAYLGIWRAFL

SEQ ID NO: 25820 - DNA, 951 bp, Muscodor strobelii
  misc_feature: SGI EST ID NO. CUFF.60992.1
  misc_feature: Variant of the nucleotide sequence at SEQ ID NO 25818
tcgcgatctccaaatccgcctgtgacaagcatctctaaattccatgtccaaaaaaagacgacacatcccttcgccatccaccacaactctctaatggcgaacgacaaaataccgaccgtcggcaccctcgaccggccagaaaatgtccatacgcttcttaaaggagaccggggggatgactgcttagagtgcaggctcacaggaggcgccgcattcatgggcctggcagcatacagctactactccggcaacaagcagatcgatgcccagcgcgcaaagatattagccagcaaatcgcccttcggtatacagagtcgcaagtttggaatcgccgccacgtcactggcactggcttacttggggatatggagggctttcctctgatgacgattttcccttgcacggctgatcgattaaacgaatacgagacacaaggacagcatcaagagatggacaaacgaaggatgggaaaataggaggctgaagtggctcgatgggataccgcttcactccgtcagcgtgcgcacatactggaagcgcactgcgccgacatgcgatacgatcggacgtattacaaaggacttgtttccgcatcgacaaagttgcggggtgcgagactgaggctgtgaaatccgtaccctcttgcaccctacaacgaaatgggtatatagccaatgactctaaagtgcgaggcttagagcttcacgaaacacccatctcatcacattacatgtaatatagaatgtattctaccgtgtggaattacgtgggctacgacgaaatgaaccaaacaaataccaacacttgtacaaacgctggcatgcgggacggctcggactggctgctggaattcgatggcctcgtgaagtttttgagcgtcttggaaacaactggacatattctaataaatgtgtaattcactgtcctacgtttcgtgataatctagtaaga

SEQ ID NO: 25821 - DNA, 402 bp, Muscodor strobelii
  misc_feature: SGI cDNA ID NO. 568816
  misc_feature: Encodes the peptide sequence at SEQ ID NO 25822
atgcgtttcaatattgctgttgtactcggtcttgtgtcattcggcttgtcctcaccattgctagctcctgaagctgaaatcatccgtggtccatacaaacgatctgaagatagcaccgaggcagttcgaggaggttacaagaggtcggaagacaatactgaaataatcaggggtccctacaagcgggccgaggacgagatcgagattattaggggaccgtacagacgagctgaagagagcgccgagatcgtccgtggtccttacaagcgatccaaggaaaataccgaggctatccgcggaggctacaagcgagcggagggtagcacggaagctgttcgtggtccttacaaagcaagatctgaggaggaaaccgagattattcgaggaccttacaaagcctga

SEQ ID NO: 25822 - protein, 133 aa, Muscodor strobelii
  misc_feature: SGI Peptide ID NO. 568816
  misc_feature (27)..(107): NCBI GI: 198412316 Blast Desc: : similar to kelch-like 12 (Drosophila), partial [Ciona intestinalis]
  misc_feature (32)..(120): NCBI GI: 71411655 Blast Desc: [Trypanosoma cruzi strain CL Brener] gi|70872194|gb|EAN86217.1| , conserved [Trypanosoma cruzi]
  misc_feature (28)..(117): NCBI GI: 198412316 Blast Desc: : similar to kelch-like 12 (Drosophila), partial [Ciona intestinalis]
  misc_feature (25)..(118): NCBI GI: 114587946 Blast Desc: [Pan troglodytes]
  misc_feature (25)..(129): NCBI GI: 156373802 Blast Desc: [Nematostella vectensis] gi|156216501|gb|EDO37436.1| [Nematostella vectensis]
  misc_feature (25)..(129): NCBI GI: 156373802 Blast Desc: [Nematostella vectensis] gi|156216501|gb|EDO37436.1| [Nematostella vectensis]
  misc_feature (31)..(115): NCBI GI: 225862529 Blast Desc: lpxtg-motif cell wall anchor domain protein [Bacillus cereus 03BB102] gi|225789969|gb|ACO30186.1| lpxtg-motif cell wall anchor domain protein [Bacillus cereus 03BB102]
  misc_feature (25)..(129): NCBI GI: 156373802 Blast Desc: [Nematostella vectensis] gi|156216501|gb|EDO37436.1| [Nematostella vectensis]
  misc_feature (25)..(133): NCBI GI: 114587946 Blast Desc: [Pan troglodytes]
  misc_feature (25)..(133): NCBI GI: 114587946 Blast Desc: [Pan troglodytes]
MRFNIAVVLGLVSFGLSSPLLAPEAEIIRGPYKRSEDSTEAVRGGYKRSEDNTEIIRGPYKRAEDEIEIIRGPYRRAEESAEIVRGPYKRSKENTEAIRGGYKRAEGSTEAVRGPYKARSEEETEIIRGPYKA

SEQ ID NO: 25823 - DNA, 2286 bp, Muscodor strobelii
  misc_feature: SGI cDNA ID NO. 568817
  misc_feature: Encodes the peptide sequence at SEQ ID NO 25824
atggccggacctgatagcaccacgtcctccatgacctcgacatcgcagactctcaccaacgtcccgtctctcagcttcttatcggccttctccgaccccaggaaaccaaacggtggaatggagatgctggcacttttcgaggccatcaaggccggcaatcgccatgatttcttgcggccttctgcttcgctgcccaatgcctctctccaattagcgaaagcaaccctggacgcctatgccggccaagtaagcgacgaacagcaccagcgtcagcgtgaagctagcaagaagaggaaacgcgctgagcagagccatagcgctgcaaacattctcaagatcaggaaattacatgtcgacggccttgagagtggccaggtttggcagcaagctaaaagaatcatcaccagcactttgcaggatgcagaagaaatattgcaagagttggaagaaaacgacgaggtccaggccaacggtgttaatgggaagccggaaacactcgatgagtcgctggatgactctgatcattcttctgatctcgataatgaaggatccattccctacgtcgaggatgattctgaagaggacgaggaagaggaagatgatgaggagacagacggggacggcgatatacttgaggacgccatggcgcaagacatgaatgacgaagtagaattcgacgatgcagagcaagatgatgaagaagaagatgatgaagaagaagaggaagaggacgatgagcccgagccattcgtcgcggatcccaacggcctcaatgatgggttcttctctatcgatgacttcaacaaacagacacaattcttcgaagatgccgatgcgcgcgccgatccagacatcgaccaaggtagtgaggatgaggaaatcgattggcatggcgacccattttctgtcaaagaacccacaattaagcctaagtcaaaaaagtcgaaagatgcggaagaagacttggatgaggatatgcactcgataccagaggaggaggaagactcagatgatgagggcggagcaacttttggcaacatggatttggatgcaccagaaggagacagcgagcttgaggacaacgaagacggggcagacgacgacgacgagttcaacgcgaacgatgtgttctacaaagacttctttgctcctccacggagaaaaggagccaaaccgagtaaatctcgcaaagtccaattctcgaatcccgcgcctgacgagcaggatgtggaacgcgccatggccgacgtacgccgtgatctcttcgaagacgagtccgaacgtgacgattctgaagacgcgttatctgatgtttccgcgggcgaccccagatcaagaaggtcagcttttgaaagaagacaggccaaattggccgaggaaattcgaaaactcgaagccgcaaatgtagcgaaaaaagactgggctctcatgggtgaggctagagccgtggaacgccctatgaattccctcttggaggaagatcttgacttcgaacacgccggaaagcctatccctgtcattacccctgacgtcagtgagagcattgaggaactcatcaagaggagaattctagccagagagttcgacgaagttagacgtagaagacccggcgttgacgaattctcgaacacacgccgcggacttctcaatgtggatgataaggctctggatgccaagtctaaacagagtctcgctgagatctacgaagaggagcatatcaagaacgccaacccggactcgtacgtcagcaaggcagaagagaagcaacgcaaagaagagaaagagatcgagcagatgtggaaagaggtcagctcgaagctcgatgccctcagcagttggcactacagacctaaaccagttgcccctacactcaccgttgtgtcggacgttgcaaccatcagcatggaagacgcacagcctacaacctcacaaggcgtcaatggtggcgacaacacactcgcgccgcaagaagtctacaaggctggcaaagacaccgcagagcaaggcgaggtcgttgcgaagagtggcttgccggttgctaaacaggagatgtctcgcgaagacaagacgagaagacgtcgtcgcgagaaagagagaatccgaaaggccggtggtacggatgccaagaggccaaagagtggtaaggcacagcagcgccaagacaccattggtgatctcaggaaaggaggtgtcaaggttattaataagaagggtgagattgtcgacattgatggtaataaaactaaggctgctagagctgcgtcgagtggtagctttaagttgtag

SEQ ID NO: 25824 - protein, 761 aa, Muscodor strobelii
  misc_feature: SGI Peptide ID NO. 568817
  misc_feature (82)..(744): Pfam Id: PF04006 Pfam Desc: Mpp10 protein
  misc_feature (413)..(744): Pfam Id: PF04006 Pfam Desc: Mpp10 protein
  misc_feature (42)..(761): NCBI GI: 46137035 Blast Desc: FG10033.1 [Gibberella zeae PH-1]
  misc_feature (42)..(761): NCBI GI: 256731647 Blast Desc: NECHADRAFT_93459 [Nectria haematococca mpVI 77-13-4]
  misc_feature (251)..(761): NCBI GI: 39971885 Blast Desc: MGG_07258 [Magnaporthe grisea 70-15] gi|145019759|gb|EDK03987.1| MGG_07258 [Magnaporthe grisea 70-15]
  misc_feature (250)..(761): NCBI GI: 171677915 Blast Desc: protein product [Podospora anserina] gi|170937026|emb|CAP61684.1| protein product [Podospora anserina]
  misc_feature (250)..(761): NCBI GI: 40882331 Blast Desc: related to U3 snoRNP protein [Neurospora crassa]
  misc_feature (250)..(761): NCBI GI: 164426642 Blast Desc: NCU03952 [Neurospora crassa OR74A] gi|157071419|gb|EAA28355.2| conserved [Neurospora crassa OR74A]
  misc_feature (37)..(685): NCBI GI: 154291290 Blast Desc: BC1G_15292 [Botryotinia fuckeliana B05.10] gi|150846984|gb|EDN22177.1| BC1G_15292 [Botryotinia fuckeliana B05.10]
  misc_feature (250)..(761): NCBI GI: 156059606 Blast Desc: SS1G_03815 [Sclerotinia sclerotiorum 1980] gi|154701602|gb|EDO01341.1| SS1G_03815 [Sclerotinia sclerotiorum 1980]
  misc_feature (370)..(761): NCBI GI: 116201553 Blast Desc: CHGG_08661 [Chaetomium globosum CBS 148.51] gi|88177179|gb|EAQ84647.1| CHGG_08661 [Chaetomium globosum CBS 148.51]
  misc_feature (51)..(761): NCBI GI: 169604302 Blast Desc: SNOG_05162 [Phaeosphaeria nodorum SN15] gi|111066433|gb|EAT87553.1| SNOG_05162 [Phaeosphaeria nodorum SN15]
MAGPDSTTSSMTSTSQTLTNVPSLSFLSAFSDPRKPNGGMEMLALFEAIKAGNRHDFLRPSASLPNASLQLAKATLDAYAGQVSDEQHQRQREASKKRKRAEQSHSAANILKIRKLHVDGLESGQVWQQAKRIITSTLQDAEEILQELEENDEVQANGVNGKPETLDESLDDSDHSSDLDNEGSIPYVEDDSEEDEEEEDDEETDGDGDILEDAMAQDMNDEVEFDDAEQDDEEEDDEEEEEEDDEPEPFVADPNGLNDGFFSIDDFNKQTQFFEDADARADPDIDQGSEDEEIDWHGDPFSVKEPTIKPKSKKSKDAEEDLDEDMHSIPEEEEDSDDEGGATFGNMDLDAPEGDSELEDNEDGADDDDEFNANDVFYKDFFAPPRRKGAKPSKSRKVQFSNPAPDEQDVERAMADVRRDLFEDESERDDSEDALSDVSAGDPRSRRSAFERRQAKLAEEIRKLEAANVAKKDWALMGEARAVERPMNSLLEEDLDFEHAGKPIPVITPDVSESIEELIKRRILAREFDEVRRRRPGVDEFSNTRRGLLNVDDKALDAKSKQSLAEIYEEEHIKNANPDSYVSKAEEKQRKEEKEIEQMWKEVSSKLDALSSWHYRPKPVAPTLTVVSDVATISMEDAQPTTSQGVNGGDNTLAPQEVYKAGKDTAEQGEVVAKSGLPVAKQEMSREDKTRRRRREKERIRKAGGTDAKRPKSGKAQQRQDTIGDLRKGGVKVINKKGEIVDIDGNKTKAARAASSGSFKL

SEQ ID NO: 25825 - DNA, 2503 bp, Muscodor strobelii
  misc_feature: SGI EST ID NO. CUFF.60934.0
  misc_feature: Variant of the nucleotide sequence at SEQ ID NO 25823
tttccatgaagctgtttgctatatactattatttgcctaacgccgcgtttctggtcagccccgggaccatcacgtccggaagtaccattgcatttccaccacatggaacatgccaatctagcaatggccggacctgatagcaccacgtcctccatgacctcgacatcgcagactctcaccaacgtcccgtctctcagcttcttatcggccttctccgaccccaggaaaccaaacggtggaatggagatgctggcacttttcgaggccatcaaggccggcaatcgccatgatttcttgcggccttctgcttcgctgcccaatgcctctctccaattagcgaaagcaaccctggacgcctatgccggccaagtaagcgacgaacagcaccagcgtcagcgtgaagctagcaagaagaggaaacgcgctgagcagagccatagcgctgcaaacattctcaagatcaggaaattacatgtcgacggccttgagagtggccaggtttggcagcaagctaaaagaatcatcaccagcactttgcaggatgcagaagaaatattgcaagagttggaagaaaacgacgaggtccaggccaacggtgttaatgggaagccggaaacactcgatgagtcgctggatgactctgatcattcttctgatctcgataatgaaggatccattccctacgtcgaggatgattctgaagaggacgaggaagaggaagatgatgaggagacagacggggacggcgatatacttgaggacgccatggcgcaagacatgaatgacgaagtagaattcgacgatgcagagcaagatgatgaagaagaagatgatgaagaagaagaggaagaggacgatgagcccgagccattcgtcgcggatcccaacggcctcaatgatgggttcttctctatcgatgacttcaacaaacagacacaattcttcgaagatgccgatgcgcgcgccgatccagacatcgaccaaggtagtgaggatgaggaaatcgattggcatggcgacccattttctgtcaaagaacccacaattaagcctaagtcaaaaaagtcgaaagatgcggaagaagacttggatgaggatatgcactcgataccagaggaggaggaagactcagatgatgagggcggagcaacttttggcaacatggatttggatgcaccagaaggagacagcgagcttgaggacaacgaagacggggcagacgacgacgacgagttcaacgcgaacgatgtgttctacaaagacttctttgctcctccacggagaaaaggagccaaaccgagtaaatctcgcaaagtccaattctcgaatcccgcgcctgacgagcaggatgtggaacgcgccatggccgacgtacgccgtgatctcttcgaagacgagtccgaacgtgacgattctgaagacgcgttatctgatgtttccgcgggcgaccccagatcaagaaggtcagcttttgaaagaagacaggccaaattggccgaggaaattcgaaaactcgaagccgcaaatgtagcgaaaaaagactgggctctcatgggtgaggctagagccgtggaacgccctatgaattccctcttggaggaagatcttgacttcgaacacgccggaaagcctatccctgtcattacccctgacgtcagtgagagcattgaggaactcatcaagaggagaattctagccagagagttcgacgaagttagacgtagaagacccggcgttgacgaattctcgaacacacgccgcggacttctcaatgtggatgataaggctctggatgccaagtctaaacagagtctcgctgagatctacgaagaggagcatatcaagaacgccaacccggactcgtacgtcagcaaggcagaagagaagcaacgcaaagaagagaaagagatcgagcagatgtggaaagaggtcagctcgaagctcgatgccctcagcagttggcactacagacctaaaccagttgcccctacactcaccgttgtgtcggacgttgcaaccatcagcatggaagacgcacagcctacaacctcacaaggcgtcaatggtggcgacaacacactcgcgccgcaagaagtctacaaggctggcaaagacaccgcagagcaaggcgaggtcgttgcgaagagtggcttgccggttgctaaacaggagatgtctcgcgaagacaagacgagaagacgtcgtcgcgagaaagagagaatccgaaaggccggtggtacggatgccaagaggccaaagagtggtaaggcacagcagcgccaagacaccattggtgatctcaggaaaggaggtgtcaaggttattaataagaagggtgagattgtcgacattgatggtaataaaactaaggctgctagagctgcgtcgagtggtagctttaagttgtagattgagtgttactgcatttgcatatattggggatcggatcatagcatttttatacataatttattgatgattgtgcacgtttccatctggcatt

SEQ ID NO: 25826 - DNA, 1593 bp, Muscodor strobelii
  misc_feature: SGI cDNA ID NO. 568818
  misc_feature: Encodes the peptide sequence at SEQ ID NO 25827
atgaacggcgttatcgaggcgctgcacatctacgatgagcataggcgcgccatcctctcgcacacctacacctcgcgcccgctgtccgcaactcacctcttacctctctatctcgagcatcccacgccccggccgaacctaatatatctgtccaacaccaatcctccgacgctggtcttcagcctcgaccatgcaaacctgctatacctggcgaccacctcatccgagatagaacctctccttgtcctcgaattcctgcatcgtgtcatcgacacacttgaagagttccttggggcccccgtcctggcccacaagatcgaagccaactacgatgtcgttgcccagctgcttaccgagatgtgcgatgccggcatcatcagcaccaccgagccgaatgccttgagggatgtcgtcgaagtcgaaggcttgctaggaaaactactagggagcatcaacctacctggcaaactgcctaccaactcggcctcatcttctctggtggctcagactgccccatctctaccatggagaagggcaaatgtccgtcacacctctaatgagctctatgccgatgtcgtagagactctatccgtcactttagcaccctcgggtcgtcccatcgctgcctttgcgaacgggactatcgcttttaccgccaaggtatctggcgtgcctgatctcgtgatgaatataacggcaccttcgggcaaacacaatctcagaagtgtcatggaactgcccgtattccatccctgcgtgagactgaatcgctggaaagagagcccaggcgagctcagcttcataccgcctgacggacgctttattctagctggctatgaagtcgatctgcttcccttttccaacggcaaagcgggcagcattagctccaacaacctcaaactgcctgtcggcgttgaggtcaagacaggtctcggctcaaccggctcggaattcgaggttcgcttgaccatcaacaaaatattcggtcccacgggcccttcatccgcatcttctgctaggggtggaagcgccggtggaagaggctttggcgggccgcacgcaggcacagccgcatctcccctattacaagacgtagttgtctcggtaccccttccatcagatgtgaggaacctctcagatgttcgaccgagcaggggagacgcgagttacagtcctggcgaccaggttctagagtggcacataccagccaaggatttggctgcaggcacatccttctttggactccgatgtacagttgtagggccattaacaggtgagacactggatgatgatccgagtggttttggatttggtcgggactacgaagagccataccagagctcgtcacccaaggtccagcccagaggttcagaagaggagcgtgacgctaagaaggtcgctcaaaataagattttgatgcccagttctgcgtctgtgagcttctcggtgaaagggtggctgcccagtggcatcaaaattgagagtattcaaattgatcccaggaagagtcgtggtatgggggaaggtatcaagccctataaaggtgttaaatacctcacgataagtaaagggggtgttgagatacggtgttga

SEQ ID NO: 25827 - protein, 530 aa, Muscodor strobelii
  misc_feature: SGI Peptide ID NO. 568818
  misc_feature (174)..(530): Pfam Id: PF00928 Pfam Desc: Adaptor complexes medium subunit family
  misc_feature (1)..(530): NCBI GI: 261351725 Blast Desc: conserved [Verticillium albo-atrum VaMs.102]
  misc_feature (1)..(530): NCBI GI: 116201511 Blast Desc: CHGG_08640 [Chaetomium globosum CBS 148.51] gi|88177158|gb|EAQ84626.1| CHGG_08640 [Chaetomium globosum CBS 148.51]
  misc_feature (1)..(484): NCBI GI: 256731728 Blast Desc: [Nectria haematococca mpVI 77-13-4]
  misc_feature (1)..(530): NCBI GI: 156043609 Blast Desc: SS1G_10808 [Sclerotinia sclerotiorum 1980] gi|154695195|gb|EDN94933.1| SS1G_10808 [Sclerotinia sclerotiorum 1980]
  misc_feature (1)..(530): NCBI GI: 171677909 Blast Desc: protein product [Podospora anserina] gi|170937023|emb|CAP61681.1| protein product [Podospora anserina]
  misc_feature (1)..(479): NCBI GI: 46136893 Blast Desc: FG09962.1 [Gibberella zeae PH-1]
  misc_feature (1)..(530): NCBI GI: 154316811 Blast Desc: BC1G_03823 [Botryotinia fuckeliana B05.10] gi|150845435|gb|EDN20628.1| BC1G_03823 [Botryotinia fuckeliana B05.10]
  misc_feature (2)..(530): NCBI GI: 39945956 Blast Desc: MGG_08098 [Magnaporthe grisea 70-15] gi|145019343|gb|EDK03571.1| MGG_08098 [Magnaporthe grisea 70-15]
  misc_feature (1)..(530): NCBI GI: 85086052 Blast Desc: NCU03998 [Neurospora crassa OR74A] gi|28918707|gb|EAA28377.1| conserved [Neurospora crassa OR74A]
  misc_feature (1)..(530): NCBI GI: 239606665 Blast Desc: AP-3 adaptor complex subunit mu [Ajellomyces dermatitidis ER-3]
MNGVIEALHIYDEHRRAILSHTYTSRPLSATHLLPLYLEHPTPRPNLIYLSNTNPPTLVFSLDHANLLYLATTSSEIEPLLVLEFLHRVIDTLEEFLGAPVLAHKIEANYDVVAQLLTEMCDAGIISTTEPNALRDVVEVEGLLGKLLGSINLPGKLPTNSASSSLVAQTAPSLPWRRANVRHTSNELYADVVETLSVTLAPSGRPIAAFANGTIAFTAKVSGVPDLVMNITAPSGKHNLRSVMELPVFHPCVRLNRWKESPGELSFIPPDGRFILAGYEVDLLPFSNGKAGSISSNNLKLPVGVEVKTGLGSTGSEFEVRLTINKIFGPTGPSSASSARGGSAGGRGFGGPHAGTAASPLLQDVVVSVPLPSDVRNLSDVRPSRGDASYSPGDQVLEWHIPAKDLAAGTSFFGLRCTVVGPLTGETLDDDPSGFGFGRDYEEPYQSSSPKVQPRGSEEERDAKKVAQNKILMPSSASVSFSVKGWLPSGIKIESIQIDPRKSRGMGEGIKPYKGVKYLTISKGGVEIRC

SEQ ID NO: 25828 - DNA, 2132 bp, Muscodor strobelii
  misc_feature: SGI EST ID NO. CUFF.61007.1
  misc_feature: Variant of the nucleotide sequence at SEQ ID NO 25826
gggaaagggtcctaagccacgagaccgataacgataaccttaatcgcgagctgccccgccgacgctgacgtcttaggtagcacccgcctctaattgtggcgtgtgtcttaacagtctctcccgccctgaagctagcccccccatcgcggccgatgatgatgaccccctgccccgcggtcgctacctggcaaagctcccgccgctgccaccatcgccgtcaccgtcaccgtctcaagccgtcaagcacactcggcccagccatgcgcttcgcaagcccacgatgaacggcgttatcgaggcgctgcacatctacgatgagcataggcgcgccatcctctcgcacacctacacctcgcgcccgctgtccgcaactcacctcttacctctctatctcgagcatcccacgccccggccgaacctaatatatctgtccaacaccaatcctccgacgctggtcttcagcctcgaccatgcaaacctgctatacctggcgaccacctcatccgagatagaacctctccttgtcctcgaattcctgcatcgtgtcatcgacacacttgaagagttccttggggcccccgtcctggcccacaagatcgaagccaactacgatgtcgttgcccagctgcttaccgagatgtgcgatgccggcatcatcagcaccaccgagccgaatgccttgagggatgtcgtcgaagtcgaaggcttgctaggaaaactactagggagcatcaacctacctggcaaactgcctaccaactcggcctcatcttctctggtggctcagactgccccatctctaccatggagaagggcaaatgtccgtcacacctctaatgagctctatgccgatgtcgtagagactctatccgtcactttagcaccctcgggtcgtcccatcgctgcctttgcgaacgggactatcgcttttaccgccaaggtatctggcgtgcctgatctcgtgatgaatataacggcaccttcgggcaaacacaatctcagaagtgtcatggaactgcccgtattccatccctgcgtgagactgaatcgctggaaagagagcccaggcgagctcagcttcataccgcctgacggacgctttattctagctggctatgaagtcgatctgcttcccttttccaacggcaaagcgggcagcattagctccaacaacctcaaactgcctgtcggcgttgaggtcaagacaggtctcggctcaaccggctcggaattcgaggttcgcttgaccatcaacaaaatattcggtcccacgggcccttcatccgcatcttctgctaggggtggaagcgccggtggaagaggctttggcgggccgcacgcaggcacagccgcatctcccctattacaagacgtagttgtctcggtaccccttccatcagatgtgaggaacctctcagatgttcgaccgagcaggggagacgcgagttacagtcctggcgaccaggttctagagtggcacataccagccaaggatttggctgcaggcacatccttctttggactccgatgtacagttgtagggccattaacaggtgagacactggatgatgatccgagtggttttggatttggtcgggactacgaagagccataccagagctcgtcacccaaggtccagcccagaggttcagaagaggagcgtgacgctaagaaggtcgctcaaaataagattttgatgcccagttctgcgtctgtgagcttctcggtgaaagggtggctgcccagtggcatcaaaattgagagtattcaaattgatcccaggaagagtcgtggtatgggggaaggtatcaagccctataaaggtgttaaatacctcacgataagtaaagggggtgttgagatacggtgttgaatgacaaaaataaaacaattatagacacttaaatcagttttctctctgcattacatctcatcttcactcgactagtagcatgccgccagttgtggaagtctcgtgtcactcccaatccctaatcccttcctgcctcccttttcacactcaacctcacactcaaccccaggagttcctaccttcctcatagaatctgcacacatatcaaaacaacccagaaaaagaatgataaaaaaattaagtaagacacaaaaagaat

SEQ ID NO: 25829 - DNA, 531 bp, Muscodor strobelii
  misc_feature: SGI cDNA ID NO. 568819
  misc_feature: Encodes the peptide sequence at SEQ ID NO 25830
atggacactgccgagccctcgtttgcactgttcaggtggcttccggcagagctgcgcttcatgatatgggagttctgccttcccatacgtgtagttgacatttacgacgcactggatgaggagatggaccgagatgaccgcaaagaacgcggttttccatttcgcaactatctcggcgtaacgattgtgccgcccttcggtgtgtataaatcaatcttgttccactattctgttcctcgctttctgaaagtatctatgctaatatatatcgtaacctcaaaagtatgtcgggaagcacgtgaagttgcactgcacgattcgggtttacaagagctggggattcacgatactgaagtatggtacgacaagaggctagacgtgatcagtatagacccgaccaacccatcattcttcacaagacatatgcgcgaacgcagtttagccgttttgccatcacgcctcttcgatgtcaccattcctatcagtatcgcgagtcgcctcatggagcacgacgccgcgtataagcggtag

SEQ ID NO: 25830 - protein, 176 aa, Muscodor strobelii
  misc_feature: SGI Peptide ID NO. 568819
MDTAEPSFALFRWLPAELRFMIWEFCLPIRVVDIYDALDEEMDRDDRKERGFPFRNYLGVTIVPPFGVYKSILFHYSVPRFLKVSMLIYIVTSKVCREAREVALHDSGLQELGIHDTEVWYDKRLDVISIDPTNPSFFTRHMRERSLAVLPSRLFDVTIPISIASRLMEHDAAYKR

SEQ ID NO: 25831 - DNA, 459 bp, Muscodor strobelii
  misc_feature: SGI cDNA ID NO. 568820
  misc_feature: Encodes the peptide sequence at SEQ ID NO 25832
atggacactgccgagccctcgtttgcactgttcaggtggcttccggcagagctgcgcttcatgatatgggagttctgccttcccatacgtgtagttgacatttacgacgcactggatgaggagatggaccgagatgaccgcaaagaacgcggttttccatttcgcaactatctcggcgtaacgattgtgccgcccttcggtacctcaaaagtatgtcgggaagcacgtgaagttgcactgcacgattcgggtttacaagagctggggattcacgatactgaagtatggtacgacaagaggctagacgtgatcagtatagacccgaccaacccatcattcttcacaagacatatgcgcgaacgcagtttagccgttttgccatcacgcctcttcgatgtcaccattcctatcagtatcgcgagtcgcctcatggagcacgacgccgcgtataagcggtag

SEQ ID NO: 25832 - protein, 152 aa, Muscodor strobelii
  misc_feature: SGI Peptide ID NO. 568820
  misc_feature (8)..(108): NCBI GI: 85119524 Blast Desc: NCU02521 [Neurospora crassa OR74A] gi|28927464|gb|EAA36416.1| [Neurospora crassa OR74A]
  misc_feature (1)..(107): NCBI GI: 116203945 Blast Desc: [Chaetomium globosum CBS 148.51] gi|88175984|gb|EAQ83452.1| [Chaetomium globosum CBS 148.51]
  misc_feature (8)..(108): NCBI GI: 171696306 Blast Desc: protein product [Podospora anserina] gi|170948395|emb|CAP60559.1| protein product [Podospora anserina]
  misc_feature (7)..(110): NCBI GI: 116192329 Blast Desc: CHGG_05882 [Chaetomium globosum CBS 148.51] gi|88181795|gb|EAQ89263.1| CHGG_05882 [Chaetomium globosum CBS 148.51]
MDTAEPSFALFRWLPAELRFMIWEFCLPIRVVDIYDALDEEMDRDDRKERGFPFRNYLGVTIVPPFGTSKVCREAREVALHDSGLQELGIHDTEVWYDKRLDVISIDPTNPSFFTRHMRERSLAVLPSRLFDVTIPISIASRLMEHDAAYKR

SEQ ID NO: 25833 - DNA, 987 bp, Muscodor strobelii
  misc_feature: SGI cDNA ID NO. 568821
  misc_feature: Encodes the peptide sequence at SEQ ID NO 25834
atggccgaacaagttccctcgttgaagctcgcctctggctataaaatgccagttgttggtttcggcatctggaaagtccctcgtgagacctgtgctgatcaggtctacaatggtatcaagctcggatacagacacatcgacggagcctgggactatacgaatagcgccgaggctggtgagggtgttcgccgtgccattcaggagggcatcgttaagcgtgaggacatgttcatcacctccaagctatggaacaactaccacaagcgcgagcacgccctcgagatggccaagctcgaaaacgaggcctggggtctcgactatctcgacctgttcctcattcacttccccgtctcactcgagttcattcccttcgaggagattcgctggccatgcttctggtccgataaggagcgcaccaaagtcactcctctggccaaggtccccgtctccgagacctgggccgctctcgagtctttagttcagtcatctgagaacccgtccggcttcgtcaagagcatcggtgtctccaacttccacactcagctcatctacgacctgctatcctacgccaagattcctccctcggtccttcaaatcgagcaccacccctacctcacgcaacccgacttgatcaagatggcgcaggagaacaacatcgcagtgacaggatactcgaccttcggtcccctcagcttccttgagatggaccacgccggcgccaagaacacccaacccctgttcgaggtggatgccgtcaagaagatcgccgcgaagcacggcaagtcccctggccaagttctgttgcgctggtgcacccagcgcgacgtcatcgtcattcccaagtccaacagtgtcgaccgtctcaagcagaacctcgagtgctgcacctttgacctcagccaggaggaaattgatgagatctccacgctcaacaagggtctgcggttcaacaatcccaatggtatgggcatccgtatcttcacgtaa

SEQ ID NO: 25834 - protein, 328 aa, Muscodor strobelii
  misc_feature: SGI Peptide ID NO. 568821
  misc_feature (10)..(312): Pfam Id: PF00248 Pfam Desc: Aldo/keto reductase family
  misc_feature (7)..(327): NCBI GI: 39951523 Blast Desc: MGG_01404 [Magnaporthe grisea 70-15] gi|76057160|emb|CAI67592.1| L-arabinose reductase [Magnaporthe grisea] gi|145020764|gb|EDK04893.1| MGG_01404 [Magnaporthe grisea
  misc_feature (7)..(319): NCBI GI: 261358009 Blast Desc: NAD(P)H-dependent D-xylose reductase [Verticillium albo-atrum VaMs.102]
  misc_feature (16)..(328): NCBI GI: 261352266 Blast Desc: NAD(P)H-dependent D-xylose reductase [Verticillium albo-atrum VaMs.102]
  misc_feature (7)..(328): NCBI GI: 256732591 Blast Desc: NECHADRAFT_38020 [Nectria haematococca mpVI 77-13-4]
  misc_feature (7)..(328): NCBI GI: 212538997 Blast Desc: aldo-keto reductase, [Penicillium marneffei ATCC 18224] gi|210069396|gb|EEA23487.1| aldo-keto reductase, [Penicillium marneffei ATCC 18224]
  misc_feature (7)..(319): NCBI GI: 50550135 Blast Desc: YALI0D07634p [Yarrowia lipolytica] gi|49648408|emb|CAG80728.1| YALI0D07634p [Yarrowia lipolytica]
  misc_feature (5)..(326): NCBI GI: 238915528 Blast Desc: xylose reductase [Talaromyces emersonii]
  misc_feature (6)..(326): NCBI GI: 115388593 Blast Desc: NAD(P)H-dependent D-xylose reductase [Aspergillus terreus NIH2624] gi|114195886|gb|EAU37586.1| NAD(P)H-dependent D-xylose reductase [Aspergillus terreus NIH2624]
  misc_feature (6)..(326): NCBI GI: 67516283 Blast Desc: AN0423.2 [Aspergillus nidulans FGSC A4] gi|40747366|gb|EAA66522.1| AN0423.2 [Aspergillus nidulans FGSC A4] gi|259489333|tpe|CBF89516.1| TPA: NAD(P)H-dependent D-xylose
  misc_feature (4)..(319): NCBI GI: 119189735 Blast Desc: CIMG_04915 [Coccidioides immitis RS]
  misc_feature (2)..(319): SWISSPROT Homolog: EC 1.1.1.175 D-xylose 1-dehydrogenase
MAEQVPSLKLASGYKMPVVGFGIWKVPRETCADQVYNGIKLGYRHIDGAWDYTNSAEAGEGVRRAIQEGIVKREDMFITSKLWNNYHKREHALEMAKLENEAWGLDYLDLFLIHFPVSLEFIPFEEIRWPCFWSDKERTKVTPLAKVPVSETWAALESLVQSSENPSGFVKSIGVSNFHTQLIYDLLSYAKIPPSVLQIEHHPYLTQPDLIKMAQENNIAVTGYSTFGPLSFLEMDHAGAKNTQPLFEVDAVKKIAAKHGKSPGQVLLRWCTQRDVIVIPKSNSVDRLKQNLECCTFDLSQEEIDEISTLNKGLRFNNPNGMGIRIFT

SEQ ID NO: 25835 - DNA, 1758 bp, Muscodor strobelii
  misc_feature: SGI EST ID NO. CUFF.60955.0
  misc_feature: Variant of the nucleotide sequence at SEQ ID NO 25833
tttcagccgtatttgggagatccggcggatccctacggctccgtacccctggcgcgcgtgatttatggcccgtcaagatgtacatcaggggccggtctttggtccattgccgctttcatcggctccggttcaaacgctgaattaaaacacaacgtacagtcttaaaatactaatcatgattatttgcatgagggcttccggattatactattatcttaagatgctgccttgctagtcggtcaaaggagaaggcgcaggcggcatgtttcgcacacctgtagaaattgaatagctctacggcccacagcaacccgacgactccccacaactctccataatgacggtcttagtatggagttatagcgccgtccaacagagctagaccaagaaattgatgtcaccgtcgagcaggtggaacgcgctacgcgaatcacccctcaacccctcgtctgtcaccccacgagcgagattaaaagaaaaaaaagtatgcgcgtatacctttggaagaccactcgtcctttgacactttaatacttcaccttaactgcttgaatactcagaatattgtctagtcgttctgctgctcgcatcttcagtaacaatggccgaacaagttccctcgttgaagctcgcctctggctataaaatgccagttgttggtttcggcatctggaaagtccctcgtgagacctgtgctgatcaggtctacaatggtatcaagctcggatacagacacatcgacggagcctgggactatacgaatagcgccgaggctggtgagggtgttcgccgtgccattcaggagggcatcgttaagcgtgaggacatgttcatcacctccaagctatggaacaactaccacaagcgcgagcacgccctcgagatggccaagctcgaaaacgaggcctggggtctcgactatctcgacctgttcctcattcacttccccgtctcactcgagttcattcccttcgaggagattcgctggccatgcttctggtccgataaggagcgcaccaaagtcactcctctggccaaggtccccgtctccgagacctgggccgctctcgagtctttagttcagtcatctgagaacccgtccggcttcgtcaagagcatcggtgtctccaacttccacactcagctcatctacgacctgctatcctacgccaagattcctccctcggtccttcaaatcgagcaccacccctacctcacgcaacccgacttgatcaagatggcgcaggagaacaacatcgcagtgacaggatactcgaccttcggtcccctcagcttccttgagatggaccacgccggcgccaagaacacccaacccctgttcgaggtggatgccgtcaagaagatcgccgcgaagcacggcaagtcccctggccaagttctgttgcgctggtgcacccagcgcgacgtcatcgtcattcccaagtccaacagtgtcgaccgtctcaagcagaacctcgagtgctgcacctttgacctcagccaggaggaaattgatgagatctccacgctcaacaagggtctgcggttcaacaatcccaatggtatgggcatccgtatcttcacgtaaaatgatagaagttgggtgtaggatgagtgagtcaagtgcagtatcccttgcgatagggattgagacatgccagtacgtataataagtaattgctgaagagaagagtagaaagatatatatagatgagacaaatagacagactactgactcgagaataattaatcctgggg

SEQ ID NO: 25836 - DNA, 3915 bp, Muscodor strobelii
  misc_feature: SGI cDNA ID NO. 568822
  misc_feature: Elevated expression when VOC is produced
  misc_feature: Encodes the peptide sequence at SEQ ID NO 25837
atggtcggcgcacctagagatcaccgtgattacacggtcggatgggtttgcgcattgccgaaagagcagactgctgctattgctatgctggatgagcgacatccaaagttgccgaagccacagaatgatgacaatgcgtacacccttggatccatcggtggccacaatatcgtcataacatgccttcctcagggcaagattgccgcggtgtccgctgcaacagtagctactcatctaatacacgcttttccagctgtcaaattcgccttgatggttggtattggcgccggcatcccccccgaggttagactaggcgacgtcgtcgttggtgtcccaacgcttcattaccctggagtggtgcaatgggatctaggaaaggtagagcaagcagggaagcttactaggactggagcattgaacaaccctcctcgcttgctcctcggtgcaataacggagctccagtccgaatgggatctaggagaaccaaagatgcaaagctatctagacgatatggagaagaaatatcccaagttgagatgttctaaaccgcgtcgtgacctacttttcaaggcggcttatgatcacaacacggtttcagattcccctgagattgagcaaacagaaattgatgacgaggagagctgtaaatattgcgacatggctcagaccgttcagcggcggcctcgagagttgcgagtacactatggtctgatcgcgtctgggaataaggttattaaggatgccaagtttcgagacgatctttgtcaaaaccttgggacaggcgttctttgctgtgaaatggaggcagctgggttgatggaaagctttccttgcctcgttgtacgtgggatctgtgactatgcggattcacacaaaaacgatgactggcaagagcatgccgcagctgtggcggcagcgtatacaaaagagcttctaggatgcgtccaacctagtgacatccacacagagaagaccgcgaaggatatcatgggtcgtcacatttctgatgctctagagtgcataaaggaagacacaactcataccaaatctcgtctcctggaaataaagcggctgaagatcttagattggttgatatcgccagatcatgactatggaccacaacagagtgatactttcgagaggcgacagcccgggactggacaatggctccttgaatctagacgctatcagcaatggattcaaacaccaaacagaaccttgttctgtccaggaatgcctggggcgggaaagacaattctgacgtcagtggttgtgaacgaccttgaaaatcgattccgcgatgaggacgtttcgattgcatatgtctactgcaattacgatagacaaaatgagcaaacagttccaaatctgctgtccagtctgctgaaacagttggcttcaaatcagttggcttcaaatcagtcgcccctgccgcgttgtataactgaactctatgagcgtcacaacctaaaacgaactcgaccatctctagatgaaaccttccttgctctcaaatcgattgttgctcagagttccagagtcatcattatcattgatgcactcgatgaatgtcaagcttctattcgcacaacccttttggccaaaattattgggctacaaaacaacgtgagtttttttgccacttctagggacctgccagagattacgcaccacttcaaagatagccttgtgatcccaattcgcgctacagagagcgatatccgcaagtacttggaaaatcgagaatttccagactgtatctccggacagcctggattgagacttaaagtgatagaccgcatatcaacagccgtcgatggaatgtttctacttgctcagctccatttcgattcgattcaatacaaagacacgtgcaacgctatagaggcagcattacaagatttagcaaccaagccaagtggctatgatgatgcttacaagtctatcatacgacggatacagaatcaaccccgggatcaagcagagcgcgccaggcaagtgctgttgtggatagtgtactcgaaatggcggcttacgacagccgaactattacacgcactcgctattaaaatcgacggatctgagtttgaccgaggcaacattccagccattaatagtgtcctgacgcacgccgtttccgactgccaggtctgtgctggattagtcaccattgacacgacgaacagcattgtccgcttagttcactatacaacgcaagattatctccaacaccatcaatggctttctgacgcacaacgaactctcgcagctgcctgtgtcacatacctatcatatcaaacgttcgcagttggctggcgcaatcatggtgatgatcttaatcgacgaagggtgctcagagaactatgtgaatcgtatcccctctacgactatgccgcacgcaattggggttgtcatgtcgataaaacggctgactatcaagggatctgttcttttcttcgaagaccttcccaggtcgaagcagcaggtcaagttctcatcgcttacgacaaaccgacgctcgactggttgtattgtaaggatcgatctgatcgaaagaacatcactggattgcacttagcagcatactttgggcttcagattcctctgaaacatttgctttctacttatgatgcaaatgtgagggattgcaccggtcggacgccgctttcttgggcagcggaaaacatgcaagagagcgtgatccggcaacttctccgcatcgagggtgtccaagctaattcgagagatggacagcacgagacaccgctaatctatgccgcaggcaacggtagcgaaggtgtagtacggctactactcggcgttaaaggcgtcgagactgattcaaaatccagatacggctggacgccgctgtcagttgcggcgcataaaggtcatgcggcagtagtgcacctactcctcagtaccaagcgcgtcgaagtcaatcagacagataatcaatatggtcggacgccgctttcactcgcggcaggcaacggtcatgaaactgtggtacgcctgctcctccgcaccaagcgcgtcgaagtcaacaaaacagataatctatatggtcggacgccgctttcatttgcggcaggcaacggtcatgaagctgtagtacgcctgctcgtccataccaagggtgtagaactcaaccaaaaagataatgccggccaaaccccactttcgttggcggcacacagtgatcatgaagctgtagcaaaactgctgattggtatgaatggtatcgaactcgacaccacagatagagatcgacgaacgccgcttctgaatgccacatggaatgagaataaaactttagtacgactgcttcttgctaaaggggctgatcctaatgcgagagactatcaaggtcggacaccattatcctacgcagcagaacacggtcaagaagctgtagtcaagatgattcttgccattcaaggagctgacccggatttggaagatcgtcaaggccggacgccagcatactacgcggtaaggtccggatacgagaatatagttcaattacttgccgaaagggaaattggcaataagtcatcattatcagcatgcgcatcgacagatagccagacgaaagagcaccaggcattccaacacatcgactgggaaaccatatttcagtttgacctggtgtcatcgatcgtgcaggaggaagagaggagtctggaaaggggtctatgggaacttcctagctctatcagtccgcttgaccgttccaagcatattcgcggcaccggatctttgcttacggtcccgtttgaggcaggatattatgcgaactatagggaagactaccatcgctatttttactctaactttctagattctggtttcccgactctcagaatagcattcaatgctggagatcaaaggctctttgtatgtatcaagtag

SEQ ID NO: 25837 - protein, 1304 aa, Muscodor strobelii
  misc_feature: SGI Peptide ID NO. 568822
  misc_feature (1123)..(1156): Pfam Id: PF00023 Pfam Desc: Ankyrin repeat
  misc_feature (1022)..(1055): Pfam Id: PF00023 Pfam Desc: Ankyrin repeat
  misc_feature (952)..(985): Pfam Id: PF00023 Pfam Desc: Ankyrin repeat
  misc_feature (987)..(1020): Pfam Id: PF00023 Pfam Desc: Ankyrin repeat
  misc_feature (1090)..(1122): Pfam Id: PF00023 Pfam Desc: Ankyrin repeat
  misc_feature (1056)..(1089): Pfam Id: PF00023 Pfam Desc: Ankyrin repeat
  misc_feature (918)..(951): Pfam Id: PF00023 Pfam Desc: Ankyrin repeat
  misc_feature (884)..(917): Pfam Id: PF00023 Pfam Desc: Ankyrin repeat
  misc_feature (6)..(1177): NCBI GI: 46139821 Blast Desc: FG11425.1 [Gibberella zeae PH-1]
  misc_feature (8)..(1155): NCBI GI: 115390338 Blast Desc: conserved [Aspergillus terreus NIH2624] gi|114195070|gb|EAU36770.1| conserved [Aspergillus terreus NIH2624]
  misc_feature (8)..(1143): NCBI GI: 212541358 Blast Desc: serine/threonine-protein kinase ripk4, [Penicillium marneffei ATCC 18224] gi|210068133|gb|EEA22225.1| serine/threonine-protein kinase ripk4, [Penicillium marneffei
  misc_feature (1)..(1188): NCBI GI: 225557065 Blast Desc: ankyrin repeat protein [Ajellomyces capsulatus G186AR]
  misc_feature (5)..(1118): NCBI GI: 171693393 Blast Desc: protein product [Podospora anserina] gi|170946645|emb|CAP73448.1| protein product [Podospora anserina]
  misc_feature (6)..(1183): NCBI GI: 238491078 Blast Desc: ankyrin repeat-containing protein, [Aspergillus flavus NRRL3357] gi|220697189|gb|EED53530.1| ankyrin repeat-containing protein, [Aspergillus flavus NRRL3357]
  misc_feature (6)..(1086): NCBI GI: 169773129 Blast Desc: [Aspergillus oryzae RIB40] gi|83768894|dbj|BAE59031.1| protein product [Aspergillus oryzae]
  misc_feature (4)..(1177): NCBI GI: 169782465 Blast Desc: [Aspergillus oryzae RIB40] gi|83774438|dbj|BAE64562.1| protein product [Aspergillus oryzae]
  misc_feature (7)..(1186): NCBI GI: 212528994 Blast Desc: Pfs, NACHT and Ankyrin domain protein [Penicillium marneffei ATCC 18224] gi|210074052|gb|EEA28139.1| Pfs, NACHT and Ankyrin domain protein [Penicillium marneffei ATCC 18224]
  misc_feature (10)..(1178): NCBI GI: 116194308 Blast Desc: CHGG_03752 [Chaetomium globosum CBS 148.51] gi|88179665|gb|EAQ87133.1| CHGG_03752 [Chaetomium globosum CBS 148.51]
  misc_feature: Useful for introducing or modulating the production of volatile compounds
MVGAPRDHRDYTVGWVCALPKEQTAAIAMLDERHPKLPKPQNDDNAYTLGSIGGHNIVITCLPQGKIAAVSAATVATHLIHAFPAVKFALMVGIGAGIPPEVRLGDVVVGVPTLHYPGVVQWDLGKVEQAGKLTRTGALNNPPRLLLGAITELQSEWDLGEPKMQSYLDDMEKKYPKLRCSKPRRDLLFKAAYDHNTVSDSPEIEQTEIDDEESCKYCDMAQTVQRRPRELRVHYGLIASGNKVIKDAKFRDDLCQNLGTGVLCCEMEAAGLMESFPCLVVRGICDYADSHKNDDWQEHAAAVAAAYTKELLGCVQPSDIHTEKTAKDIMGRHISDALECIKEDTTHTKSRLLEIKRLKILDWLISPDHDYGPQQSDTFERRQPGTGQWLLESRRYQQWIQTPNRTLFCPGMPGAGKTILTSVVVNDLENRFRDEDVSIAYVYCNYDRQNEQTVPNLLSSLLKQLASNQLASNQSPLPRCITELYERHNLKRTRPSLDETFLALKSIVAQSSRVIIIIDALDECQASIRTTLLAKIIGLQNNVSFFATSRDLPEITHHFKDSLVIPIRATESDIRKYLENREFPDCISGQPGLRLKVIDRISTAVDGMFLLAQLHFDSIQYKDTCNAIEAALQDLATKPSGYDDAYKSIIRRIQNQPRDQAERARQVLLWIVYSKWRLTTAELLHALAIKIDGSEFDRGNIPAINSVLTHAVSDCQVCAGLVTIDTTNSIVRLVHYTTQDYLQHHQWLSDAQRTLAAACVTYLSYQTFAVGWRNHGDDLNRRRVLRELCESYPLYDYAARNWGCHVDKTADYQGICSFLRRPSQVEAAGQVLIAYDKPTLDWLYCKDRSDRKNITGLHLAAYFGLQIPLKHLLSTYDANVRDCTGRTPLSWAAENMQESVIRQLLRIEGVQANSRDGQHETPLIYAAGNGSEGVVRLLLGVKGVETDSKSRYGWTPLSVAAHKGHAAVVHLLLSTKRVEVNQTDNQYGRTPLSLAAGNGHETVVRLLLRTKRVEVNKTDNLYGRTPLSFAAGNGHEAVVRLLVHTKGVELNQKDNAGQTPLSLAAHSDHEAVAKLLIGMNGIELDTTDRDRRTPLLNATWNENKTLVRLLLAKGADPNARDYQGRTPLSYAAEHGQEAVVKMILAIQGADPDLEDRQGRTPAYYAVRSGYENIVQLLAEREIGNKSSLSACASTDSQTKEHQAFQHIDWETIFQFDLVSSIVQEEERSLERGLWELPSSISPLDRSKHIRGTGSLLTVPFEAGYYANYREDYHRYFYSNFLDSGFPTLRIAFNAGDQRLFVCIK

SEQ ID NO: 25838 - DNA, 722 bp, Muscodor strobelii
  misc_feature: SGI EST ID NO. CUFF.60965.0
  misc_feature: Variant of the nucleotide sequence at SEQ ID NO 25836
gaaacagttggcttcaaatcagttggcttcaaatcagtcgcccctgccgcgttgtataactgaactctatgagcgtcacaacctaaaacgaactcgaccatctctagatgaaaccttccttgctctcaaatcgattgttgctcagagttccagagtcatcattatcattgatgcactcgatgaatgtcaagcttctattcgcacaacccttttggccaaaattattgggctacaaaacaacgtgagtttttttgccacttctagggacctgccagagattacgcaccacttcaaagatagccttgtgatcccaattcgcgctacagagagcgatatccgcaagtacttggaaaatcgagaatttccagactgtatctccggacagcctggattgagacttaaagtgatagaccgcatatcaacagccgtcgatggaatgtttctacttgctcagctccatttcgattcgattcaatacaaagacacgtgcaacgctatagaggcagcattacaagatttagcaaccaagccaagtggctatgatgatgcttacaagtctatcatacgacggatacagaatcaaccccgggatcaagcagagcgcgccaggcaagtgctgttgtggatagtgtactcgaaatggcggcttacgacagccgaactattacacgcactcgctattaaaatcgacggatctgagtttgaccgaggcaacattccag

SEQ ID NO: 25839 - DNA, 1287 bp, Muscodor strobelii
  misc_feature: SGI cDNA ID NO. 568823
  misc_feature: Encodes the peptide sequence at SEQ ID NO 25840
atgagtctgcgagtgtcctgccagcctcggcccgcgaaagctgccgctgtcctttcgagcctcagctcgcctgtccctcctcctaccacccgaccaaccctacacaccgcaatcacaacgacgaaacccctcggtcgccggaaatatgtctcagagactacgagtaaaacgcggccgcgaacggccatcttcttcccaggccaaggtgtccagaaagtaggcatgctaagccaatggctcgaagcctttccacgaagcgcaagcgagatcctcgacgagatagacacacacatgggctacaagctctcatccgtaatacaagacgggccctcccgcgtgctcaccgcaacaccaaacgcccaacccgccataatggccacgtcaatcctcatcctccgtatcctcgagcgcgaattcggtttcaaagtcgaagaccgcgtcgatgtctccctcggccactctttaggggagtttgccgccctcgtagcgggtggtgtcttacagttcgaggacgcgctacacatggtgcgccgccgcgcagaggtcatggccgaagctacgcaaaacgctaaagataagtatggcggtgaatacggtatggtggctgtcgttacggaacccgagtacctcgccgcgcttgtcgaagcaatcgatgagtttgttggatacagatctgcgggcacgagatcggacagtgacgagaggaggccgattgatcaggttcttattgcgaatatcaattcaaaaaatcagatcgtgctgtctggcagcttatcgaagatcaaggagttaattgctcatgtgagacagttcttgggtcacgaccctagggctgtgaggttgaatagcgattcgccgtttcatagccccattatgtggcctgctgtggccgtgatgagggagttgctagggaggaagagcatggtaaaaggcagagaggatatggatgtggtgacatttccgggtacactccagtgtgtcagtaatgtcagcgcgagaccgtttgagagcgctgccgaggttagggatttactggctagacagtgccttgagacggtgaggtggtgggacagtatcaagtatcttgatcagactcagaaagtgaggaggtggatcggcatcggacctggaaaagttggcaggaatctcgtgggaaaggaggttggcatgagaggtgtggatactgttaagggtggtggtgtatgggctatcactgatccgtttgagatcgaggatgtgctcaagggcctcgaaaagaccgagtcgcttgttgaggatgatgattga

SEQ ID NO: 25840 - protein, 428 aa, Muscodor strobelii
  misc_feature: SGI Peptide ID NO. 568823
  misc_feature (151)..(188): Pfam Id: PF00698 Pfam Desc: Acyl transferase domain
  misc_feature (54)..(427): NCBI GI: 5880913 Blast Desc: AF161721_1 malonyl CoA-acyl carrier protein transacylase [Glomerella cingulata]
  misc_feature (53)..(428): NCBI GI: 46136893 Blast Desc: FG09962.1 [Gibberella zeae PH-1]
  misc_feature (47)..(423): NCBI GI: 154295419 Blast Desc: BC1G_13188 [Botryotinia fuckeliana B05.10] gi|150844056|gb|EDN19249.1| BC1G_13188 [Botryotinia fuckeliana B05.10]
  misc_feature (49)..(427): NCBI GI: 156048939 Blast Desc: SS1G_08176 [Sclerotinia sclerotiorum 1980] gi|154692575|gb|EDN92313.1| SS1G_08176 [Sclerotinia sclerotiorum 1980]
  misc_feature (6)..(428): NCBI GI: 256731728 Blast Desc: [Nectria haematococca mpVI 77-13-4]
  misc_feature (56)..(417): NCBI GI: 171677941 Blast Desc: protein product [Podospora anserina] gi|170937039|emb|CAP61698.1| protein product [Podospora anserina]
  misc_feature (47)..(427): NCBI GI: 261351724 Blast Desc: malonyl CoA-acyl carrier protein transacylase [Verticillium albo-atrum VaMs.102]
  misc_feature (57)..(428): NCBI GI: 85086101 Blast Desc: NCU04010 [Neurospora crassa OR74A] gi|28918719|gb|EAA28389.1| NCU04010 [Neurospora crassa OR74A] gi|29150124|emb|CAD79684.1| related to [acyl-carrier-protein]
  misc_feature (48)..(428): NCBI GI: 39971955 Blast Desc: MGG_07293 [Magnaporthe grisea 70-15] gi|145019798|gb|EDK04026.1| MGG_07293 [Magnaporthe grisea 70-15]
  misc_feature (51)..(367): NCBI GI: 116201529 Blast Desc: CHGG_08649 [Chaetomium globosum CBS 148.51] gi|88177167|gb|EAQ84635.1| CHGG_08649 [Chaetomium globosum CBS 148.51]
  misc_feature (60)..(419): SWISSPROT Homolog: EC 2.3.1.39 [Acyl-carrier-protein] S-malonyltransferase
  misc_feature: Useful for fungicidal and/or biocontrol applications
MSLRVSCQPRPAKAAAVLSSLSSPVPPPTTRPTLHTAITTTKPLGRRKYVSETTSKTRPRTAIFFPGQGVQKVGMLSQWLEAFPRSASEILDEIDTHMGYKLSSVIQDGPSRVLTATPNAQPAIMATSILILRILEREFGFKVEDRVDVSLGHSLGEFAALVAGGVLQFEDALHMVRRRAEVMAEATQNAKDKYGGEYGMVAVVTEPEYLAALVEAIDEFVGYRSAGTRSDSDERRPIDQVLIANINSKNQIVLSGSLSKIKELIAHVRQFLGHDPRAVRLNSDSPFHSPIMWPAVAVMRELLGRKSMVKGREDMDVVTFPGTLQCVSNVSARPFESAAEVRDLLARQCLETVRWWDSIKYLDQTQKVRRWIGIGPGKVGRNLVGKEVGMRGVDTVKGGGVWAITDPFEIEDVLKGLEKTESLVEDDD

SEQ ID NO: 25841 - DNA, 1702 bp, Muscodor strobelii
  misc_feature: SGI EST ID NO. CUFF.60976.0
  misc_feature: Variant of the nucleotide sequence at SEQ ID NO 25839
gggaaatgccgggacctgagtaatgcggaggaagctggtttccacccgtccgtgaagcccgctatttgtctttcgacttgtcctgtgaacctctctataccctacctttaggtttaattccacctacgcagtctctttgacatcgcggttcgttcgatgattggcgcgtctgcccgccggcagctcatatctcgcgcatggcggcaatgagtctgcgagtgtcctgccagcctcggcccgcgaaagctgccgctgtcctttcgagcctcagctcgcctgtccctcctcctaccacccgaccaaccctacacaccgcaatcacaacgacgaaacccctcggtcgccggaaatatgtctcagagactacgagtaaaacgcggccgcgaacggccatcttcttcccaggccaaggtgtccagaaagtaggcatgctaagccaatggctcgaagcctttccacgaagcgcaagcgagatcctcgacgagatagacacacacatgggctacaagctctcatccgtaatacaagacgggccctcccgcgtgctcaccgcaacaccaaacgcccaacccgccataatggccacgtcaatcctcatcctccgtatcctcgagcgcgaattcggtttcaaagtcgaagaccgcgtcgatgtctccctcggccactctttaggggagtttgccgccctcgtagcgggtggtgtcttacagttcgaggacgcgctacacatggtgcgccgccgcgcagaggtcatggccgaagctacgcaaaacgctaaagataagtatggcggtgaatacggtatggtggctgtcgttacggaacccgagtacctcgccgcgcttgtcgaagcaatcgatgagtttgttggatacagatctgcgggcacgagatcggacagtgacgagaggaggccgattgatcaggttcttattgcgaatatcaattcaaaaaatcagatcgtgctgtctggcagcttatcgaagatcaaggagttaattgctcatgtgagacagttcttgggtcacgaccctagggctgtgaggttgaatagcgattcgccgtttcatagccccattatgtggcctgctgtggccgtgatgagggagttgctagggaggaagagcatggtaaaaggcagagaggatatggatgtggtgacatttccgggtacactccagtgtgtcagtaatgtcagcgcgagaccgtttgagagcgctgccgaggttagggatttactggctagacagtgccttgagacggtgaggtggtgggacagtatcaagtatcttgatcagactcagaaagtgaggaggtggatcggcatcggacctggaaaagttggcaggaatctcgtgggaaaggaggttggcatgagaggtgtggatactgttaagggtggtggtgtatgggctatcactgatccgtttgagatcgaggatgtgctcaagggcctcgaaaagaccgagtcgcttgttgaggatgatgattgagtcactgtactcaatggcttggtgcgaacctatgaagggggttatgggaccatttgtaaatataccttagttcagtgcattgggatatgttggcgttggtggatgtttaataccgtataggtacctacctaggtatgcattgttgtgcgctgcatctcctacaggctatagacactgtatcgggacatgtctcttttacggaacgggga

SEQ ID NO: 25842 - DNA, 603 bp, Muscodor strobelii
  misc_feature: SGI cDNA ID NO. 568824
  misc_feature: Encodes the peptide sequence at SEQ ID NO 25843
atggcgaacaccgtcccctccatagcctgcttaggcgtaataagccgtaacaacaaccccctgcacatctcaatcttcccctcctacgacagcccatcaaacagctacacgcccatccgtacccctctacaattctccctcctcctctccggcaccctcgacatcttcgagacccggtccaaagccgcgtcgtcgccccaagcgcccggctccgcctccatgctcctatcgggtgactacgggctccttcacgcgatcgacgagcgcctagcagcctacggcttcgagaccaacactggagtaaaattcgtcgccgtagtcgacatgcggggtcgcgggcccaaccttaccaccacagcaggaggaagtttgggtggtggaatgggagggaaaggaggcacgggtgtgggacttagggataatgagttacgaccggtgtttaaggctatgcagacggcgtatgtgcatttgctacagaatccgttttatgaccctgaggaggggggagtgggcaaggggaagaggatcactagtaagaggtttggtgaggatatgagacggattggggaggtttgggcacctggggttacggcttgcttgtag

SEQ ID NO: 25843 - protein, 200 aa, Muscodor strobelii
  misc_feature: SGI Peptide ID NO. 568824
  misc_feature (13)..(191): Pfam Id: PF04628 Pfam Desc: Sedlin, N-terminal conserved region
  misc_feature (1)..(198): NCBI GI: 171677943 Blast Desc: protein product [Podospora anserina] gi|170937040|emb|CAP61699.1| protein product [Podospora anserina]
  misc_feature (1)..(198): NCBI GI: 46136895 Blast Desc: FG09963.1 [Gibberella zeae PH-1]
  misc_feature (1)..(198): NCBI GI: 256731729 Blast Desc: [Nectria haematococca mpVI 77-13-4]
  misc_feature (1)..(172): NCBI GI: 145612329 Blast Desc: MGG_07056 [Magnaporthe grisea 70-15] gi|145019516|gb|EDK03744.1| MGG_07056 [Magnaporthe grisea 70-15]
  misc_feature (6)..(198): NCBI GI: 169604650 Blast Desc: SNOG_05339 [Phaeosphaeria nodorum SN15] gi|111066610|gb|EAT87730.1| SNOG_05339 [Phaeosphaeria nodorum SN15]
  misc_feature (4)..(174): NCBI GI: 154295417 Blast Desc: BC1G_13187 [Botryotinia fuckeliana B05.10] gi|150844055|gb|EDN19248.1| BC1G_13187 [Botryotinia fuckeliana B05.10]
  misc_feature (6)..(197): NCBI GI: 238838818 Blast Desc: conserved [Microsporum canis CBS 113480]
  misc_feature (1)..(139): NCBI GI: 261351720 Blast Desc: conserved [Verticillium albo-atrum VaMs.102]
  misc_feature (4)..(192): NCBI GI: 156048937 Blast Desc: SS1G_08175 [Sclerotinia sclerotiorum 1980] gi|154692574|gb|EDN92312.1| SS1G_08175 [Sclerotinia sclerotiorum 1980]
  misc_feature (6)..(196): NCBI GI: 258568466 Blast Desc: conserved [Uncinocarpus reesii 1704] gi|237906423|gb|EEP80824.1| conserved [Uncinocarpus reesii 1704]
MANTVPSIACLGVISRNNNPLHISIFPSYDSPSNSYTPIRTPLQFSLLLSGTLDIFETRSKAASSPQAPGSASMLLSGDYGLLHAIDERLAAYGFETNTGVKFVAVVDMRGRGPNLTTTAGGSLGGGMGGKGGTGVGLRDNELRPVFKAMQTAYVHLLQNPFYDPEEGGVGKGKRITSKRFGEDMRRIGEVWAPGVTACL

SEQ ID NO: 25844 - DNA, 988 bp, Muscodor strobelii
  misc_feature: SGI EST ID NO. CUFF.60979.0
  misc_feature: Variant of the nucleotide sequence at SEQ ID NO 25842
tatcaacatcgacatttcaacatttccatgaactcccattctccagaatctcgacacaacatcgctatcgcgtatcacacataatggcgaacaccgtcccctccatagcctgcttaggcgtaataagccgtaacaacaaccccctgcacatctcaatcttcccctcctacgacagcccatcaaacagctacacgcccatccgtacccctctacaattctccctcctcctctccggcaccctcgacatcttcgagacccggtccaaagccgcgtcgtcgccccaagcgcccggctccgcctccatgctcctatcgggtgactacgggctccttcacgcgatcgacgagcgcctagcagcctacggcttcgagaccaacactggagtaaaattcgtcgccgtagtcgacatgcggggtcgcgggcccaaccttaccaccacagcaggaggaagtttgggtggtggaatgggagggaaaggaggcacgggtgtgggacttagggataatgagttacgaccggtgtttaaggctatgcagacggcgtatgtgcatttgctacagaatccgttttatgaccctgaggaggggggagtgggcaaggggaagaggatcactagtaagaggtttggtgaggatatgagacggattggggaggtttgggcacctggggttacggcttgcttgtaggggagtgagctggacggtggggttggtgtgaagggtgatggcgaggaggagaaggaatgggggtttgggttgtcgcgatttcttaggagagcggagaaggatggggtttgatctgttggtattgcctttttgaggttgagcgtggtgtttggcgttcgagatgttagatatgaggatttgtcttgttttgttattgaagagtttggactgcatcaccaggtgttgttgcggttgataccactacgctagattacaggatgcaaagactctgacttcaaaatatgaaaactgtggcatctgtg

SEQ ID NO: 25845 - DNA, 1998 bp, Muscodor strobelii
  misc_feature: SGI cDNA ID NO. 568825
  misc_feature: Encodes the peptide sequence at SEQ ID NO 25846
atgtcaaaaacgaggcacatacaaggcttaacaagacgatctatgagttccgtcactatcacagatccgcttgtcaaatatcaatctcttatagccacaggactctgctgccctgacccagctcagcatcggctagcaatccatcttcaaaaagtctaccaccgtttaaaagactacaccccttcagtcgaataccgcacaagacttaaagctatcaccaacgcactcgaagaatcaaagaaagaagataattctgacatcttggctgtgaaaacccatccattacgccgaaaccccctatttgcgcacttttttgctcaagcgcagagtagagatactctcgcactgacgagggttctcacaagccatgaggaagcaatacatatcaactcgcctcaagggctcttcttgtctggcgaagtcggaacgggtaaatccatgttgttagatcttctagctgagggcttgcccacaggtcgaaagcgaagatggcatttcaatacgtttatgctctacacattgtcccagctagagcgacataggaagatgaatgcagatttagaggacggtgatcaattatattcgctattatggatggcgaaagacatgattgagaagtcgcctattttgttcttagacgaatttcagctaccggatagagcagcgagtaagattctgagtaatctgttcacggcattttttcaactcggaggtgttctcgttgcttcttcgaatcggatgccagaggaactggagaaggcaacggggtttcaatacgttgcacctagtactgggggcttgatcgggcgtgctttaggcttgggtaaaacgagaagcaaaggtgatatgtttggatcctcgagcgacttcgcatcgtttttggaagtgctcaaagcgagatgtgagttctggcaaatggagggagggagggattggaggagaagggactcggaaacctcacctgctggccctctcacaaatctcacatctgatactctgtctcatggacagataagcccgccatcggagctactggacctaggtgctacaaaggaagaccctgagaatgcctccacgcgacctcagaaatacctatttctcggagatagccatgcttcattgtggcgcgagatcttacaagattatcgtgctacacaggaagacccctggaaacccgcttcgatgactgtctacggtcgtagtatcatcattcccagacaaaaggatggcgcagtctactgggaattcaatgacctcgtatcatccttcggaccagcagattatatcacaatggccagcacataccacaccttcataatcgacaacatccccatcctaactatacaaaagaagaacgaagcaagaagactcatcacgctcttagacgctttatacgaagctcgatgcaaattaatcgttcgagcagaagtaggaccagacagcctcttcttccccgaagcccagacccttgtttctccctctcctggtccacgccacaccactatctcttctcagaccaacgcaaccgaggaacaaaaagacgacgcaatccactccgaaacaatagcagaagcctaccaggacaccacatctccattccgccctaacatatcatcctacacagactcacaaaacacttcatacgacccagactctgatttcgccgccacgacgaaagtggacttcagcaataccggggcattcacaggtgaagacgagcgcttcgcatacaaacgagctgcaagtagactgtgggaactctgcggcgagcgatggcatgcgaggcagggcgattggtggcaacctcttcccgttgaagctcggcactgggagacaaatcctgtggcgaaaccgcagccttggacattgcctgaagatagggggaagaaagagggagacgtgaaaatgggtcaggctgttgagcttgaggaaccggctgggttgcagaggttgagggttgagtatttgaggagtgtggataggaaggatagacgttga

SEQ ID NO: 25846 - protein, 665 aa, Muscodor strobelii
  misc_feature: SGI Peptide ID NO. 568825
  misc_feature (59)..(508): Pfam Id: PF03969 Pfam Desc: AFG1-like ATPase
  misc_feature (393)..(482): Pfam Id: PF03969 Pfam Desc: AFG1-like ATPase
  misc_feature (132)..(251): Pfam Id: PF03969 Pfam Desc: AFG1-like ATPase
  misc_feature (10)..(661): NCBI GI: 85086093 Blast Desc: NCU04008 [Neurospora crassa OR74A] gi|28918717|gb|EAA28387.1| conserved [Neurospora crassa OR74A] gi|29150122|emb|CAD79682.1| related to ATPase family protein
  misc_feature (12)..(662): NCBI GI: 46136897 Blast Desc: FG09964.1 [Gibberella zeae PH-1]
  misc_feature (13)..(661): NCBI GI: 171677897 Blast Desc: protein product [Podospora anserina] gi|170937017|emb|CAP61675.1| protein product [Podospora anserina]
  misc_feature (12)..(662): NCBI GI: 256732109 Blast Desc: NECHADRAFT_93587 [Nectria haematococca mpVI 77-13-4]
  misc_feature (14)..(657): NCBI GI: 39971475 Blast Desc: MGG_07053 [Magnaporthe grisea 70-15] gi|145019513|gb|EDK03741.1| MGG_07053 [Magnaporthe grisea 70-15]
  misc_feature (16)..(659): NCBI GI: 154291288 Blast Desc: BC1G_15291 [Botryotinia fuckeliana B05.10] gi|150846983|gb|EDN22176.1| BC1G_15291 [Botryotinia fuckeliana B05.10]
  misc_feature (16)..(569): NCBI GI: 156059608 Blast Desc: SS1G_03816 [Sclerotinia sclerotiorum 1980] gi|154701603|gb|EDO01342.1| SS1G_03816 [Sclerotinia sclerotiorum 1980]
  misc_feature (14)..(638): NCBI GI: 169604648 Blast Desc: SNOG_05338 [Phaeosphaeria nodorum SN15] gi|111066609|gb|EAT87729.1| SNOG_05338 [Phaeosphaeria nodorum SN15]
  misc_feature (14)..(611): NCBI GI: 189196620 Blast Desc: mitochondrial ATPase (Afg1) [Pyrenophora tritici-repentis Pt-1C-BFP] gi|187980527|gb|EDU47153.1| mitochondrial ATPase (Afg1) [Pyrenophora tritici-repentis
  misc_feature (247)..(661): NCBI GI: 116201525 Blast Desc: CHGG_08647 [Chaetomium globosum CBS 148.51] gi|88177165|gb|EAQ84633.1| CHGG_08647 [Chaetomium globosum CBS 148.51]
MSKTRHIQGLTRRSMSSVTITDPLVKYQSLIATGLCCPDPAQHRLAIHLQKVYHRLKDYTPSVEYRTRLKAITNALEESKKEDNSDILAVKTHPLRRNPLFAHFFAQAQSRDTLALTRVLTSHEEAIHINSPQGLFLSGEVGTGKSMLLDLLAEGLPTGRKRRWHFNTFMLYTLSQLERHRKMNADLEDGDQLYSLLWMAKDMIEKSPILFLDEFQLPDRAASKILSNLFTAFFQLGGVLVASSNRMPEELEKATGFQYVAPSTGGLIGRALGLGKTRSKGDMFGSSSDFASFLEVLKARCEFWQMEGGRDWRRRDSETSPAGPLTNLTSDTLSHGQISPPSELLDLGATKEDPENASTRPQKYLFLGDSHASLWREILQDYRATQEDPWKPASMTVYGRSIIIPRQKDGAVYWEFNDLVSSFGPADYITMASTYHTFIIDNIPILTIQKKNEARRLITLLDALYEARCKLIVRAEVGPDSLFFPEAQTLVSPSPGPRHTTISSQTNATEEQKDDAIHSETIAEAYQDTTSPFRPNISSYTDSQNTSYDPDSDFAATTKVDFSNTGAFTGEDERFAYKRAASRLWELCGERWHARQGDWWQPLPVEARHWETNPVAKPQPWTLPEDRGKKEGDVKMGQAVELEEPAGLQRLRVEYLRSVDRKDRR

SEQ ID NO: 25847 - DNA, 2428 bp, Muscodor strobelii
  misc_feature: SGI EST ID NO. CUFF.60982.0
  misc_feature: Variant of the nucleotide sequence at SEQ ID NO 25845
cacagatccgcttgtcaaatatcaatctcttatagccacaggactctgctgccctgacccagctcagcatcggctagcaatccatcttcaaaaagtctaccaccgtttaaaagactacaccccttcagtcgaataccgcacaagacttaaagctatcaccaacgcactcgaagaatcaaagaaagaagataattctgacatcttggctgtgaaaacccatccattacgccgaaaccccctatttgcgcacttttttgctcaagcgcagagtagagatactctcgcactgacgagggttctcacaagccatgaggaagcaatacatatcaactcgcctcaagggctcttcttgtctggcgaagtcggaacgggtaaatccatgttgttagatcttctagctgagggcttgcccacaggtcgaaagcgaagatggcatttcaatacgtttatgctctacacattgtcccagctagagcgacataggaagatgaatgcagatttagaggacggtgatcaattatattcgctattatggatggcgaaagacatgattgagaagtcgcctattttgttcttagacgaatttcagctaccggatagagcagcgagtaagattctgagtaatctgttcacggcattttttcaactcggaggtgttctcgttgcttcttcgaatcggatgccagaggaactggagaaggcaacggggtttcaatacgttgcacctagtactgggggcttgatcgggcgtgctttaggcttgggtaaaacgagaagcaaaggtgatatgtttggatcctcgagcgacttcgcatcgtttttggaagtgctcaaagcgagatgtgagttctggcaaatggagggagggagggattggaggagaagggactcggaaacctcacctgctggccctctcacaaatctcacatctgatactctgtctcatggacagataagcccgccatcggagctactggacctaggtgctacaaaggaagaccctgagaatgcctccacgcgacctcagaaatacctatttctcggagatagccatgcttcattgtggcgcgagatcttacaagattatcgtgctacacaggaagacccctggaaacccgcttcgatgactgtctacggtcgtagtatcatcattcccagacaaaaggatggcgcagtctactgggaattcaatgacctcgtatcatccttcggaccagcagattatatcacaatggccagcacataccacaccttcataatcgacaacatccccatcctaactatacaaaagaagaacgaagcaagaagactcatcacgctcttagacgctttatacgaagctcgatgcaaattaatcgttcgagcagaagtaggaccagacagcctcttcttccccgaagcccagacccttgtttctccctctcctggtccacgccacaccactatctcttctcagaccaacgcaaccgaggaacaaaaagacgacgcaatccactccgaaacaatagcagaagcctaccaggacaccacatctccattccgccctaacatatcatcctacacagactcacaaaacacttcatacgacccagactctgatttcgccgccacgacgaaagtggacttcagcaataccggggcattcacaggtgaagacgagcgcttcgcatacaaacgagctgcaagtagactgtgggaactctgcggcgagcgatggcatgcgaggcagggcgattggtggcaacctcttcccgttgaagctcggcactgggagacaaatcctgtggcgaaaccgcagccttggacattgcctgaagatagggggaagaaagagggagacgtgaaaatgggtcaggctgttgagcttgaggaaccggctgggttgcagaggttgagggttgagtatttgaggagtgtggataggaaggatagacgttgataagggaggagatagaagactctcttcatgagaaatcactcgaagcgatagccacagacagagcgagcacattccctcttatacctctgcaaagaaaagaaaaggaagaaaagtcatatgaaaaaaatgaacctaaaaaaaatcccccttgaagacagtacctacatacactatactgcctatacccacaaaccccgtagcccactgcaattaaccaccgttaccgatcgcatcgcaccaaactcagagagaatggcgaactaaagtagactcgaaagtcagactaaagcggcttgccttatttggtacagacgtggttggcagctctggggaaaaccagagtagcgcaactagcaatgatggggatcgaacccctagcctagaccacatggaaagtgatcaggaccgttgcaccaccggagtggatttgattattgggagtgtaattggtaatggtagctatatgctgcaaaggtggcggggctttgc

SEQ ID NO: 25848 - DNA, 4137 bp, Muscodor strobelii
  misc_feature: SGI cDNA ID NO. 568826
  misc_feature: Reduced expression when VOC is produced
  misc_feature: Encodes the peptide sequence at SEQ ID NO 25849
atgttcgccccgtcccaggcgaacggcaaggagaatgccgctgcgaccccgatgaccacccgtggccgcaggcgacagcgtcccttgagctccgacaactcgctccccgcgcccaagtccaagcgactgcgatctgaacggccccagctcaacgacgaaacctttgtggatcccatcaacacgcgcgagacctacgaggtcaagtcggcacagttctcgaccccagatgccaagcaagatggccttgagcagcccctcgagcagcccgtggcggccaggcaagagctcagcgtgcgctctaagaagtcgaggaatggcgacagactgaccaagggcgatggtagcacactcctggctatcaacgcggctttcgatgtcagaaagctgcccgcgctgccggaacgaataaaacaggatgccaccagtcgccagcatggttggctcgatagcgcgacgggctgtgcgctcactctcacccacacacatgccgtcgtatggccctacagcgcaacggcgaccctacccgagtccttcaccttcacgctaccctatccctcgaaacattccaccgaccctctacccctcggcgcccttgtggctccgtctgcctcgtcggccgagccgggcctggttgtcgtgatgcccagcagtggcaagatcacctactgggaatccatatcaagtgccactactcttgatttcatgcgccagcagcgcaccggcgtcgaaggcttgatatccggcatgttctcaggcgagaccgccatccagatcgtcaatgcagaagccgctgccggctttgtgttggcattcagcagtgggcgcgtagcatacctcagcttgcgagacggtcatgggcggccccaggtctctgtgcagttcttgcgcacgacccttggcccttcgagcactggtctgctcggcagcgtgcgccatgccttgagccgcgcagcacttcagggcgacatcgcagctgtgcgggctgaaagatcatctcagcaaggcgaatctactgtagtggccatcaccacaaagggtcgcatcaactcctggcggatacatcgtggaggtcaccatgaccttcttactgagctagatgctcgaggcaccttggtcgaagctgtgcaaaatgccgataggactagtggcaactacgctctcgagtccttcaagatcatcgatttctgccacgtgcccaagggtttgcctgccaagtatactgacaagactcagctgcaccacgtccgagccagcgaagatcagcagcacgtgctcttattgacctctttcgacgacaagcaaacatgccgatatgttctggtcgaagtcatgatccctgtcagttcgtcaccagaaccgtccatcaatgtcggcatgattcgaccaatatcagcattctctaaacctcaggatcctcatgctctcgtgggccctcgactgtatcttccgaagcctgccgtcattgccttcctcgtcttcgatcacgctgccgtcgttgcttccattgcccaaccgcccgactcacccgactcccagatcatgcaagataaccacctcctgcctaccgcattcgaagatgtcattgacatccgccacgacccgacttttgagattgtgggatccgggttcgaagagcctcatatccaaaccggagacgacgagatgcgaccttcgcgcattaagaccaagaaccctaccgctgtgctcctcgtccgcggtgtcggtactctccgcatcgccaccactgactacgagaaatttatgagcgacaagcctccggtagtcaatgccaagatcaagctagagcagggtgtattctttggtatcaaggacgacaaccccctgatgtttgatatccagcataatattcggttcagtgagaaaagctacggagaagctgctctagagctgagcgaggaaattttgacttcgtctgggcaacatcttgctcaattggctgccagactggatgcgaacatgaaggaccgcgtgcgatatctggataagatcatgatccaaattaagagtttgggcattaccctagaccgtgctacaaaatggcagcttttgtggaacgccgaaaagatgcacgtagctggtgctctgtggcgcaaacacgaagagtttttgcacatgcgcccagatgattcgaaaaggagcgtcattgcagaaatcgtccaattcatcagaaaggaggaaaaatcgaaaccggacctcgcgagaggagaaacagacgaactccgccattggttcattcatgacatccatcgcttagatttattcatcgcgtggggctacgaagtcatcaaacaaaattctttcgccgaacgtgacgcggtttctatcagtcgctacatcttcgaaacttctgatatctacaatatcgccatacgggacgctttcgcgttccgagaaacgcacctagagctctacgggctgaaaggcgagaagctagaccatggaattttagaagcaaactacgccggtctacccacgccatggaccgcaagtcggtttattgccaacaacgtgaaaagacaggttgagttggcatccgaatggatcaagcaagaggtagaggcaaccgacgagaccatcatctcaatggtagagaaaaccagggatatcctccccgatttaactgaagtctacctctgggtgcttcaagaattggctcggtcgaatcttgaaagcgaggatccaaagcgtgtcgccgaaggtcagaagtacgagaatctgtaccaggaagaccgccacacgaaagttgtcctgttgtcccaatctggaaattgggaggccgccatcagacttgcagagaatcaccgatcacttccagccttgggcgaagtactcatctgcgagatcgactcactaacgactgagctcgagcttgccaacgaccagcagcaacgagaagccgttgaatccaggatcgccgccaaggaaaccaaagtcaaagagtgcttcgcgacctacggcgaggcattcgccctcccattttacgaatacctctttaccacattcggcgttgacgctctcctccagtatggtcttgagaaacggttcaaaacaatgtatcttcgaaccaagcctgagttagcaaaagtttcttggatcaatgacatcgttggtgaggaagacatcgaccatgctgctaatacactcctcgacttggggttgactcgcgagcaacaagtatggagtaagaagattgagcttagtctaggcaagctggcccggatggccgaatcctctcgcccttcaacgaaagcatcgatgagcttacaggaagcgaatattagtaatactgctgcagatgcgcagattgatgctattgacagagaactgacgattattgagattcaaaatgagttttacgagactcagattcggccgatcataagcgtagccctagacgagtctacagaactgagtctagcccaagaaaccttcgctttgaagcatcccaagaagtacaaaatactgtcgcagatcttcgacgatgcactgaagcgtctactggatcacgaagctctcgagcccatgacactgattgatatcttgactttggccgtattaccggagaacacaaaagatgatattgctgatcagttctaccttgcctgtcacgttgccagcaatggcctacaaggcgatgaccgtatccaggctgaacggctgatctggagacgatgtttcttgcgcgaagactggacagcgatcaacaatacctcgctaaaggcagataagcagacactggatgtcctcgctcagactgatctcttccaattctattgcactctgtacagaagtcaacaaggcaatgatatcacatctcatagagttttaccatcggaagctctgggcgtctacacggatatgatggatagacgatttgagcgtatggataaagggtttcgcgagaagtacctggaagccatgcgatgggaagactccaaccttcgcaagcacattgagaagcataggcttgacgagtgggcccaagaaacccgcaaacttgccgagcaatctgttgatcaatcattcgatattgccaccgaagagcaatccgcggctgcacctctgccagaaaaggtgcccaggttgatgcgcaatgggaagaacggtgtgcactag

SEQ ID NO: 25849 - protein, 1378 aa, Muscodor strobelii
  misc_feature: SGI Peptide ID NO. 568826
  misc_feature (119)..(589): Pfam Id: PF08801 Pfam Desc: Nup133 N terminal like
  misc_feature (1)..(1378): NCBI GI: 261351723 Blast Desc: conserved [Verticillium albo-atrum VaMs.102]
  misc_feature (32)..(1350): NCBI GI: 116201523 Blast Desc: CHGG_08646 [Chaetomium globosum CBS 148.51] gi|88177164|gb|EAQ84632.1| CHGG_08646 [Chaetomium globosum CBS 148.51]
  misc_feature (1)..(1362): NCBI GI: 256731730 Blast Desc: [Nectria haematococca mpVI 77-13-4]
  misc_feature (1)..(1378): NCBI GI: 145612099 Blast Desc: MGG_08092 [Magnaporthe grisea 70-15] gi|145019334|gb|EDK03562.1| MGG_08092 [Magnaporthe grisea 70-15]
  misc_feature (1)..(1357): NCBI GI: 46136899 Blast Desc: FG09965.1 [Gibberella zeae PH-1]
  misc_feature (1)..(1345): NCBI GI: 29150121 Blast Desc: conserved [Neurospora crassa]
  misc_feature (1)..(1345): NCBI GI: 85086089 Blast Desc: NCU04007 [Neurospora crassa OR74A] gi|28918716|gb|EAA28386.1| [Neurospora crassa OR74A]
  misc_feature (1)..(1349): NCBI GI: 171677899 Blast Desc: protein product [Podospora anserina] gi|170937018|emb|CAP61676.1| protein product [Podospora anserina]
  misc_feature (1)..(1312): NCBI GI: 156059610 Blast Desc: SS1G_03817 [Sclerotinia sclerotiorum 1980] gi|154701604|gb|EDO01343.1| SS1G_03817 [Sclerotinia sclerotiorum 1980]
  misc_feature (1)..(897): NCBI GI: 154291286 Blast Desc: BC1G_15290 [Botryotinia fuckeliana B05.10] gi|150846982|gb|EDN22175.1| BC1G_15290 [Botryotinia fuckeliana B05.10]
  misc_feature: Useful for introducing or modulating the production of volatile compounds
MFAPSQANGKENAAATPMTTRGRRRQRPLSSDNSLPAPKSKRLRSERPQLNDETFVDPINTRETYEVKSAQFSTPDAKQDGLEQPLEQPVAARQELSVRSKKSRNGDRLTKGDGSTLLAINAAFDVRKLPALPERIKQDATSRQHGWLDSATGCALTLTHTHAVVWPYSATATLPESFTFTLPYPSKHSTDPLPLGALVAPSASSAEPGLVVVMPSSGKITYWESISSATTLDFMRQQRTGVEGLISGMFSGETAIQIVNAEAAAGFVLAFSSGRVAYLSLRDGHGRPQVSVQFLRTTLGPSSTGLLGSVRHALSRAALQGDIAAVRAERSSQQGESTVVAITTKGRINSWRIHRGGHHDLLTELDARGTLVEAVQNADRTSGNYALESFKIIDFCHVPKGLPAKYTDKTQLHHVRASEDQQHVLLLTSFDDKQTCRYVLVEVMIPVSSSPEPSINVGMIRPISAFSKPQDPHALVGPRLYLPKPAVIAFLVFDHAAVVASIAQPPDSPDSQIMQDNHLLPTAFEDVIDIRHDPTFEIVGSGFEEPHIQTGDDEMRPSRIKTKNPTAVLLVRGVGTLRIATTDYEKFMSDKPPVVNAKIKLEQGVFFGIKDDNPLMFDIQHNIRFSEKSYGEAALELSEEILTSSGQHLAQLAARLDANMKDRVRYLDKIMIQIKSLGITLDRATKWQLLWNAEKMHVAGALWRKHEEFLHMRPDDSKRSVIAEIVQFIRKEEKSKPDLARGETDELRHWFIHDIHRLDLFIAWGYEVIKQNSFAERDAVSISRYIFETSDIYNIAIRDAFAFRETHLELYGLKGEKLDHGILEANYAGLPTPWTASRFIANNVKRQVELASEWIKQEVEATDETIISMVEKTRDILPDLTEVYLWVLQELARSNLESEDPKRVAEGQKYENLYQEDRHTKVVLLSQSGNWEAAIRLAENHRSLPALGEVLICEIDSLTTELELANDQQQREAVESRIAAKETKVKECFATYGEAFALPFYEYLFTTFGVDALLQYGLEKRFKTMYLRTKPELAKVSWINDIVGEEDIDHAANTLLDLGLTREQQVWSKKIELSLGKLARMAESSRPSTKASMSLQEANISNTAADAQIDAIDRELTIIEIQNEFYETQIRPIISVALDESTELSLAQETFALKHPKKYKILSQIFDDALKRLLDHEALEPMTLIDILTLAVLPENTKDDIADQFYLACHVASNGLQGDDRIQAERLIWRRCFLREDWTAINNTSLKADKQTLDVLAQTDLFQFYCTLYRSQQGNDITSHRVLPSEALGVYTDMMDRRFERMDKGFREKYLEAMRWEDSNLRKHIEKHRLDEWAQETRKLAEQSVDQSFDIATEEQSAAAPLPEKVPRLMRNGKNGVH

SEQ ID NO: 25850 - DNA, 5083 bp, Muscodor strobelii
  misc_feature: SGI EST ID NO. CUFF.61132.0
  misc_feature: Variant of the nucleotide sequence at SEQ ID NO 25848
tttgcagtgtgtttgtgtacatggtctgcagggagttggaggtgtgagtcgcccgtggtgtattttttctctccggatggagttctgcacatctcgacccaatcaagcgcagccacagctgtgaatggcctcgtcattttccccttccttcctagtgaattgctgtgttgttcattctgctgcatcgcatccctaccaaaaatccatcccgtccacccgctccttcgcggcctcgtttacgacaccctcttgaccgctcggcgtggccttcttcagtgccgtactgcggcttgtctgttgtcatctgcatcttcgctcccaacgatgccatcgactctgattgccgccgccgcatgaccatccatcaccacaaccaccacaacgcttcctctgccgcgacttctccacacgcgaccttgtggctcgtcgtcccgcctctgtaaatacacgattatagatacctagcttcgagtgcatccgaccgtcaccttgcatcatttctacgataatactgcaacaacaccgtcgccatcatgttcgccccgtcccaggcgaacggcaaggagaatgccgctgcgaccccgatgaccacccgtggccgcaggcgacagcgtcccttgagctccgacaactcgctccccgcgcccaagtccaagcgactgcgatctgaacggccccagctcaacgacgaaacctttgtggatcccatcaacacgcgcgagacctacgaggtcaagtcggcacagttctcgaccccagatgccaagcaagatggccttgagcagcccctcgagcagcccgtggcggccaggcaagagctcagcgtgcgctctaagaagtcgaggaatggcgacagactgaccaagggcgatggtagcacactcctggctatcaacgcggctttcgatgtcagaaagctgcccgcgctgccggaacgaataaaacaggatgccaccagtcgccagcatggttggctcgatagcgcgacgggctgtgcgctcactctcacccacacacatgccgtcgtatggccctacagcgcaacggcgaccctacccgagtccttcaccttcacgctaccctatccctcgaaacattccaccgaccctctacccctcggcgcccttgtggctccgtctgcctcgtcggccgagccgggcctggttgtcgtgatgcccagcagtggcaagatcacctactgggaatccatatcaagtgccactactcttgatttcatgcgccagcagcgcaccggcgtcgaaggcttgatatccggcatgttctcaggcgagaccgccatccagatcgtcaatgcagaagccgctgccggctttgtgttggcattcagcagtgggcgcgtagcatacctcagcttgcgagacggtcatgggcggccccaggtctctgtgcagttcttgcgcacgacccttggcccttcgagcactggtctgctcggcagcgtgcgccatgccttgagccgcgcagcacttcagggcgacatcgcagctgtgcgggctgaaagatcatctcagcaaggcgaatctactgtagtggccatcaccacaaagggtcgcatcaactcctggcggatacatcgtggaggtcaccatgaccttcttactgagctagatgctcgaggcaccttggtcgaagctgtgcaaaatgccgataggactagtggcaactacgctctcgagtccttcaagatcatcgatttctgccacgtgcccaagggtttgcctgccaagtatactgacaagactcagctgcaccacgtccgagccagcgaagatcagcagcacgtgctcttattgacctctttcgacgacaagcaaacatgccgatatgttctggtcgaagtcatgatccctgtcagttcgtcaccagaaccgtccatcaatgtcggcatgattcgaccaatatcagcattctctaaacctcaggatcctcatgctctcgtgggccctcgactgtatcttccgaagcctgccgtcattgccttcctcgtcttcgatcacgctgccgtcgttgcttccattgcccaaccgcccgactcacccgactcccagatcatgcaagataaccacctcctgcctaccgcattcgaagatgtcattgacatccgccacgacccgacttttgagattgtgggatccgggttcgaagagcctcatatccaaaccggagacgacgagatgcgaccttcgcgcattaagaccaagaaccctaccgctgtgctcctcgtccgcggtgtcggtactctccgcatcgccaccactgactacgagaaatttatgagcgacaagcctccggtagtcaatgccaagatcaagctagagcagggtgtattctttggtatcaaggacgacaaccccctgatgtttgatatccagcataatattcggttcagtgagaaaagctacggagaagctgctctagagctgagcgaggaaattttgacttcgtctgggcaacatcttgctcaattggctgccagactggatgcgaacatgaaggaccgcgtgcgatatctggataagatcatgatccaaattaagagtttgggcattaccctagaccgtgctacaaaatggcagcttttgtggaacgccgaaaagatgcacgtagctggtgctctgtggcgcaaacacgaagagtttttgcacatgcgcccagatgattcgaaaaggagcgtcattgcagaaatcgtccaattcatcagaaaggaggaaaaatcgaaaccggacctcgcgagaggagaaacagacgaactccgccattggttcattcatgacatccatcgcttagatttattcatcgcgtggggctacgaagtcatcaaacaaaattctttcgccgaacgtgacgcggtttctatcagtcgctacatcttcgaaacttctgatatctacaatatcgccatacgggacgctttcgcgttccgagaaacgcacctagagctctacgggctgaaaggcgagaagctagaccatggaattttagaagcaaactacgccggtctacccacgccatggaccgcaagtcggtttattgccaacaacgtgaaaagacaggttgagttggcatccgaatggatcaagcaagaggtagaggcaaccgacgagaccatcatctcaatggtagagaaaaccagggatatcctccccgatttaactgaagtctacctctgggtgcttcaagaattggctcggtcgaatcttgaaagcgaggatccaaagcgtgtcgccgaaggtcagaagtacgagaatctgtaccaggaagaccgccacacgaaagttgtcctgttgtcccaatctggaaattgggaggccgccatcagacttgcagagaatcaccgatcacttccagccttgggcgaagtactcatctgcgagatcgactcactaacgactgagctcgagcttgccaacgaccagcagcaacgagaagccgttgaatccaggatcgccgccaaggaaaccaaagtcaaagagtgcttcgcgacctacggcgaggcattcgccctcccattttacgaatacctctttaccacattcggcgttgacgctctcctccagtatggtcttgagaaacggttcaaaacaatgtatcttcgaaccaagcctgagttagcaaaagtttcttggatcaatgacatcgttggtgaggaagacatcgaccatgctgctaatacactcctcgacttggggttgactcgcgagcaacaagtatggagtaagaagattgagcttagtctaggcaagctggcccggatggccgaatcctctcgcccttcaacgaaagcatcgatgagcttacaggaagcgaatattagtaatactgctgcagatgcgcagattgatgctattgacagagaactgacgattattgagattcaaaatgagttttacgagactcagattcggccgatcataagcgtagccctagacgagtctacagaactgagtctagcccaagaaaccttcgctttgaagcatcccaagaagtacaaaatactgtcgcagatcttcgacgatgcactgaagcgtctactggatcacgaagctctcgagcccatgacactgattgatatcttgactttggccgtattaccggagaacacaaaagatgatattgctgatcagttctaccttgcctgtcacgttgccagcaatggcctacaaggcgatgaccgtatccaggctgaacggctgatctggagacgatgtttcttgcgcgaagactggacagcgatcaacaatacctcgctaaaggcagataagcagacactggatgtcctcgctcagactgatctcttccaattctattgcactctgtacagaagtcaacaaggcaatgatatcacatctcatagagttttaccatcggaagctctgggcgtctacacggatatgatggatagacgatttgagcgtatggataaagggtttcgcgagaagtacctggaagccatgcgatgggaagactccaaccttcgcaagcacattgagaagcataggcttgacgagtgggcccaagaaacccgcaaacttgccgagcaatctgttgatcaatcattcgatattgccaccgaagagcaatccgcggctgcacctctgccagaaaaggtgcccaggttgatgcgcaatgggaagaacggtgtgcactagggtgttggccttcgttttatacgctaaaatccatttgcaccggcgtgttaggagttgctgcttcgattttattgttcgattactgtaaacctattattcacttgttgctttgtattcgttggactcggcgcattatataacccgccgtgaggcatggacgggtcaaaaagagggaaaagaactgttattaagctgaagcatttgtgacagaccacagattacagaaggaaaagctgaggactgggtttccgataggtatagttaggaatctgagagaatggcgtgggactttacacctttggtgtagattctactgccagatgcgccagacacgcatttttctttgtctagcactttgtatggctttgactgatgtggtctattttgatatgttttacaccgtacccttcgag

SEQ ID NO: 25851 - DNA, 1656 bp, Muscodor strobelii
  misc_feature: SGI cDNA ID NO. 568827
  misc_feature: Elevated expression when VOC is produced
  misc_feature: Encodes the peptide sequence at SEQ ID NO 25852
atgcggcccgtatcagcactgcttctcggggcctctctggcatccgccagttcacttccgagacacatcgaggacctcatcaagaaacaagtgccagccgaagcttctggcgtcaagaccattacgtcgccctcgggagctacgattcggtacaaggaacctggtaaagagggtgtctgcgaaactacacccggtgtcaactcatactccggatatgtggacttggatccagacacgcatatgttcttttggttctttgaggcgaggacggatccggatgagaagccgattacgctctggcttaatggtggacctgggtctgattcattgattgggctgtttgaagaactcggcccttgcagcgtggcggccaatggcagcgagacgattctaaatccctattcatggaccgaggaaagcaacatgctcttcctctcgcaacccataggcgtgggtttctcatacgatacgaaagtcgagggcttcgtgaaccggactactggcctaccgcagaattcgtcacatccgaatggtcgatacagcgacgtcgatccgtaccgaactactacgacacaacttgctgctgtgggagcctatgaaatcctacagggatttctggagaacttgccaacgctcgatggcaccgttcaatcacgaagtttcaacctctggactgaatcctacggtggtcactatggacctgcgttcttcaagtatttttacgaccagaatgaactcatcaaatccggaaagaagaagggtgtcgagttgaatatgcatacactcggtatcatcaacgggattgtgtctgcgagcatacagatgccgtattacccggagttcgcgatgcataatacatacgggattaagggcgtgaatgagagtatctacaactacatgaagatgaactgggatttccccggcgcttgcaaggatagtattcagtattgtattgaaggggatcggacgactccggatggaaatgcggtttgctcgcaggcggatgctatttgtcgtgggcttgtcgagagtccgttttatgtcgtgagcggcaggaatccttatgatattcgagcgatgtataatgcggatattccaccggagccttgggtcgactacttgaatacggcgtttgtgcagaatgcgattggcgttgatattaattatacgtcgacgagtagtgagcaggtctggcaggggtttgattacacgggtgattggaattatcctgagttgatggaggatctggaggcggttgttgggtatggtgttagagtggcgttgatttatggtgatgctgactacatctgcaattggttcggcggtgaagcagtctccctcgctctgaactacacacatagcaaggaattccgcgcttctggctacgcaccgtttatggttgatggcgttgagtatggagagagtcgacaatatggcaatttcagcttcacaaggatctacgagagcggacatgagattccgtattaccagcctgttgctgcgctggagttcttcaagagaacattgaatgactatgttttggctgatgggacgacgaagatcactgctacttatgagagtaatgggaccgcgaaggctacgcataccgagtcttatgttacttggtatactggacggccggaagatgggaagtag

SEQ ID NO: 25852 - protein, 551 aa, Muscodor strobelii
  misc_feature: SGI Peptide ID NO. 568827
  misc_feature (54)..(511): Pfam Id: PF00450 Pfam Desc: Serine carboxypeptidase
  misc_feature (9)..(541): NCBI GI: 169618539 Blast Desc: SNOG_12460 [Phaeosphaeria nodorum SN15] gi|160703632|gb|EAT80273.2| SNOG_12460 [Phaeosphaeria nodorum SN15]
  misc_feature (26)..(540): NCBI GI: 189201287 Blast Desc: carboxypeptidase S1 [Pyrenophora tritici-repentis Pt-1C-BFP] gi|187984079|gb|EDU49567.1| carboxypeptidase S1 [Pyrenophora tritici-repentis Pt-1C-BFP]
  misc_feature (28)..(550): NCBI GI: 67521938 Blast Desc: AN1426.2 [Aspergillus nidulans FGSC A4] gi|40745400|gb|EAA64556.1| AN1426.2 [Aspergillus nidulans FGSC A4] gi|259486736|tpe|CBF84834.1| TPA: serine carboxypeptidase A4]
  misc_feature (4)..(547): NCBI GI: 119484110 Blast Desc: carboxypeptidase S1, [Neosartorya fischeri NRRL 181] gi|119410114|gb|EAW20061.1| carboxypeptidase S1, [Neosartorya fischeri NRRL 181]
  misc_feature (4)..(547): NCBI GI: 40850662 Blast Desc: carboxypeptidase 2 [Aspergillus fumigatus]
  misc_feature (8)..(540): NCBI GI: 15004616 Blast Desc: AF394242_1 carboxypeptidase S1 [Aspergillus oryzae]
  misc_feature (28)..(550): NCBI GI: 115490965 Blast Desc: ATEG_00024 [Aspergillus terreus NIH2624] gi|114196970|gb|EAU38670.1| ATEG_00024 [Aspergillus terreus NIH2624]
  misc_feature (8)..(540): NCBI GI: 169784368 Blast Desc: [Aspergillus oryzae RIB40] gi|83775392|dbj|BAE65512.1| protein product [Aspergillus oryzae]
  misc_feature (27)..(540): NCBI GI: 145253370 Blast Desc: An16g09010 [Aspergillus niger] gi|134083763|emb|CAK47097.1| protein product [Aspergillus niger]
  misc_feature (4)..(547): NCBI GI: 146324735 Blast Desc: carboxypeptidase S1 [Aspergillus fumigatus Af293] gi|129556128|gb|EAL85181.2| carboxypeptidase S1, [Aspergillus fumigatus Af293] gi|159123776|gb|EDP48895.1| carboxypeptidase S1,
  misc_feature (26)..(523): SWISSPROT Homolog: EC 3.4.16.6 Carboxypeptidase D
  misc_feature: Useful for introducing or modulating the production of volatile compounds
MRPVSALLLGASLASASSLPRHIEDLIKKQVPAEASGVKTITSPSGATIRYKEPGKEGVCETTPGVNSYSGYVDLDPDTHMFFWFFEARTDPDEKPITLWLNGGPGSDSLIGLFEELGPCSVAANGSETILNPYSWTEESNMLFLSQPIGVGFSYDTKVEGFVNRTTGLPQNSSHPNGRYSDVDPYRTTTTQLAAVGAYEILQGFLENLPTLDGTVQSRSFNLWTESYGGHYGPAFFKYFYDQNELIKSGKKKGVELNMHTLGIINGIVSASIQMPYYPEFAMHNTYGIKGVNESIYNYMKMNWDFPGACKDSIQYCIEGDRTTPDGNAVCSQADAICRGLVESPFYVVSGRNPYDIRAMYNADIPPEPWVDYLNTAFVQNAIGVDINYTSTSSEQVWQGFDYTGDWNYPELMEDLEAVVGYGVRVALIYGDADYICNWFGGEAVSLALNYTHSKEFRASGYAPFMVDGVEYGESRQYGNFSFTRIYESGHEIPYYQPVAALEFFKRTLNDYVLADGTTKITATYESNGTAKATHTESYVTWYTGRPEDGK

SEQ ID NO: 25853 - DNA, 2090 bp, Muscodor strobelii
  misc_feature: SGI EST ID NO. CUFF.60998.0
  misc_feature: Variant of the nucleotide sequence at SEQ ID NO 25851
ccgaggttgacgttgattgctcggacctcccgcagattgtgggcgggatgacaaaggtgggctaggagctctatcgagctcgacccaacctcgccaacgtcgtcatgaatcgctactagtgttggaggtgaggcgatgtgatgggcgatgaaccggcaacgttgccgggctgcgagtcggaggtgatgagatatgtggatggaggtggagataatgctaggattgagtcgtgaagtggaatcgtatataaagacatgaccagcgctgcaatctcagcatactgagttctgcgaggtgatctcgagtccatatctcagtgtttgtagcttctaaacaccaatcgtgaagatgcggcccgtatcagcactgcttctcggggcctctctggcatccgccagttcacttccgagacacatcgaggacctcatcaagaaacaagtgccagccgaagcttctggcgtcaagaccattacgtcgccctcgggagctacgattcggtacaaggaacctggtaaagagggtgtctgcgaaactacacccggtgtcaactcatactccggatatgtggacttggatccagacacgcatatgttcttttggttctttgaggcgaggacggatccggatgagaagccgattacgctctggcttaatggtggacctgggtctgattcattgattgggctgtttgaagaactcggcccttgcagcgtggcggccaatggcagcgagacgattctaaatccctattcatggaccgaggaaagcaacatgctcttcctctcgcaacccataggcgtgggtttctcatacgatacgaaagtcgagggcttcgtgaaccggactactggcctaccgcagaattcgtcacatccgaatggtcgatacagcgacgtcgatccgtaccgaactactacgacacaacttgctgctgtgggagcctatgaaatcctacagggatttctggagaacttgccaacgctcgatggcaccgttcaatcacgaagtttcaacctctggactgaatcctacggtggtcactatggacctgcgttcttcaagtatttttacgaccagaatgaactcatcaaatccggaaagaagaagggtgtcgagttgaatatgcatacactcggtatcatcaacgggattgtgtctgcgagcatacagatgccgtattacccggagttcgcgatgcataatacatacgggattaagggcgtgaatgagagtatctacaactacatgaagatgaactgggatttccccggcgcttgcaaggatagtattcagtattgtattgaaggggatcggacgactccggatggaaatgcggtttgctcgcaggcggatgctatttgtcgtgggcttgtcgagagtccgttttatgtcgtgagcggcaggaatccttatgatattcgagcgatgtataatgcggatattccaccggagccttgggtcgactacttgaatacggcgtttgtgcagaatgcgattggcgttgatattaattatacgtcgacgagtagtgagcaggtctggcaggggtttgattacacgggtgattggaattatcctgagttgatggaggatctggaggcggttgttgggtatggtgttagagtggcgttgatttatggtgatgctgactacatctgcaattggttcggcggtgaagcagtctccctcgctctgaactacacacatagcaaggaattccgcgcttctggctacgcaccgtttatggttgatggcgttgagtatggagagagtcgacaatatggcaatttcagcttcacaaggatctacgagagcggacatgagattccgtattaccagcctgttgctgcgctggagttcttcaagagaacattgaatgactatgttttggctgatgggacgacgaagatcactgctacttatgagagtaatgggaccgcgaaggctacgcataccgagtcttatgttacttggtatactggacggccggaagatgggaagtagacataagaaatcttttgcgcttgtaatagggagtagatgataatgagatatacacttggcatatagcgtgaaatacatggtttctg

SEQ ID NO: 25854 - DNA, 816 bp, Muscodor strobelii
  misc_feature: SGI cDNA ID NO. 568828
  misc_feature: Encodes the peptide sequence at SEQ ID NO 25855
atggctcacgtgtatttgagcagactctggctcagcacactcttgtgctgggctgccagtgccgtcgtaattgcctcacaggacaattcccaagttgcttttgggcgccgcagagtgctaatctcgacgcttgagaaggacatcaaacgttatggttccaaaaccattgtctcaagattagcccctccagatccgtcaaccctcattggagtgctatggcgagagaaccaggatctccaagactactactacctcgtggactacgccaagtacgaagtcgtgcgaatgaacacctacccagaattcagcccgacacagcttctttcgctaatggacagcgagatgaggtcgatacttgttaacgatgtcgactatgcatgggactttcgcaatgaaacgctgatcaaagacctcgggatcgcgccgaattacatcgatgacaggtccaggagtgtcgaagagctggcctacgcgaactggttgcagaagaatgcagacttaggctggttcacgatgcacgtcgcatttataccgtgcatatacggatgggtccaactcgcgtcaaagtggaccgtatccattgcaaccaacaagaactccaccttctatgagacttggatagcgcccaacgctgacccaagttttggggattcactatcagacttcctcgaagccaacaaagcggagtactactcagccgaggcaaacagaacctggaatgcggttttcagacaagctcttctcttcgagatcgccttttttaacagcgcgatcggtaaaacactcggcgacctgcctgctagccttggatactga

SEQ ID NO: 25855 - protein, 271 aa, Muscodor strobelii
  misc_feature: SGI Peptide ID NO. 568828
  misc_feature (80)..(257): NCBI GI: 284046959 Blast Desc: transcriptional activator, TenA family [Conexibacter woesei DSM 14684] gi|283951180|gb|ADB53924.1| transcriptional activator, TenA family [Conexibacter woesei DSM 14684]
MAHVYLSRLWLSTLLCWAASAVVIASQDNSQVAFGRRRVLISTLEKDIKRYGSKTIVSRLAPPDPSTLIGVLWRENQDLQDYYYLVDYAKYEVVRMNTYPEFSPTQLLSLMDSEMRSILVNDVDYAWDFRNETLIKDLGIAPNYIDDRSRSVEELAYANWLQKNADLGWFTMHVAFIPCIYGWVQLASKWTVSIATNKNSTFYETWIAPNADPSFGDSLSDFLEANKAEYYSAEANRTWNAVFRQALLFEIAFFNSAIGKTLGDLPASLGY

SEQ ID NO: 25856 - DNA, 2366 bp, Muscodor strobelii
  misc_feature: SGI EST ID NO. CUFF.61017.1
  misc_feature: Variant of the nucleotide sequence at SEQ ID NO 25854
aataatgcaacattggtcttgatcacaggcttacctatctggggacagagctgtaacgtcttttcatcgatggtcgctgtggtcaaatatgattattgcgataaaattctcgtggtacctgcggcgataacccgttaaccagcgacttccgcgtgccccgactgcgagtatatcactgcttctttctcgatacgacaacatattattcctcgggttacgcattctttcgacgactattctgtagacatgatgtttcgctttgacagagctaatcagttgacacaatttaaagctaaatggttatggccagaaattttacgcatcggaatgtgttcgccgggctagctatcgaaggcctaaatgagtgtggtaaatctaaagccactctgaccctagatgggtatctcccctataggtaggttgtcagcctctcctaaataccagatctcaccaatattacgcaacgccaccacacctcgtattggccaataggcaacatattgatactatgcagtgctaacacacctggtacacattaggcgaaatctcgaagtcacagcttcggctacagcaccaggcagacgcacggagatttcacagcaatcttcttacattacaagaccatgccagccgtcgcggcgccggtccttgtttataagctctctctggctctttttctctgcttggaaacttcgcttcccaggtgcattacaatatagcggatcatacctcatatcgactgtccatcgcaatggctcacgtgtatttgagcagactctggctcagcacactcttgtgctgggctgccagtgccgtcgtaattgcctcacaggacaattcccaagttgcttttgggcgccgcagagtgctaatctcgacgcttgagaaggacatcaaacgttatggttccaaaaccattgtctcaagattagcccctccagatccgtcaaccctcattggagtgctatggcgagagaaccaggatctcgtagactagtttctaaacgtcgaattcatcaaactgcaagcagaaggtcgacaaaacgcagcttcgccctcgtaccagtactattcggtgcaagactactactacctcgtggactacgccaagtacgaagtcgtgcgaatgaacacctacccagaattcagcccgacacagcttctttcgctaatggacagcgagatgaggtcgatacttgttaacgatgtcgactatgcatgggactttcgcaatgaaacgctgatcaaagacctcgggatcgcgccgaattacatcgatgacaggtccaggagtgtcgaagagctggcctacgcgaactggttgcagaagaatgcagacttaggctggttcacgatgcacgtcgcatttataccgtgcatatacggatgggtccaactcgcgtcaaagtggaccgtatccattgcaaccaacaagagtgattacttaccacatcacctctctttctatgcttttcctcgactgcaatgatttctaacctacaccattacgtagactccaccttctatgagacttggatagcgcccaacgctgacccaagttttggggattcactatcagacttcctcgaagccaacaaagcggagtactactcagccgaggcaaacagaacctggaatgcggttttcagacaagctcttctcttcgagatcgccttttttaacagcgcgatcggtaaaacactcggcgacctgcctgctagccttggatactgagtcgaaaagtgttggcgagggcatttcgctccagaactggatagactctgatcttatcatccggaaccccgtttccggacacccagctccagcaaaagtcatcacagcaaaagtcatcatgttgaagaataggtgtcctaatcaatgaagatagtagaaatgaattatacatagcataccgagagcaaaacaaacatgctcatttcaccacctgaattccgtacctggagtagtcgaaattttcaaggctcggtaggctttctgcccagccgtcatcaatctcccctggctgtagccagtgaagtgtcatctatctccaccaatcctgtacgcccatcaagcatgcttttattggtcgattcgtattcttccactatatcgggatgcggcacctagatagctcatatgccagctcgccgccctgcttcaacccctatcacactattttcaaagaccagatgttcgtttgctatgattgggtctgctccggtatttgcatttaaggcttgcaaagcaatgaggtaaatacccggcgcaggttcattgcgaccttctgcgatttgagggttatctcctaatacccatgtcgtctggaattctgtctagaagttcccttgcttcgagattcgggg

SEQ ID NO: 25857 - DNA, 768 bp, Muscodor strobelii
  misc_feature: SGI cDNA ID NO. 568829
  misc_feature: Reduced expression when VOC is produced
  misc_feature: Encodes the peptide sequence at SEQ ID NO 25858
atggacaacatgagaggctcttcgcctgtcaagtccgccccgacggccgacgccaacgaacaactacttaacgccttcaaggctgcggccctctcggtcacaaagctctacaaaacctcggccgatgcccaggccaagtcccgggctgagggttaccaggactgcctcgacgacctgctctccttcctcgacaagcagaacatcgggctgggcgacggagaaggatggcagatccgacgatgggcaacagaaagactcgaaggcacctccgaagacgaaatagaaaaggccgactctcctgaagccacccggacaaacacctcccacctgactcccaccatacgcaacgaatcggcgccaccagcagtaacaatacaaacaaacgttccggaaaccaccatggaagaaccacaacccatcgctgtcccgacccaagacaacttcaccttccagtcatccctcgcctatcctcagttaccaacgcaagattcttacctcaacctcgataatctcaacctgtccgactctttgagacccaacgagagtgcatcacttcctccatcaacaactacagctacatctcagacgagtcgctctcggcgagataggcgacgtcctcttcgttcaggcgccacggcacatctaggaaaaggtgccggccagaaacgcgctataaacttcgccgagctattcgacatgggaaatataaattttggaaacggaaaggatcctttcggccgcgagggcaaacggagccggcatcaatag

SEQ ID NO: 25858 - protein, 255 aa, Muscodor strobelii
  misc_feature: SGI Peptide ID NO. 568829
  misc_feature (1)..(254): NCBI GI: 256732044 Blast Desc: NECHADRAFT_104409 [Nectria haematococca mpVI 77-13-4]
  misc_feature (15)..(253): NCBI GI: 116201587 Blast Desc: CHGG_08678 [Chaetomium globosum CBS 148.51] gi|88177196|gb|EAQ84664.1| CHGG_08678 [Chaetomium globosum CBS 148.51]
  misc_feature (1)..(254): NCBI GI: 46137509 Blast Desc: FG10270.1 [Gibberella zeae PH-1]
  misc_feature (20)..(253): NCBI GI: 39973685 Blast Desc: MGG_01011 [Magnaporthe grisea 70-15] gi|145018031|gb|EDK02310.1| MGG_01011 [Magnaporthe grisea 70-15]
  misc_feature (15)..(254): NCBI GI: 171677947 Blast Desc: protein product [Podospora anserina] gi|170937042|emb|CAP61701.1| protein product [Podospora anserina]
  misc_feature (1)..(253): NCBI GI: 156043547 Blast Desc: SS1G_10777 [Sclerotinia sclerotiorum 1980] gi|154695164|gb|EDN94902.1| SS1G_10777 [Sclerotinia sclerotiorum 1980]
  misc_feature (1)..(255): NCBI GI: 261355755 Blast Desc: conserved [Verticillium albo-atrum VaMs.102]
  misc_feature (6)..(254): NCBI GI: 164426581 Blast Desc: NCU03874 [Neurospora crassa OR74A] gi|157071395|gb|EAA27311.2| NCU03874 [Neurospora crassa OR74A]
  misc_feature (1)..(253): NCBI GI: 255947268 Blast Desc: Pc22g03600 [Penicillium chrysogenum Wisconsin 54-1255] gi|211591418|emb|CAP97648.1| Pc22g03600 [Penicillium chrysogenum Wisconsin 54-1255]
  misc_feature (1)..(253): NCBI GI: 119499888 Blast Desc: NFIA_102890 [Neosartorya fischeri NRRL 181] gi|119414866|gb|EAW24804.1| conserved [Neosartorya fischeri NRRL 181]
  misc_feature: Useful for introducing or modulating the production of volatile compounds
MDNMRGSSPVKSAPTADANEQLLNAFKAAALSVTKLYKTSADAQAKSRAEGYQDCLDDLLSFLDKQNIGLGDGEGWQIRRWATERLEGTSEDEIEKADSPEATRTNTSHLTPTIRNESAPPAVTIQTNVPETTMEEPQPIAVPTQDNFTFQSSLAYPQLPTQDSYLNLDNLNLSDSLRPNESASLPPSTTTATSQTSRSRRDRRRPLRSGATAHLGKGAGQKRAINFAELFDMGNINFGNGKDPFGREGKRSRHQ

SEQ ID NO: 25859 - DNA, 1866 bp, Muscodor strobelii
  misc_feature: SGI EST ID NO. CUFF.61010.0
  misc_feature: Variant of the nucleotide sequence at SEQ ID NO 25857
tcccaaacccctgcgctttgcccgcaccttgattcttgcacgcaggttctaaattccgagctgctccaagccgcaaggactcatccagcatcatatgacaaccctgctgacgacaccacagcctggttggtcagggactttaactcattccagcctgtccacgcgaggaaggacaacaggtgcatgatcctcccgtcaactcctccaacctcaacaccacacatggtatatcttgattaccttacatgcatccatccatcttggccccttaaaaaataaaacttgactttattcacgtctgagcgctgccacttttcctgaacacttattcaataactgataaaaaccgggtgcggctgccttctttttgttcggccggccccttcttttatgtaacaacgccccatcaaggtggcccaagtccctgctctagccgtcacaatcaacccttcaccaccaacagacgtctgtcctgttactcattcgctgcccttccgcaatctgacccacagcccttgctgcattgtcccccactacgcctggcaacgaacctgcgagaaataccatcatagtgacaagagaaacaaaccgacgagcaactcaaaggcggacaacctaaagccaacggccgacttctggcttctctactaatcgctcccgtcgttgttataccttcaaacaaagacggctcctagacatcggatccaccaaagaaaagtgccccgagatcatggacaacatgagaggctcttcgcctgtcaagtccgccccgacggccgacgccaacgaacaactacttaacgccttcaaggctgcggccctctcggtcacaaagctctacaaaacctcggccgatgcccaggccaagtcccgggctgagggttaccaggactgcctcgacgacctgctctccttcctcgacaagcagaacatcgggctgggcgacggagaaggatggcagatccgacgatgggcaacagaaagactcgaaggcacctccgaagacgaaatagaaaaggccgactctcctgaagccacccggacaaacacctcccacctgactcccaccatacgcaacgaatcggcgccaccagcagtaacaatacaaacaaacgttccggaaaccaccatggaagaaccacaacccatcgctgtcccgacccaagacaacttcaccttccagtcatccctcgcctatcctcagttaccaacgcaagattcttacctcaacctcgataatctcaacctgtccgactctttgagacccaacgagagtgcatcacttcctccatcaacaactacagctacatctcagacgagtcgctctcggcgagataggcgacgtcctcttcgttcaggcgccacggcacatctaggaaaaggtgccggccagaaacgcgctataaacttcgccgagctattcgacatgggaaatataaattttggaaacggaaaggatcctttcggccgcgagggcaaacggagccggcatcaatagcaccttcgtactccgtccagagcaacgagatatacaatgaggaagtggcgatggtgttcgacggctttctgttttgggttgcatgcatcaaacgcgtggggaaggggttataaagcattcacggggcgttcgattcgttttttctagaaaggcagaaatctgctgcttgtttcgatgatgaaacttgtgggtgtaactcggtatggagggatccggaggatatatcctgcgatgggttttttcttgtgtacggcgctacactgtgcatgtctcatgtagataccagtatcttaaccaaagctgttaaatgccattatgttgccaacttttctacgtatgcatctggagtggtgtgtattcaaattccc

SEQ ID NO: 25860 - DNA, 3360 bp, Muscodor strobelii
  misc_feature: SGI cDNA ID NO. 568830
  misc_feature: Reduced expression when VOC is produced
  misc_feature: Encodes the peptide sequence at SEQ ID NO 25861
atgcccgcttcacgttcgcggcccagtgccgtcgacaccgacgcgtccatgtctgatgccccagaagcctcagtcaatagaccggacgaaatggaggtcgacgacactccagatttcaccgaggactcggacacgaatcccaacaccaccgccagcagtgtcgccggcgatctcaacacagacggccgcaagaagcgttccgaggctaaccagctccgaagaagtattttcggcaagaaacatgatgccctaggagagtctaaggaagacgacagtatacgtcgattccgctacttactcggcttgaccgacttgttccgtcacttcattgagacaaatcctaaccccaagatccgtgacatcatccacgaaatcgatcgccagaacgagcaggacgcagtcaaggcgaagaagaagggtgcccgtcagggtggcgccgctaccagccgcgcccgccgcacagaggccgaggaagacgcagagcttctcaaggacgagaaacacggcgggtccgctgagaccgtcttccgagaatcacccggcttcatccagggaaccatgagagactaccaagtcgctggactgaactggttgatttcgcttcacgagaatggtatctccggtattcttgccgacgaaatgggtctcggaaagacgttgcagaccatatcattcctcggctacctgcgacatattatgggtatcaacgggcctcaccttgttatggtgcccaagtctacactcgacaattggaagcgagagttccaccgctggacacccgaggtcaatgtattagtcctccagggtgccaaagatgagcgacatgctttaattaacgagcgattggtcgacgaaaagtttgatgtgtgcatcaccagctacgagatggtccttagagagaagagccatctgaagaagtttgcttgggaatacatcatcatcgacgaagctcaccgtatcaagaacgaagaatcttcgcttgctcaggttattcgtctatttaactcccgaaatcgcttgctgatcacaggaacaccgctgcagaacaacctgcatgagctgtgggccctcttaaatttcttgcttcccgatgtattcggtgatgctgaggctttcgaccagtggttttccggccaggatcaagatcaggatacagttgtgcagcagctccacaaagtgcttcgacccttccttcttcgtcgtgtcaaggcggatgtcgagaagagtttgttgcccaagaaagaagtcaacttgtacattggtatgtcagagatgcaaatcaagtggtatcagaagatccttgagaaggatatcgacgccgtcaatggcgcaggcggaaaacgggagtcaaagactcgattgctcaacattgttatgcaacttcggaagtgttgcaaccacccctatcttttcgagggtgccgaacctggtcctccctatacgaccgacgaacatcttgtcttcaactctggaaagatggctctgcttgacagacttctcaaaaagatacagagccaaggcagccgcgtcctcatcttttcgcagatgagtcgtcttctcgatatcctagaagactactgcgtgttccgtgagtacaagtactgtcgtattgatggaggcactgcacacgaagaacgtattgccgccatagacgagtacaacaagcccggttccgagaagttcgtctttctcttgacgactcgagctggtggtctaggcattaaccttacctctgccgatatcgtcatcctgtacgacagcgactggaatcctcaggccgatttgcaagctatggaccgcgcccaccgtatcggccagacaaagcaagtcgttgtgtatcgatttgttaccgagaatgccattgaagagaaagtcctggagcgtgccgctcagaagctgcgactggaccagttggttatccagcaaggccgtgctcatcctggagctaagggacctgctggcaaggacgaactcttgaacatgattcagcacggagctgagaaagtgttcgaggcacagggctcgagccttacaggcaaaggcacggagttcaatgatgatgacatggaagccatcttgaacaagggcgagaaccgaacgaaagaactcaacgcgaagtacgagaaactgggtatagatgacctacagaaattttcttcggaatcggcgtatgaatggaatggtgagaacttcggcaccaaaaagaaggagatcgggttgaactggatcaaccccgcaaagcgcgagcggaaagaacaatcttattctgtcgataagttctaccgcgaggctatctacggaactaagaaagaggatgctaaacccaaggctccccgagcccctcggcaggttccttgtcatgactatcaattctaccctcctcgtctacgggatctgcaggaccgggagactgctttctaccgcaaggaaattggctacaaagtacctcttccagatggtgatgacgataatctgtcagagagagaagcagagcgtgctcttgaccagcaggagattgacaacgctgcacctctgaccgaggaagagaaggaagagaaagagcgcctatcgcttcaaggtttccctgagtggaacaagcgagacttccaacaattcgtcaacggctccgcccgatacggacgcaacgactttgagaggattgcggatgaaattgatagcaagacacctgctgagatcaagccgtatgccaaagtcttctggcagcgatacaccgagattgccgattacactaaattcctaggtgttatcgatgcaggagaagagcgcctccgcaagactgagcaccagcgcaagatgctccgtaaaaagatgcagttgtatagagtacctttgcaacaaatgaaaatcaactattctgtttcgacgacgaacaagaaggtctataccgaagaggaagacagattcttgcttgtgctcctggacaaatatggcatcgactccgaagggatctttgagcgcatccgtgacgagatccgagacagccctctgttcagatttgactggttcttcttgagcaggacgccggtagagatcagccgtcgatgcactacccttctcactaccattgtgaaggaattcgaggacgtgcaccctgccaaggctaacggcgtcaacggtaaaggaaagagagagccagatgatgaagagaatgatgaagacagcattttaggaatggcgccggccaagaagaagactaagggtgtgaagaacaaggcgctggattctgtcaagggctctactaaagccaatgcggcggcttcgtcgtcacgagcttccagcgtcgcctcaacaaattctggttcgggctccaaagcgaaggctaagggaaagaagaagtaa

SEQ ID NO: 25861 - protein, 1119 aa, Muscodor strobelii
  misc_feature: SGI Peptide ID NO. 568830
  misc_feature (756)..(860): Pfam Id: PF09110 Pfam Desc: HAND
  misc_feature (526)..(605): Pfam Id: PF00271 Pfam Desc: Helicase conserved C-terminal domain
  misc_feature (184)..(348): Pfam Id: PF04851 Pfam Desc: Type III restriction enzyme, res subunit
  misc_feature (916)..(1034): Pfam Id: PF09111 Pfam Desc: SLIDE
  misc_feature (190)..(471): Pfam Id: PF00176 Pfam Desc: SNF2 family N-terminal domain
  misc_feature (3)..(1106): NCBI GI: 164426583 Blast Desc: chromatin remodelling complex ATPase chain ISW1 [Neurospora crassa OR74A] gi|157071396|gb|EAA27312.2| chromatin remodelling complex ATPase chain ISW1 [Neurospora crassa OR74A]
  misc_feature (3)..(1119): NCBI GI: 256731667 Blast Desc: SWI/SNF family of DNA-dependent ATPase [Nectria haematococca mpVI 77-13-4]
  misc_feature (3)..(1109): NCBI GI: 116201585 Blast Desc: conserved [Chaetomium globosum CBS 148.51] gi|88177195|gb|EAQ84663.1| conserved [Chaetomium globosum CBS 148.51]
  misc_feature (3)..(1119): NCBI GI: 46137507 Blast Desc: FG10269.1 [Gibberella zeae PH-1]
  misc_feature (1)..(1106): NCBI GI: 145610651 Blast Desc: MGG_01012 [Magnaporthe grisea 70-15] gi|145018030|gb|EDK02309.1| MGG_01012 [Magnaporthe grisea 70-15]
  misc_feature (2)..(1076): NCBI GI: 156043545 Blast Desc: SS1G_10776 [Sclerotinia sclerotiorum 1980] gi|154695163|gb|EDN94901.1| SS1G_10776 [Sclerotinia sclerotiorum 1980]
  misc_feature (2)..(1095): NCBI GI: 154316737 Blast Desc: BC1G_03786 [Botryotinia fuckeliana B05.10] gi|150845398|gb|EDN20591.1| BC1G_03786 [Botryotinia fuckeliana B05.10]
  misc_feature (3)..(1080): NCBI GI: 171677949 Blast Desc: protein product [Podospora anserina] gi|170937043|emb|CAP61702.1| protein product [Podospora anserina]
  misc_feature (8)..(1101): NCBI GI: 121708636 Blast Desc: SNF2 family helicase/ATPase, [Aspergillus clavatus NRRL 1] gi|119400345|gb|EAW10771.1| SNF2 family helicase/ATPase, [Aspergillus clavatus NRRL 1]
  misc_feature (8)..(1119): NCBI GI: 70993276 Blast Desc: SNF2 family helicase/ATPase [Aspergillus fumigatus Af293] gi|66849119|gb|EAL89447.1| SNF2 family helicase/ATPase, [Aspergillus fumigatus Af293] gi|159125581|gb|EDP50698.1| SNF2
  misc_feature: Useful for introducing or modulating the production of volatile compounds
MPASRSRPSAVDTDASMSDAPEASVNRPDEMEVDDTPDFTEDSDTNPNTTASSVAGDLNTDGRKKRSEANQLRRSIFGKKHDALGESKEDDSIRRFRYLLGLTDLFRHFIETNPNPKIRDIIHEIDRQNEQDAVKAKKKGARQGGAATSRARRTEAEEDAELLKDEKHGGSAETVFRESPGFIQGTMRDYQVAGLNWLISLHENGISGILADEMGLGKTLQTISFLGYLRHIMGINGPHLVMVPKSTLDNWKREFHRWTPEVNVLVLQGAKDERHALINERLVDEKFDVCITSYEMVLREKSHLKKFAWEYIIIDEAHRIKNEESSLAQVIRLFNSRNRLLITGTPLQNNLHELWALLNFLLPDVFGDAEAFDQWFSGQDQDQDTVVQQLHKVLRPFLLRRVKADVEKSLLPKKEVNLYIGMSEMQIKWYQKILEKDIDAVNGAGGKRESKTRLLNIVMQLRKCCNHPYLFEGAEPGPPYTTDEHLVFNSGKMALLDRLLKKIQSQGSRVLIFSQMSRLLDILEDYCVFREYKYCRIDGGTAHEERIAAIDEYNKPGSEKFVFLLTTRAGGLGINLTSADIVILYDSDWNPQADLQAMDRAHRIGQTKQVVVYRFVTENAIEEKVLERAAQKLRLDQLVIQQGRAHPGAKGPAGKDELLNMIQHGAEKVFEAQGSSLTGKGTEFNDDDMEAILNKGENRTKELNAKYEKLGIDDLQKFSSESAYEWNGENFGTKKKEIGLNWINPAKRERKEQSYSVDKFYREAIYGTKKEDAKPKAPRAPRQVPCHDYQFYPPRLRDLQDRETAFYRKEIGYKVPLPDGDDDNLSEREAERALDQQEIDNAAPLTEEEKEEKERLSLQGFPEWNKRDFQQFVNGSARYGRNDFERIADEIDSKTPAEIKPYAKVFWQRYTEIADYTKFLGVIDAGEERLRKTEHQRKMLRKKMQLYRVPLQQMKINYSVSTTNKKVYTEEEDRFLLVLLDKYGIDSEGIFERIRDEIRDSPLFRFDWFFLSRTPVEISRRCTTLLTTIVKEFEDVHPAKANGVNGKGKREPDDEENDEDSILGMAPAKKKTKGVKNKALDSVKGSTKANAAASSSRASSVASTNSGSGSKAKAKGKKK

SEQ ID NO: 25862 - DNA, 4100 bp, Muscodor strobelii
  misc_feature: SGI EST ID NO. CUFF.61044.0
  misc_feature: Variant of the nucleotide sequence at SEQ ID NO 25860
ccgccggctgctgcaccaccaattctttccaaccactcctccaccttcaattcttacaattcctacaatcacattcccgacgcgtttgggccagcaactcgcactctccactagctcaaccctctctctcaccgccatcacactcatcgcaacactgttgtacatcgagaacccttgtcgagagagctggtttggcagacgcctcgggtacatctgaccgcgtctaagtcgcgttgagtgcctgcagcaccaccacccaccatgcccgcttcacgttcgcggcccagtgccgtcgacaccgacgcgtccatgtctgatgccccagaagcctcagtcaatagaccggacgaaatggaggtcgacgacactccagatttcaccgaggactcggacacgaatcccaacaccaccgccagcagtgtcgccggcgatctcaacacagacggccgcaagaagcgttccgaggctaaccagctccgaagaagtattttcggcaagaaacatgatgccctaggagagtctaaggaagacgacagtatacgtcgattccgctacttactcggcttgaccgacttgttccgtcacttcattgagacaaatcctaaccccaagatccgtgacatcatccacgaaatcgatcgccagaacgagcaggacgcagtcaaggcgaagaagaagggtgcccgtcagggtggcgccgctaccagccgcgcccgccgcacagaggccgaggaagacgcagagcttctcaaggacgagaaacacggcgggtccgctgagaccgtcttccgagaatcacccggcttcatccagggaaccatgagagactaccaagtcgctggactgaactggttgatttcgcttcacgagaatggtatctccggtattcttgccgacgaaatgggtctcggaaagacgttgcagaccatatcattcctcggctacctgcgacatattatgggtatcaacgggcctcaccttgttatggtgcccaagtctacactcgacaattggaagcgagagttccaccgctggacacccgaggtcaatgtattagtcctccagggtgccaaagatgagcgacatgctttaattaacgagcgattggtcgacgaaaagtttgatgtgtgcatcaccagctacgagatggtccttagagagaagagccatctgaagaagtttgcttgggaatacatcatcatcgacgaagctcaccgtatcaagaacgaagaatcttcgcttgctcaggttattcgtctatttaactcccgaaatcgcttgctgatcacaggaacaccgctgcagaacaacctgcatgagctgtgggccctcttaaatttcttgcttcccgatgtattcggtgatgctgaggctttcgaccagtggttttccggccaggatcaagatcaggatacagttgtgcagcagctccacaaagtgcttcgacccttccttcttcgtcgtgtcaaggcggatgtcgagaagagtttgttgcccaagaaagaagtcaacttgtacattggtatgtcagagatgcaaatcaagtggtatcagaagatccttgagaaggatatcgacgccgtcaatggcgcaggcggaaaacgggagtcaaagactcgattgctcaacattgttatgcaacttcggaagtgttgcaaccacccctatcttttcgagggtgccgaacctggtcctccctatacgaccgacgaacatcttgtcttcaactctggaaagatggctctgcttgacagacttctcaaaaagatacagagccaaggcagccgcgtcctcatcttttcgcagatgagtcgtcttctcgatatcctagaagactactgcgtgttccgtgagtacaagtactgtcgtattgatggaggcactgcacacgaagaacgtattgccgccatagacgagtacaacaagcccggttccgagaagttcgtctttctcttgacgactcgagctggtggtctaggcattaaccttacctctgccgatatcgtcatcctgtacgacagcgactggaatcctcaggccgatttgcaagctatggaccgcgcccaccgtatcggccagacaaagcaagtcgttgtgtatcgatttgttaccgagaatgccattgaagagaaagtcctggagcgtgccgctcagaagctgcgactggaccagttggttatccagcaaggccgtgctcatcctggagctaagggacctgctggcaaggacgaactcttgaacatgattcagcacggagctgagaaagtgttcgaggcacagggctcgagccttacaggcaaaggcacggagttcaatgatgatgacatggaagccatcttgaacaagggcgagaaccgaacgaaagaactcaacgcgaagtacgagaaactgggtatagatgacctacagaaattttcttcggaatcggcgtatgaatggaatggtgagaacttcggcaccaaaaagaaggagatcgggttgaactggatcaaccccgcaaagcgcgagcggaaagaacaatcttattctgtcgataagttctaccgcgaggctatctacggaactaagaaagaggatgctaaacccaaggctccccgagcccctcggcaggttccttgtcatgactatcaattctaccctcctcgtctacgggatctgcaggaccgggagactgctttctaccgcaaggaaattggctacaaagtacctcttccagatggtgatgacgataatctgtcagagagagaagcagagcgtgctcttgaccagcaggagattgacaacgctgcacctctgaccgaggaagagaaggaagagaaagagcgcctatcgcttcaaggtttccctgagtggaacaagcgagacttccaacaattcgtcaacggctccgcccgatacggacgcaacgactttgagaggattgcggatgaaattgatagcaagacacctgctgagatcaagccgtatgccaaagtcttctggcagcgatacaccgagattgccgattacactaaattcctaggtgttatcgatgcaggagaagagcgcctccgcaagactgagcaccagcgcaagatgctccgtaaaaagatgcagttgtatagagtacctttgcaacaaatgaaaatcaactattctgtttcgacgacgaacaagaaggtctataccgaagaggaagacagattcttgcttgtgctcctggacaaatatggcatcgactccgaagggatctttgagcgcatccgtgacgagatccgagacagccctctgttcagatttgactggttcttcttgagcaggacgccggtagagatcagccgtcgatgcactacccttctcactaccattgtgaaggaattcgaggacgtgcaccctgccaaggctaacggcgtcaacggtaaaggaaagagagagccagatgatgaagagaatgatgaagacagcattttaggaatggcgccggccaagaagaagactaagggtgtgaagaacaaggcgctggattctgtcaagggctctactaaagccaatgcggcggcttcgtcgtcacgagcttccagcgtcgcctcaacaaattctggttcgggctccaaagcgaaggctaagggaaagaagaagtaatctcacgtattccgccacgatgctgttttcacgagggtagaggcgtaacggcgttctggtaacttggctggggtatgggattcttccgaggtgcggtaaaaatcaattgctttcgcgttctgatagacggacggcaattacccctgagattgatcacggcatcgggatggagaaaggggatgtgggaatgtgtattataccatttgtgggagctgtttagtatggccgctctgtacgcaccgctagagacgtcgagatacgtacgctgtgtctgtacgaaaggaaaatactggcttaaggctgagtacttggcattgagaagaagattgcattgccaatggacggaaaatgaaaactctttagcttcaagttagcgaaaagactgaaaatgaagtgttgatttagtttaaagtaatatttccctctttgtttgagagtgagtgactacctagattacatggttatagattaaagggcct

SEQ ID NO: 25863 - DNA, 3090 bp, Muscodor strobelii
  misc_feature: SGI cDNA ID NO. 568831
  misc_feature: Reduced expression when VOC is produced
  misc_feature: Encodes the peptide sequence at SEQ ID NO 25864
atggcagagatcaagatcgacgccaagctcttccacgagcgcatctcgcagttcgtgagcgcctggaagaacgacaagcgcgcctccgacactggcgtctttgccgccgtctcctccatcctcgtcctcaccggcaaggtcgacgagaacgccgccgagttccacaagaacaatgccatgcacttctggctgctaggctacgagttccctaccaccttgatgctcttcaccaccgagaagctctacgtgattaccaccgccaagaaggctaagcacttggaggcactcaccaagggcaaattccccatcgagattctcgtccgaggcaaagacgcagcagccaatgagaaacagctcgttaccattacagagaccatcaatgccgccggcaaaaagatcggcgtcctcaccaaagacacgtctaagggacccttcatcgacgagtggaagaaagtctacggcgaaaagtgcagcgatgccgaagaagtcgacatctccgctgctctctccagcgccgccttctccatcaaggacgagaccgaactgcgatccatgcgaaccgcctccaaggcctgcgtcgccctcatgaacccgtacttccttgaccagatgtcggacatcttggaccaagagaggaaggtgaaacatagcgccctcgcatccaaagtagacgggaaactcgacgacgagaaatggtggaagacggtcgagctgcctaacaagcagaagctgccctcggacttcgaccctgcttcgctggactggtatctgggccccgccgtccagagcggaggcaaatacgacctcaaactcatcgccgagccgaccaacgataatctgcatgcaggtgtgatcattgccggtatggggctgcgatatagatcatacagctccgcaatcgctcgcactttcctggtcgaccccaacaagacgcaggagaacgtctacagagtactctacgctgcacacaacttggctttgaaggagatccgcgatggcgttactgccaaggatgtctacaacaaagctctcggtctcatcaaggctaagaaacccgaattagagaaacactttgtcaagaatattggttggggaatcggcattgaaagcaaggatactactcttatcctgaatgccaagaactcgcgaaccttgaaggacggcatgacgctctgtatcaccaccggcttcaacgacgttgagaacccccagccacaggacaaactcagcaagacatactccctagtcattacagacacgatccgagtcactacatcagagcctgtggttttcactggcgatgctccgtcagacctcgacgcctcttcgttctttttcaaggacgacgaggagatgcaacccacgccaaagaaggagaagaaggacgctcgagttggtgctgttgctaccaaaaacatcacgaatactcgtctacgttccgaacggacgacacaggtcgacgaagacgccgaaaagaggcgtcgtgaacatcagaaagagcttgcccagaagaagcagaaagagggcatggtcagattcgcagagtcgacaaatgatcaaaacggaaccgaggtcaagaagttcaagaagttcgaatcctacaagagagataaccaatttcctacaagagtcaagaatctagagattctggtagacgtcaagagccataccgttgtgctccctgtcatgggtcgtcccgtgccattccatatccagaccatcaaaaacgcaagtaaaaacgtcgaaggcgagtggtcttacctacgaatcaactttctatcaccgggtcagggagtcggtcgaaaggatgatcagccattcgaggatgcgtctgcgcatttcgttagaagcttgacgttccgttctctggatggtgatcgctatgacgagatagcgacccagattgccaacatgaagaaggaagcaaccaagaaggagcaagagaagaaggatatggaagatgtcgtggagcaggagaagctggtagagattcgcaaccgacgaccaccggtgatggataatgtcttcatccgtcctgccatggaaggcaagcgcgttcctggcaaagttgagatccaccagaatggtattagataccagtcgcctctgaatagtacccagagagtcgacgtgttgttctcaaatatccgtcatcttttctttcagccctgtgcgcatgagcttattgtggtcatccacatacacctgaaagatccgatcattgtcggtaacaaaaagaagaccaaggatgttcagttctaccgagaagctacagacatacagttcgacgaaactggaaataggaaacgcaaataccgctacggcgacgaggacgagtttgaggctgagcaggaagagcgacgacgtcgtgcggagctggaccgtctgttcaagaacttcgccgacaagatcgccgatgctggcaagaatgaaggcgttgaggtggacatgcccctacgagaactcggattccacggtgttcctttccgaagcaacgtctacatccagcccaccacggattgtctcattcaagtcacggagcctcctttcatggttatcacgcttgatgacattgaggttgctcacttggaacgtgtgcaatttggcctgaagaactttgatctcgtcttcgtcttcaaagattttacgcgcacacctttccacgtcaacacgatacccgtcgagtcactcgaagacgtcaaggagtggctagattcatcagatatcgccttcagtgagggaccactcaatctgaactggcctaccatcatgaagacggtgacagcagatactcaccagttcttcgtagatggcggttggtcgttcctggctaatgacagcgatgatgagggttctgaggaagaggaggaggagtccaactttgaggtctccgatggtgagctcgaagacgcaagtgaatccagcgaagacgattcggacttcgatagtaacgcgtccgatgaggcttccgaagaaggatccgaagaggaagagggcgaggattgggatgagctcgagaagaaggccaagagaaaggacagagagagcgggctcgaggaagaggataaccgcaagaagagaagacgctag

SEQ ID NO: 25864 - protein, 1029 aa, Muscodor strobelii
  misc_feature: SGI Peptide ID NO. 568831
  misc_feature (841)..(996): Pfam Id: PF08512 Pfam Desc: Histone chaperone Rttp106-like
  misc_feature (549)..(699): Pfam Id: PF08644 Pfam Desc: FACT complex subunit (SPT16/CDC68)
  misc_feature (849)..(996): Pfam Id: PF08512 Pfam Desc: Histone chaperone Rttp106-like
  misc_feature (1)..(1029): NCBI GI: 46137049 Blast Desc: FG10040.1 [Gibberella zeae PH-1] gi|110287967|sp|Q4HYB8.1|SPT16_GIBZE RecName: Full=FACT complex subunit SPT16; AltName: Full=Facilitates chromatin transcription
  misc_feature (1)..(1029): NCBI GI: 256731691 Blast Desc: FACT complex protein [Nectria haematococca mpVI 77-13-4]
  misc_feature (1)..(1029): NCBI GI: 145612681 Blast Desc: MGG_07316 [Magnaporthe grisea 70-15] gi|145019823|gb|EDK04051.1| MGG_07316 [Magnaporthe grisea 70-15]
  misc_feature (1)..(1029): NCBI GI: 116180124 Blast Desc: CHGG_00690 [Chaetomium globosum CBS 148.51] gi|88184987|gb|EAQ92455.1| CHGG_00690 [Chaetomium globosum CBS 148.51]
  misc_feature (1)..(1029): NCBI GI: 74622819 Blast Desc: SPT16_NEUCR RecName: Full=FACT complex subunit spt-16; AltName: Full=Facilitates chromatin transcription complex subunit spt-16 gi|18376253|emb|CAD21367.1| transcription elongation
  misc_feature (1)..(1029): NCBI GI: 164426145 Blast Desc: NCU01164 [Neurospora crassa OR74A] gi|157071214|gb|EAA32294.2| NCU01164 [Neurospora crassa OR74A]
  misc_feature (1)..(1029): NCBI GI: 171692033 Blast Desc: protein product [Podospora anserina] gi|170945965|emb|CAP72766.1| protein product [Podospora anserina]
  misc_feature (1)..(1029): NCBI GI: 154304425 Blast Desc: BC1G_09088 [Botryotinia fuckeliana B05.10] gi|150854068|gb|EDN29260.1| BC1G_09088 [Botryotinia fuckeliana B05.10]
  misc_feature (1)..(1029): NCBI GI: 156055004 Blast Desc: SS1G_04853 [Sclerotinia sclerotiorum 1980] gi|154702638|gb|EDO02377.1| SS1G_04853 [Sclerotinia sclerotiorum 1980]
  misc_feature (1)..(1029): NCBI GI: 261351808 Blast Desc: FACT complex subunit SPT16 [Verticillium albo-atrum VaMs.102]
  misc_feature: Useful for introducing or modulating the production of volatile compounds
MAEIKIDAKLFHERISQFVSAWKNDKRASDTGVFAAVSSILVLTGKVDENAAEFHKNNAMHFWLLGYEFPTTLMLFTTEKLYVITTAKKAKHLEALTKGKFPIEILVRGKDAAANEKQLVTITETINAAGKKIGVLTKDTSKGPFIDEWKKVYGEKCSDAEEVDISAALSSAAFSIKDETELRSMRTASKACVALMNPYFLDQMSDILDQERKVKHSALASKVDGKLDDEKWWKTVELPNKQKLPSDFDPASLDWYLGPAVQSGGKYDLKLIAEPTNDNLHAGVIIAGMGLRYRSYSSAIARTFLVDPNKTQENVYRVLYAAHNLALKEIRDGVTAKDVYNKALGLIKAKKPELEKHFVKNIGWGIGIESKDTTLILNAKNSRTLKDGMTLCITTGFNDVENPQPQDKLSKTYSLVITDTIRVTTSEPVVFTGDAPSDLDASSFFFKDDEEMQPTPKKEKKDARVGAVATKNITNTRLRSERTTQVDEDAEKRRREHQKELAQKKQKEGMVRFAESTNDQNGTEVKKFKKFESYKRDNQFPTRVKNLEILVDVKSHTVVLPVMGRPVPFHIQTIKNASKNVEGEWSYLRINFLSPGQGVGRKDDQPFEDASAHFVRSLTFRSLDGDRYDEIATQIANMKKEATKKEQEKKDMEDVVEQEKLVEIRNRRPPVMDNVFIRPAMEGKRVPGKVEIHQNGIRYQSPLNSTQRVDVLFSNIRHLFFQPCAHELIVVIHIHLKDPIIVGNKKKTKDVQFYREATDIQFDETGNRKRKYRYGDEDEFEAEQEERRRRAELDRLFKNFADKIADAGKNEGVEVDMPLRELGFHGVPFRSNVYIQPTTDCLIQVTEPPFMVITLDDIEVAHLERVQFGLKNFDLVFVFKDFTRTPFHVNTIPVESLEDVKEWLDSSDIAFSEGPLNLNWPTIMKTVTADTHQFFVDGGWSFLANDSDDEGSEEEEEESNFEVSDGELEDASESSEDDSDFDSNASDEASEEGSEEEEGEDWDELEKKAKRKDRESGLEEEDNRKKRRR

SEQ ID NO: 25865 - DNA, 3915 bp, Muscodor strobelii
  misc_feature: SGI EST ID NO. CUFF.61423.1
  misc_feature: Variant of the nucleotide sequence at SEQ ID NO 25863
ggccggtccataccatccaacaagttagccacctgtagtgtagcggcacctatcaccagcaactacgggcagcagaggtacggataaaagaggtacctcctaccagttctgtcgcgcagccttgtcacctcctgcctggcagagctcgcgtcaccttacataactcgaccttgtaaaatttggggggccatcttgacccatcccgtctccaactcgcaactcgggccctccattccttcctcgcaacaacctctcgccctcctccaaccaccatcgcgatcagcgacgtctgccatcttcctcatcgcgagtcgctcgtcaagatggcagagatcaagatcgacgccaagctcttccacgagcgcatctcgcagttcgtgagcgcctggaagaacgacaagcgcgcctccgacactggcgtctttgccgccgtctcctccatcctcgtcctcaccggcaaggtcgacgagaacgccgccgagttccacaagaacaatgccatgcacttctggctgctaggctacgagttccctaccaccttgatgctcttcaccaccgagaagctctacgtgattaccaccgccaagaagggtacgccccccacaatcccccaacaatctcccacgatccaccgcattgccatcacgcgacgaccgatcgactgactggctgcctgaacatatagctaagcacttggaggcactcaccaagggcaaattccccatcgagattctcgtccgaggcaaagacgcagcagccaatgagaaacagctcgttaccattacagagaccatcaatgccgccggcaaaaagatcggcgtcctcaccaaagacacgtctaagggacccttcatcgacgagtggaagaaagtctacggcgaaaagtgcagcgatgccgaagaagtcgacatctccgctgctctctccagcgccgccttctccatcaaggacgagaccgaactgcgatccatgcgaaccgcctccaaggcctgcgtcgccctcatgaacccgtacttccttgaccagatgtcggacatcttggaccaagagaggaaggtgaaacatagcgccctcgcatccaaagtagacgggaaactcgacgacgagaaatggtggaagacggtcgagctgcctaacaagcagaagctgccctcggacttcgaccctgcttcgctggactggtatctgggccccgccgtccagagcggaggcaaatacgacctcaaactcatcgccgagccgaccaacgataatctgcatgcaggtgtgatcattgccggtatggggctgcgatatagatcatacagctccgcaatcgctcgcactttcctggtcgaccccaacaagacgcaggagaacgtctacagagtactctacgctgcacacaacttggctttgaaggagatccgcgatggcgttactgccaaggatgtctacaacaaagctctcggtctcatcaaggctaagaaacccgaattagagaaacactttgtcaagaatattggttggggaatcggcattgaaagcaaggatactactcttatcctgaatgccaagaactcgcgaaccttgaaggacggcatgacgctctgtatcaccaccggcttcaacgacgttgagaacccccagccacaggacaaactcagcaagacatactccctagtcattacagacacgatccgagtcactacatcagagcctgtggttttcactggcgatgctccgtcagacctcgacgcctcttcgttctttttcaaggacgacgaggagatgcaacccacgccaaagaaggagaagaaggacgctcgagttggtgctgttgctaccaaaaacatcacgaatactcgtctacgttccgaacggacgacacaggtcgacgaagacgccgaaaagaggcgtcgtgaacatcagaaagagcttgcccagaagaagcagaaagagggcatggtcagattcgcagagtcgacaaatgatcaaaacggaaccgaggtcaagaagttcaagaagttcgaatcctacaagagagataaccaatttcctacaagagtcaagaatctagagattctggtagacgtcaagagccataccgttgtgctccctgtcatgggtcgtcccgtgccattccatatccagaccatcaaaaacgcaagtaaaaacgtcgaaggcgagtggtcttacctacgaatcaactttctatcaccgggtcagggagtcggtcgaaaggatgatcagccattcgaggatgcgtctgcgcatttcgttagaagcttgacgttccgttctctggatggtgatcgctatgacgagatagcgacccagattgccaacatgaagaaggaagcaaccaagaaggagcaagagaagaaggatatggaagatgtcgtggagcaggagaagctggtagagattcgcaaccgacgaccaccggtgatggataatgtcttcatccgtcctgccatggaaggcaagcgcgttcctggcaaagttgagatccaccagaatggtattagataccagtcgcctctgaatagtacccagagagtcgacgtgttgttctcaaatatccgtcatcttttctttcagccctgtgcgcatgagcttattgtggtcatccacatacacctgaaagatccgatcattgtcggtaacaaaaagaagaccaaggatgttcagttctaccgagaagctacagacatacagttcgacgaaactggaaataggaaacgcaaataccgctacggcgacgaggacgagtttgaggctgagcaggaagagcgacgacgtcgtgcggagctggaccgtctgttcaagaacttcgccgacaagatcgccgatgctggcaagaatgaaggcgttgaggtggacatgcccctacgagaactcggattccacggtgttcctttccgaagcaacgtctacatccagcccaccacggattgtctcattcaagtcacggagcctcctttcatggttatcacgcttgatgacattgaggttgctcacttggaacgtgtgcaatttggcctgaagaactttgatctcgtcttcgtcttcaaagattttacgcgcacacctttccacgtcaacacgatacccgtcgagtcactcgaagacgtcaaggagtggctagattcatcagatatcgccttcagtgagggaccactcaatctgaactggcctaccatcatgaagacggtgacagcagatactcaccagttcttcgtagatggcggttggtcgttcctggctaatgacagcgatgatgagggttctgaggaagaggaggaggagtccaactttgaggtctccgatggtgagctcgaagacgcaagtgaatccagcgaagacgattcggacttcgatagtaacgcgtccgatgaggcttccgaagaaggatccgaagaggaagagggcgaggattgggatgagctcgagaagaaggccaagagaaaggacagagagagcgggctcgaggaagaggataaccgcaagaagagaagacgctagacgagtcgtcttcacgaaggaggatgcatgtctttccatgggcgaagagcgagtttgtggcatcgttgctacctggtctgttggattgcttgcgctcaggtggctgtgcgattgctatgtttgtttagtataatggtagggagagagaaaaacataaagggatggggtagggtagggcagggtttcagttttaggtatgcgatcatttgagagaataggttgcgccctgccttcgtgtagcaatattatgaatggacaaaatgatggattcgtcgcgaagtgaagtacctaagatgcacgtaaggcgggatgcaaaatagatggtgtcccaaaacaaccacattacacctaattgaccatatttattgctatttaccacctaaatacacgattctggtacaataatcg

SEQ ID NO: 25866 - DNA, 720 bp, Muscodor strobelii
  misc_feature: SGI cDNA ID NO. 568832
  misc_feature: Reduced expression when VOC is produced
  misc_feature: Encodes the peptide sequence at SEQ ID NO 25867
atggctcgcacaggctttttccaccatattgggacgtttttcctattcgccgccacaatcctactcatcatcaccgatatcagcgcacccgtcgtatcctccatctctctcctgcgcatcgagattggcacgaccaaagatcaggaccttaccgaccaaggaaactttcctagcataacattcggaacctttggttactgtttgaaacaagccaatgatggtgattccgactgcagcccctcgatggtcggttacgacccgttgaaggttgtcagccaaaacattcagggcatcgacttcagcgaggctggccacgacaccgctaaggccctcaccaaggtcatgatcctgcatcccatcgccaccggtttcacattcatctgcttcctcctgagcgccggtgctggatttctcggctccttcaccgcggccatcggctcattcgtgaccttcatcatcgtcgcggttgtagttatcacagacttcgtcggcttccagatcgtccaccacgacgtcaacagggctgatacgagggtaaatgcccagtacggacctgccatctggaccacgctcgttgctggaatcctctgcctcttcgccaccatcatcctgctgtttacttgctgcagctctcgcctccaccgccagcgcgagactagataccgcgacgacaagatcgctactagcacatctcctcccagacgccgccgctggttctaa

SEQ ID NO: 25867 - protein, 239 aa, Muscodor strobelii
  misc_feature: SGI Peptide ID NO. 568832
  misc_feature (27)..(202): Pfam Id: PF08739 Pfam Desc: pH-response regulator, PalI / Rim9
  misc_feature (1)..(239): NCBI GI: 85099060 Blast Desc: NCU01357 [Neurospora crassa OR74A] gi|11544689|emb|CAB88649.2| related to palI protein [Neurospora crassa] gi|28922227|gb|EAA31473.1| [Neurospora crassa OR74A]
  misc_feature (1)..(239): NCBI GI: 116180018 Blast Desc: CHGG_00637 [Chaetomium globosum CBS 148.51] gi|88184934|gb|EAQ92402.1| CHGG_00637 [Chaetomium globosum CBS 148.51]
  misc_feature (1)..(238): NCBI GI: 156044704 Blast Desc: SS1G_10456 [Sclerotinia sclerotiorum 1980] gi|154694844|gb|EDN94582.1| SS1G_10456 [Sclerotinia sclerotiorum 1980]
  misc_feature (1)..(239): NCBI GI: 171691915 Blast Desc: protein product [Podospora anserina] gi|170945906|emb|CAP72707.1| protein product [Podospora anserina]
  misc_feature (4)..(238): NCBI GI: 154301851 Blast Desc: BC1G_10077 [Botryotinia fuckeliana B05.10] gi|150855739|gb|EDN30931.1| BC1G_10077 [Botryotinia fuckeliana B05.10]
  misc_feature (6)..(234): NCBI GI: 46137269 Blast Desc: FG10150.1 [Gibberella zeae PH-1]
  misc_feature (9)..(239): NCBI GI: 58270614 Blast Desc: [Cryptococcus neoformans var. neoformans JEC21] gi|134118104|ref|XP_772433.1| CNBL2990 [Cryptococcus neoformans var. neoformans B-3501A] gi|50255046|gb|EAL17786.1| CNBL2990 var.
  misc_feature (8)..(224): NCBI GI: 39971417 Blast Desc: [Magnaporthe grisea 70-15] gi|145019485|gb|EDK03713.1| [Magnaporthe grisea 70-15]
  misc_feature (1)..(129): NCBI GI: 261351883 Blast Desc: conserved [Verticillium albo-atrum VaMs.102]
  misc_feature (11)..(236): NCBI GI: 170097181 Blast Desc: [Laccaria bicolor S238N-H82] gi|164645213|gb|EDR09461.1| [Laccaria bicolor S238N-H82]
  misc_feature: Useful for introducing or modulating the production of volatile compounds
MARTGFFHHIGTFFLFAATILLIITDISAPVVSSISLLRIEIGTTKDQDLTDQGNFPSITFGTFGYCLKQANDGDSDCSPSMVGYDPLKVVSQNIQGIDFSEAGHDTAKALTKVMILHPIATGFTFICFLLSAGAGFLGSFTAAIGSFVTFIIVAVVVITDFVGFQIVHHDVNRADTRVNAQYGPAIWTTLVAGILCLFATIILLFTCCSSRLHRQRETRYRDDKIATSTSPPRRRRWF

SEQ ID NO: 25868 - DNA, 1437 bp, Muscodor strobelii
  misc_feature: SGI EST ID NO. CUFF.61084.0
  misc_feature: Variant of the nucleotide sequence at SEQ ID NO 25866
tggggtaagtatgctagaattggctaattatacaatagcatgaaacatacatggcaccctttccacatataatgctatcgtgcctcccgcccttcttgggcttgccttttgtttctattatctctgtgtagcacgttccgtccacgatctctgtcggtcagtctcatcgcttgtgaggattcatccctccatcgagtcgcttgtactgttgtagccgtcgtaaacttatataatcaccaccacctataccctatagcaagtatcgcttgacagtcaagtcatcaattatacacaatggctcgcacaggctttttccaccatattgggacgtttttcctattcgccgccacaatcctactcatcatcaccgatatcagcgcacccgtcgtatcctccatctctctcctgcgcatcgagattggcacgaccaaagatcaggaccttaccgaccaaggaaactttcctagcataacattcggaacctttggttactgtttgaaacaagccaatgatggtgattccgactgcagcccctcgatggtcggttacgacccgttgaaggttgtcagccaaaacattcagggcatcgacttcagcgaggctggccacgacaccgctaaggccctcaccaaggtcatgatcctgcatcccatcgccaccggtttcacattcatctgcttcctcctgagcgccggtgctggatttctcggctccttcaccgcggccatcggctcattcgtgaccttcatcatcgtcgcggttgtagttatcacagacttcgtcggcttccagatcgtccaccacgacgtcaacagggctgatacgagggtaaatgcccagtacggacctgccatctggaccacgctcgttgctggaatcctctgcctcttcgccaccatcatcctgctgtttacttgctgcagctctcgcctccaccgccagcgcgagactagataccgcgacgacaagatcgctactagcacatctcctcccagacgccgccgctggttctaaacgcgttgcagtcgacgcttaatacttggtctttaagtcgactatacgatgccttaccgtatcgtatgctgactgcgactctataccataatgactaaatgaaaaccgctatgctctctatcaggagttacgggctaagatgattacgatggaaattaatgtggttgggttttcctgcacgttgcgaaatcgaaatttgtatatcagaagatgagattttacgactcctatgataccaataccttatatacctatactattaccataccagcacctatactctataaactctgtctatagaatcctataaaaacattctcaaatccaaaagtcccgttttactcgtcgcaatttgtgattacatattcgacagtaccagtgatgatgaaatacaagacttataccaatttagctctgtctcgc

SEQ ID NO: 25869 - DNA, 1005 bp, Muscodor strobelii
  misc_feature: SGI cDNA ID NO. 568833
  misc_feature: Encodes the peptide sequence at SEQ ID NO 25870
atgtcgctattatctcaattaaagactttcagccttggtcctcggtctctgtttgtgaaatgtgtgcctgcaccaaagtccttctaccagcggcgggcggtgcttgccgctctccagaagggctccaaagaaaccatcgaggtcttcaagaagctgcaggacgactcatcattcattgccgtcaccacgagcccagacacagctacagaactcatcaaaagctcgcctctcaagcaaattgtcatggcccaaaactcgaccgatagcgaatcttccatccaagcagcctggggcgctgcatatagcaacagtggtcccattgcgacccccgtgaacccgctgccggccgattctgttaccaaagagacctctacgtccatcgaactaggtctctcgcattggaattttactttacacattttctccgcgaacaaggactacaaccataacgacgaaatcaagaagaatgttcttcacggcccatggcccaacggtggcaccgacacatacatacaagccgctctccggagggcattgccctcatttgtcttggagcctgcgttgcgggattgggagacaggagaccagctcagtaatgaggcagagaaattcactggtcgcgaaggcgctacacatttattcctgggcgcgaaacgagattccgcacagacagctttcgtcagagaccgcatgcgcaacgaggcagctgagaagaatacccctaagattatgagaagcttagtcgaattcgccgagcattgccgcgcgaataagactgaacagccacatgaggctgatgatgcttctttcaacgaagagttgaaagaagcaggatcggtccaatttcgccgtgtgggtgcgcccccgagaaataataaaaccgaggatgaaaataggccgacgattctaaatcggcgcaaggcaaacaaaaagctgaacaagcccctcgacgacgagaagaaacttcttgataacgatacatttcaagcgatgatgcgggaatga

SEQ ID NO: 25870 - protein, 334 aa, Muscodor strobelii
  misc_feature: SGI Peptide ID NO. 568833
  misc_feature (12)..(253): NCBI GI: 261351882 Blast Desc: conserved [Verticillium albo-atrum VaMs.102]
  misc_feature (4)..(231): NCBI GI: 11283395 Blast Desc: conserved [Verticillium albo-atrum VaMs.102]
  misc_feature (4)..(203): NCBI GI: 164426224 Blast Desc: NCU01026 [Neurospora crassa OR74A] gi|16415973|emb|CAB88512.3| [Neurospora crassa] gi|157071249|gb|EAA32402.2| [Neurospora crassa OR74A]
  misc_feature (15)..(201): NCBI GI: 145612297 Blast Desc: [Magnaporthe grisea 70-15] gi|145019484|gb|EDK03712.1| [Magnaporthe grisea 70-15]
  misc_feature (15)..(84): NCBI GI: 116180020 Blast Desc: [Chaetomium globosum CBS 148.51] gi|88184935|gb|EAQ92403.1| [Chaetomium globosum CBS 148.51]
MSLLSQLKTFSLGPRSLFVKCVPAPKSFYQRRAVLAALQKGSKETIEVFKKLQDDSSFIAVTTSPDTATELIKSSPLKQIVMAQNSTDSESSIQAAWGAAYSNSGPIATPVNPLPADSVTKETSTSIELGLSHWNFTLHIFSANKDYNHNDEIKKNVLHGPWPNGGTDTYIQAALRRALPSFVLEPALRDWETGDQLSNEAEKFTGREGATHLFLGAKRDSAQTAFVRDRMRNEAAEKNTPKIMRSLVEFAEHCRANKTEQPHEADDASFNEELKEAGSVQFRRVGAPPRNNKTEDENRPTILNRRKANKKLNKPLDDEKKLLDNDTFQAMMRE

SEQ ID NO: 25871 - DNA, 978 bp, Muscodor strobelii
  misc_feature: SGI cDNA ID NO. 568834
  misc_feature: Elevated expression when VOC is produced
  misc_feature: Encodes the peptide sequence at SEQ ID NO 25872
atgccagacacgccacccgagtccgaaggcgacctgcctccgcacccgcacgacgtcggcaccaatatagacattctcgtgcacagactgaacagaaaaccactgctgcacgactcgttgcgctggcgatttcttgatgcagaacaagggccagtcgacctagcgcccgaaccaatcgcaacacatgcagaaacgccagtgctaccaacccacccgccagattatacgcccgcattatcgccaataccagagccggcaaatgcatcttttccatcgccttccattcaaccttcaataccaataccattaacaccttcgctatacccttctcccccgttgcaacatgaacagatagtaccttcacacttaccacacgcaataacgccacagtctcaacaccagccatgtcacactcctcctcctcaactacccctccatccgcctgtagagaggacggctaccaaatctcccgaagtcaaacgattgcggcgcccgactgaatcgcgcctccacaagagcgcttctaatcttcgcatgctggatctcatgtctggcatggttgagaacggcgtccaatgcaaagtgcagacctcaacaccaccatcacccacaagaacgtgctccacgagctccgttcttgctctgcccgtctctatggctttgatcgaaccgcaagaccccaccgacccggaacaactgccgacgcgaatggatcttgaggtcgatctgggcttcagcgagcaagatgaagaaaccatgttaagcgaaacattagcactgcgacatgccagtaccccagccggtataaggaagatgggatttctacggtaccgctcctctaccgaggcggctcttcagtgcaagaatatgaagaagagcgtgcctcgcatgcgaaggaggactaggacgaacccaccttccacagccgcctcctccacagtcgatgggccgacatcgaccacaccaatgatggtgtaa

SEQ ID NO: 25872 - protein, 325 aa, Muscodor strobelii
  misc_feature: SGI Peptide ID NO. 568834
  misc_feature (158)..(321): NCBI GI: 116180024 Blast Desc: CHGG_00640 [Chaetomium globosum CBS 148.51] gi|88184937|gb|EAQ92405.1| CHGG_00640 [Chaetomium globosum CBS 148.51]
  misc_feature (125)..(318): NCBI GI: 171691907 Blast Desc: protein product [Podospora anserina] gi|170945902|emb|CAP72703.1| protein product [Podospora anserina]
  misc_feature (64)..(300): NCBI GI: 154301871 Blast Desc: [Botryotinia fuckeliana B05.10] gi|150855749|gb|EDN30941.1| [Botryotinia fuckeliana B05.10]
  misc_feature: Useful for introducing or modulating the production of volatile compounds
MPDTPPESEGDLPPHPHDVGTNIDILVHRLNRKPLLHDSLRWRFLDAEQGPVDLAPEPIATHAETPVLPTHPPDYTPALSPIPEPANASFPSPSIQPSIPIPLTPSLYPSPPLQHEQIVPSHLPHAITPQSQHQPCHTPPPQLPLHPPVERTATKSPEVKRLRRPTESRLHKSASNLRMLDLMSGMVENGVQCKVQTSTPPSPTRTCSTSSVLALPVSMALIEPQDPTDPEQLPTRMDLEVDLGFSEQDEETMLSETLALRHASTPAGIRKMGFLRYRSSTEAALQCKNMKKSVPRMRRRTRTNPPSTAASSTVDGPTSTTPMMV

SEQ ID NO: 25873 - DNA, 2419 bp, Muscodor strobelii
  misc_feature: SGI EST ID NO. CUFF.61065.0
  misc_feature: Variant of the nucleotide sequence at SEQ ID NO 25871
gcgcaatacacttgggggcctgttccaccgaaagccaagtatctggatctgcgatgggaaggtaacggaggatttctgtcgctgttactcaaacggctcaggcgatccatcgtcaaacatatcccgtgtccatgattcgcagctcggcagacatggtggtgatctgttccagtacggtttgcacacagtctgcttcactgcttaccagttagtcgccaatctgccatcagcacccaaccatccggccggaatagtccttacggactactacgcctgaagaggccaagcgcaagactcgcgtgctcagctgggctgccggctgctgtcaagcccgtcgtggcctgtcgtagcctacagtacttctgtatgtgcgagggagcctcgtacagcggctgccgcatgtcgcatggcgtctcaccgtgcgcagaaccaccagtggtgccagcggccaggacacagggccgatcagggtgcagaagggtgcagatggagtggagagcgtgtgaaccactgggtcgactgacttctgccaagcgtgcatcgagttcttggcttctatactaaatcccagcgaccccggccttggaaagggatggcctattccagccgaccttctcgtcctgtctctgcccgtcttgatgctgcgtgctgccacttgtcgtcgcctttccatgacctgtcctttatgacatttcttttggccaaagctgcttggggagctctcctctcgctgcgagtagggatcggcctcgatgcataatggccctcgacgatgatcctgacctcggtgtcaatcactccctccagcgctcgcgccgccgcgacaccctcaggtgctcacggtcggggccagccatgccagacacgccacccgagtccgaaggcgacctgcctccgcacccgcacgacgtcggcaccaatatagacattctcgtgcacagactgaacagaaaaccactgctgcacgactcgttgcgctggcgatttcttgatgcagaacaagggccagtcgacctagcgcccgaaccaatcgcaacacatgcagaaacgccagtgctaccaacccacccgccagattatacgcccgcattatcgccaataccagagccggcaaatgcatcttttccatcgccttccattcaaccttcaataccaataccattaacaccttcgctatacccttctcccccgttgcaacatgaacagatagtaccttcacacttaccacacgcaataacgccacagtctcaacaccagccatgtcacactcctcctcctcaactacccctccatccgcctgtagagaggacggctaccaaatctcccgaagtcaaacgattgcggcgcccgactgaatcgcgcctccacaagagcgcttctaatcttcgcatgctggatctcatgtctggcatggttgagaacggcgtccaatgcaaagtgcagacctcaacaccaccatcacccacaagaacgtgctccacgagctccgttcttgctctgcccgtctctatggctttgatcgaaccgcaagaccccaccgacccggaacaactgccgacgcgaatggatcttgaggtcgatctgggcttcagcgagcaagatgaagaaaccatgttaagcgaaacattagcactgcgacatgccagtaccccagccggtataaggaagatgggatttctacggtaccgctcctctaccgaggcggctcttcagtgcaagaatatgaagaagagcgtgcctcgcatgcgaaggaggactaggacgaacccaccttccacagccgcctcctccacagtcgatgggccgacatcgaccacaccaatgatggtgtaattcttctaattattctacgacgatgcacttatgatgattttctttcttctttgtttacattggttaattattggacatatacccagggcatgatcggataggtgcgcaacggttctgagcattgcatctcagctggcgagctggttatggattatggattatggtagctcagatagattatgcatggtacttgggcgttggcagcatttgctattgatatcccggcgaggatctagggcttcaattgagtcaggcccaatgagcgaagggcgtgatttaccctagaatgccgtggactagcatgatattacgagagaagatgtctcgagacctacgacgaaaataatctgatccgatgatggtcttttaggggtggtagaagaacggaagagggtattggaacctaagcaacagggctatacgaacgaccagggcttggttgatctgggaagcgcaagagaagcccttgccagcggagccctagatcgcgtttgagctagctcaaagcatcatcgatcatgcaattataataacaaagcatttacctctcattccctattgttttcggaagtcagacttacccaga

SEQ ID NO: 25874 - DNA, 1608 bp, Muscodor strobelii
  misc_feature: SGI cDNA ID NO. 568835
  misc_feature: Encodes the peptide sequence at SEQ ID NO 25875
atggccttcacggcggtacattatccaatggacaaagaccaggttcaactcccggtgtggggagacaatgatgagcttgctagctcatcagataacttctttgaccaattcgttacctttgatgctggagatggatcagccttcaatggcgaggtcatggaagatccgcccagtccatctatcctcctggactcacttcaagaggaattggccaactccacttccaatccgctcgtttcatcttcggttgagtcttacacagaaccagtacactctgccgatagtgattatctcaaattcgaaccgcacactggtctgcaagagactgcagatccggatttactcacagctctggtaggagatcctgtgctaagtaacggttcgatatcggactcggaacttttgcggttagaagggatatcattaaagtcgccacaaggaagtttgacagcaccttcaagtccaccagtcccagcccctatagcactgagtcctcggaagcacagccgattagtggaatcggtttatgctactattcgtcgtgccactcaccgctcaaaaccagtgaagcaagatccatatcaacctcttgatatgaccaatctcgacgcttttataggaggttcaaactcggggcttgagctcttcgattcgaatttggatgatttcgtagacccaggtacggtcatcaaacgagagcctgtggacagccatggattgccactgtcgccgccgctgacgggtaagatccctcaagaacgttcggcttcatcagggtttgttagcggccatctagatgaccccttttgcgatgacatgctggtacccgcgcccatcgtccttccgaagcgtcgccaagcaaatacagataccccactcaacactccaaacctcaataatgaaatgttctaccagaatcaagcgtcagtaacgaatctggattcgaatatgttggcgtataggccgtctcagaaatctttgaaacctacgagctcagccgaatggccaatggagggtatactcaccggttctaataagtacactgacgaccctactctgtggccatcgtcctcgcccacagcattcataggtgataacgagagcttgccgggcccagagtggtgggacgccgcattggctggcgagatgccacagccagatcactccagtgcaagtactagtgcgcggaacaacgcagtccacaacctctctattcataatcaacaggcagacttgccctacgaatactactcagaactatcaggctctggcttgatgatacacatgccgcaaccacggccaccgccagccacggacaccatcactttcttatgctcacccccaaagccggcatcatggacacacagaaaggagaccgcggccaagagccccatcatcaggggcccgacatcacggctcgatgacttcacctcgaaagctacatcacagcctcagccggggttacctgagggaagagtcaacttcgccgtcccctatggtgcgacacccacaccatcagtcgtcgcatcaggagcggcaccaacaacgcagttcctctatcacgatgcggaaacgacggtccttcagccggcgtactggcggcgctga

SEQ ID NO: 25875 - protein, 535 aa, Muscodor strobelii
  misc_feature: SGI Peptide ID NO. 568835
  misc_feature (30)..(433): NCBI GI: 46137301 Blast Desc: FG10166.1 [Gibberella zeae PH-1]
  misc_feature (101)..(434): NCBI GI: 154299363 Blast Desc: [Botryotinia fuckeliana B05.10] gi|150857432|gb|EDN32624.1| [Botryotinia fuckeliana B05.10]
  misc_feature (20)..(437): NCBI GI: 256732154 Blast Desc: NECHADRAFT_80474 [Nectria haematococca mpVI 77-13-4]
  misc_feature (127)..(444): NCBI GI: 39971409 Blast Desc: [Magnaporthe grisea 70-15] gi|145019481|gb|EDK03709.1| [Magnaporthe grisea 70-15]
  misc_feature (128)..(431): NCBI GI: 261351857 Blast Desc: VDBG_00392 [Verticillium albo-atrum VaMs.102]
  misc_feature (24)..(431): NCBI GI: 156044088 Blast Desc: [Sclerotinia sclerotiorum 1980] gi|154694536|gb|EDN94274.1| [Sclerotinia sclerotiorum 1980]
MAFTAVHYPMDKDQVQLPVWGDNDELASSSDNFFDQFVTFDAGDGSAFNGEVMEDPPSPSILLDSLQEELANSTSNPLVSSSVESYTEPVHSADSDYLKFEPHTGLQETADPDLLTALVGDPVLSNGSISDSELLRLEGISLKSPQGSLTAPSSPPVPAPIALSPRKHSRLVESVYATIRRATHRSKPVKQDPYQPLDMTNLDAFIGGSNSGLELFDSNLDDFVDPGTVIKREPVDSHGLPLSPPLTGKIPQERSASSGFVSGHLDDPFCDDMLVPAPIVLPKRRQANTDTPLNTPNLNNEMFYQNQASVTNLDSNMLAYRPSQKSLKPTSSAEWPMEGILTGSNKYTDDPTLWPSSSPTAFIGDNESLPGPEWWDAALAGEMPQPDHSSASTSARNNAVHNLSIHNQQADLPYEYYSELSGSGLMIHMPQPRPPPATDTITFLCSPPKPASWTHRKETAAKSPIIRGPTSRLDDFTSKATSQPQPGLPEGRVNFAVPYGATPTPSVVASGAAPTTQFLYHDAETTVLQPAYWRR

SEQ ID NO: 25876 - DNA, 987 bp, Muscodor strobelii
  misc_feature: SGI cDNA ID NO. 568836
  misc_feature: Encodes the peptide sequence at SEQ ID NO 25877
atggatcccaatgtggatccccacaatagaagagaaagaaggttatttcagagaggattagatgaaagtcttcggtacttccactccgtagctgtaaatggccgtggggtatggtggtcgcccatggctccaacgagataccctccttattctgacgaacttgctgcaaatcttaaccaaactaacacgtcaacatccgatgaggcccacaggttcgtccgtcgagttggggaactttatgtttggaagtacggccaacacgaaagcatgcagaaagaaatagccaactacaggttaatcgagcggaatcctggttgcatacccgtgcctaagctgtatggtatagcagagacgcccgatcgtgcacaactcatcctggagtacgtcccgggcgaaacagtgcaggattcgctccctcgactcagtctggctgagcgacaggatattgaacgtcagattcgtaatcattatagagcactccgaagaatccggcagactgggccgttactttacggcgtagacgaacgcatcgcgtaccaggacaataaatatgggcttaaagggccttacgaccacatagaggatttcattgatcaattcgtaaatgcgtcccagtacatcattgacgtacccggcattaactatgaagaattgaagagggaagtcgaaaacctcatgcgtgattttattgaggctgcaggcgagaccgatcctgttttttctcacggggatttgtctcttagcaacatcatccgtcgccctgatggttccctttgctttgtcgactgggagcacgcgggatggtatccgccgtggtatgattatcttgtaactggtcaggaatacgctctgcagatcgcggagccatatccagagctcgagaggattatagaaaggatgaagaactcaacagcccaaacagagcgtgctgcttccgttgcagcggctttcgtacagtgcttaaacgcattaagacgaaacaggtag

SEQ ID NO: 25877 - protein, 328 aa, Muscodor strobelii
  misc_feature: SGI Peptide ID NO. 568836
  misc_feature (52)..(299): Pfam Id: PF01636 Pfam Desc: Phosphotransferase enzyme family
  misc_feature (87)..(274): Pfam Id: PF01636 Pfam Desc: Phosphotransferase enzyme family
  misc_feature (213)..(267): Pfam Id: PF01633 Pfam Desc: Choline/ethanolamine kinase
  misc_feature (93)..(292): NCBI GI: 238839549 Blast Desc: conserved [Microsporum canis CBS 113480]
  misc_feature (107)..(294): NCBI GI: 171689746 Blast Desc: protein product [Podospora anserina] gi|170944835|emb|CAP70947.1| protein product [Podospora anserina]
  misc_feature (48)..(277): NCBI GI: 67901978 Blast Desc: AN7976.2 [Aspergillus nidulans FGSC A4] gi|40740440|gb|EAA59630.1| AN7976.2 [Aspergillus nidulans FGSC A4] gi|259480726|tpe|CBF73633.1| TPA: conserved [Aspergillus FGSC
  misc_feature (43)..(290): NCBI GI: 255955165 Blast Desc: Pc21g13160 [Penicillium chrysogenum Wisconsin 54-1255] gi|211590046|emb|CAP96213.1| Pc21g13160 [Penicillium chrysogenum Wisconsin 54-1255]
  misc_feature (105)..(275): NCBI GI: 46115308 Blast Desc: FG03496.1 [Gibberella zeae PH-1]
  misc_feature (67)..(275): NCBI GI: 225679673 Blast Desc: conserved [Paracoccidioides brasiliensis Pb03] gi|226291410|gb|EEH46838.1| conserved [Paracoccidioides brasiliensis Pb18]
  misc_feature (61)..(275): NCBI GI: 238489049 Blast Desc: conserved [Aspergillus flavus NRRL3357] gi|220698150|gb|EED54490.1| conserved [Aspergillus flavus NRRL3357]
  misc_feature (75)..(275): NCBI GI: 46114728 Blast Desc: FG03206.1 [Gibberella zeae PH-1]
  misc_feature (71)..(275): NCBI GI: 256733749 Blast Desc: NECHADRAFT_6430 [Nectria haematococca mpVI 77-13-4]
  misc_feature (107)..(281): NCBI GI: 170094408 Blast Desc: [Laccaria bicolor S238N-H82] gi|164646879|gb|EDR11124.1| [Laccaria bicolor S238N-H82]
MDPNVDPHNRRERRLFQRGLDESLRYFHSVAVNGRGVWWSPMAPTRYPPYSDELAANLNQTNTSTSDEAHRFVRRVGELYVWKYGQHESMQKEIANYRLIERNPGCIPVPKLYGIAETPDRAQLILEYVPGETVQDSLPRLSLAERQDIERQIRNHYRALRRIRQTGPLLYGVDERIAYQDNKYGLKGPYDHIEDFIDQFVNASQYIIDVPGINYEELKREVENLMRDFIEAAGETDPVFSHGDLSLSNIIRRPDGSLCFVDWEHAGWYPPWYDYLVTGQEYALQIAEPYPELERIIERMKNSTAQTERAASVAAAFVQCLNALRRNR

SEQ ID NO: 25878 - DNA, 420 bp, Muscodor strobelii
  misc_feature: SGI cDNA ID NO. 568837
  misc_feature: Encodes the peptide sequence at SEQ ID NO 25879
atgcaattcctcccgactcttatcgctctctttgccacctgcactagtgtatctgtatatgccttgccgcagaccgccagcgatgactccttcgagaccacatgccgcgactgggaactccaagggaatgcctggtttggggcatggtgtgggaatggacagggtcttgaaggtctctctgtcatcaatctaaaccactgtatcgctaatgatttcggcacccttgtcaaccgccgtgatgggggcttcgcggccagttgcaacaaactcagtgtttcaaaagacactactttcagtgctaattgcagaaatgctaatgggtggtcgaacgggcagatcaagctcagtgacgtgctcagcaataaggacggccaactatcttgcttcgattactccgggtgcaaagaactcggctgctga

SEQ ID NO: 25879 - protein, 139 aa, Muscodor strobelii
  misc_feature: SGI Peptide ID NO. 568837
  misc_feature (30)..(128): Pfam Id: PF08881 Pfam Desc: CVNH domain
  misc_feature (30)..(76): Pfam Id: PF08881 Pfam Desc: CVNH domain
  misc_feature (1)..(133): NCBI GI: 240106706 Blast Desc: CPC735_014910 [Coccidioides posadasii C735 delta SOWgp]
  misc_feature (31)..(130): NCBI GI: 145246098 Blast Desc: An12g02120 [Aspergillus niger] gi|134080010|emb|CAK48494.1| protein product [Aspergillus niger]
  misc_feature (31)..(130): NCBI GI: 169762458 Blast Desc: [Aspergillus oryzae RIB40] gi|238488237|ref|XP_002375356.1| glutamine-serine-proline rich protein, [Aspergillus flavus NRRL3357] protein product oryzae]
  misc_feature (23)..(133): NCBI GI: 145611548 Blast Desc: [Magnaporthe grisea 70-15] gi|145018814|gb|EDK03093.1| [Magnaporthe grisea 70-15]
MQFLPTLIALFATCTSVSVYALPQTASDDSFETTCRDWELQGNAWFGAWCGNGQGLEGLSVINLNHCIANDFGTLVNRRDGGFAASCNKLSVSKDTTFSANCRNANGWSNGQIKLSDVLSNKDGQLSCFDYSGCKELGC

SEQ ID NO: 25880 - DNA, 687 bp, Muscodor strobelii
  misc_feature: SGI EST ID NO. CUFF.61081.0
  misc_feature: Variant of the nucleotide sequence at SEQ ID NO 25878
ggtatatccagatgtgaatggggacacagtttggtaggaccaacaatcgacacggatgtctcgttgtacgaacttgctgtgactcccaaaatcgtcctatacgggtttcgcgttattcaaataggacacatgaccagattgtatctcacaatcgtcatatgcctccacctccaccacgcccccgaattccctagaaaatagaagaggcagctctcacttgcgccgggactggcaccatgactcttgctatcaggcttagccacgctttcatcatgcaattcctcccgactcttatcgctctctttgccacctgcactagtgtatctgtatatgccttgccgcagaccgccagcgatgactccttcgagaccacatgccgcgactgggaactccaagggaatgcctggtttggggcatggtgtgggaatggacagggtcttgaaggtctctctgtcatcaatctaaaccactgtatcgctaatgatttcggcacccttgtcaaccgccgtgatgggggcttcgcggccagttgcaacaaactcagtgtttcaaaagacactactttcagtgctaattgcagaaatgctaatgggtggtcgaacgggcagatcaagctcagtatgtcctgtctcttccttgcggtattctatcaaatgaacacatagatgtcggcgaaaacaacctgca

SEQ ID NO: 25881 - DNA, 2823 bp, Muscodor strobelii
  misc_feature: SGI cDNA ID NO. 568838
  misc_feature: Reduced expression when VOC is produced
  misc_feature: Encodes the peptide sequence at SEQ ID NO 25882
atgacggctaccaagctagatggcacggccatcgcgaaggccattcgcgagaagcttgccgctgaggtagttgaaaagcaaaagataaaccctaagtataaacctaatctcaagatcattcaagtcggtgatcgatctgactcctccacttacgttcgcatgaaattgaaagctgccactgaggccaacattgattgcgagcttgttcactaccccgagtctatccctgaggccgagctcttggcacatctgcacatcttgaacaatgatcctgatgtgactggtattttggtacagttgccactcccgaagcatatcaacgagtatgctgtgacatcggctgttgcggatgagaaagatgttgatggcttcggagccaccaacatcggcgagctagccaagaagggtggcaacccttacttcgtcccatgcacgcctaagggtgtaatggtgctgctcaaagaggctggtgttgatctaaaggggaaagatgccgttgttctcggccgaagcgatatcgtcggcagcccagtcagctatctgctcaaaaatgccgactgcaccgtcactgtctgccactccaagactaaggatcttgagcagaagctgaaaaatgcagatattgtcgttgctgcgattggccaacctaatttcgtgaaaggcgagtggttgaagccgggagctgtagttattgatgtcggaaccaactacatcgccgacccttcaaagaagtcaggccagcgtcttgttggcgatgtcgactatgacgccgcttcacaagtcgcttcgcacatcactcccgttcctggcggtgttggtcccatgaccgttgccatgctcctccagaatgttatcgatgctacttctctatacttcgataagcaaaggcagaggcacattaaccccttgcctctcaagctacaaacgccagtcccgtccgacatcgatgtctcaagagcacaagcaccaaagcatatctcgaaggtcgctgaagaaatcggcatttcgcaccaagagctggaaccatatggtgcatacaaggccaaggtcgatcttaccttgctaaaacgactagagcaccgtaagaacggaaaatacgtcgttgtcactggtattacacctacccctctgggagaaggtaaatcaaccacaacgatgggtctggcacaggctctgggcgctcatcttggccgtgtgacctttgccaacgttcgtcaacccagccaaggacctacatttggtatcaagggaggtgctgctggcggcggctacagtcaagtcatccctatggatgagttcaacatgcatcttactggcgatattcacgccatctcggctgcaaacaacctcctcgctgctgctattgagacccgcatcttccacgagaatactcaaaaagacggcgctctatacaagagactggtacctgcgaagaatggcaagagaaacttcgcacccatcatgttccgtcggctcaagaagcttggaatcgagaagacgaatccagacgaactcacggaggacgagattcaccgattcgcgcggctcgacattgatcccgacaccattacctggagacgtgttctggatgtgaacgatcgtcatctccgtggtattaccgttggcaccgcccccaccgagaaaggccaaaccagagagactggattcgatatctcggttgccagcgagtgtatggccattcttgcgatgagcacatccctttctgatatgcgcgagcggctgggacgcatggttgtcgccacatccagatctggtgatcccgttacatgtgacgaccttggagccggaggtgctctaaccgctctcatgaaggatgctatcaagcccaacttgatgcagagtctagagggcacccctgtcttcgtccacgccggtcctttcgctaatattagcattggaaacagctctatccttgccgataagatggcactgaagctcgctggtactgagtccgatgaggaccacgcctcaaaggctggtttcgtcgtcaccgaagctggtttcgacttcaccatgggtggtgagcggttcttcaacatcaagtgccgtgcttcgggtctcgtcccagacgtcgtggttgtagtcgctaccgtccgtgctcttaaagtccatggcggcggtcccccgatcgcccctggtgctcctctaaacgctgtttacaaggaagagaacgtcgaagtgctacgcaagggttgtgtcaatctcaagaagcacattgaaaacgcaaagcaatacggatgccctgttgttgttgccgtcaacaagttctctactgacacggatgccgaaatcgctgtcattcgcgaggaagcgatcgctgccggagcggaggacgctatattggctaaccactgggctgagggaggcaagggcgctattgaccttgccaacggtgtcattgctgcctccgataaacccaaagacttcaagcttctatacgcgaccgaaggcggctctgtccaggaacgcatggaggctatttgcaagaaaatgtacggtgctgccgccgttgaattcagcgaactggctcagaagaaggtcgacacatacaccaagcagggctttggcaacctgccaatttgcattgcaaagacgcaatactctttgtcccatgatcctgatctcaagggcgcgccgactggcttcacggtccccatccgcgacgtacggatggcggccggtgctggatatctctacgcacttgcagccgacattcagacaatccctggtttgcctactgctcctggctatctcaacgtcgatgtcgatgttgaaaccggcgagatccaggggctcttctaa

SEQ ID NO: 25882 - protein, 940 aa, Muscodor strobelii
  misc_feature: SGI Peptide ID NO. 568838
  misc_feature (311)..(940): Pfam Id: PF01268 Pfam Desc: Formate--tetrahydrofolate ligase
  misc_feature (4)..(122): Pfam Id: PF00763 Pfam Desc: Tetrahydrofolate dehydrogenase/cyclohydrolase, catalytic domain
  misc_feature (125)..(292): Pfam Id: PF02882 Pfam Desc: Tetrahydrofolate dehydrogenase/cyclohydrolase, NAD(P)-binding domain
  misc_feature (1)..(940): NCBI GI: 145610649 Blast Desc: MGG_01014 [Magnaporthe grisea 70-15] gi|145018028|gb|EDK02307.1| MGG_01014 [Magnaporthe grisea 70-15]
  misc_feature (1)..(940): NCBI GI: 154315758 Blast Desc: BC1G_04451 [Botryotinia fuckeliana B05.10] gi|150846847|gb|EDN22040.1| BC1G_04451 [Botryotinia fuckeliana B05.10]
  misc_feature (1)..(940): NCBI GI: 171677953 Blast Desc: protein product [Podospora anserina] gi|170937045|emb|CAP61704.1| protein product [Podospora anserina]
  misc_feature (3)..(940): NCBI GI: 85080482 Blast Desc: C-1-tetrahydrofolate synthase [Neurospora crassa OR74A] gi|28917618|gb|EAA27314.1| C-1-tetrahydrofolate synthase [Neurospora crassa OR74A]
  misc_feature (1)..(940): NCBI GI: 156059764 Blast Desc: SS1G_03895 [Sclerotinia sclerotiorum 1980] gi|154701681|gb|EDO01420.1| SS1G_03895 [Sclerotinia sclerotiorum 1980]
  misc_feature (1)..(940): NCBI GI: 116201581 Blast Desc: conserved [Chaetomium globosum CBS 148.51] gi|88177193|gb|EAQ84661.1| conserved [Chaetomium globosum CBS 148.51]
  misc_feature (1)..(937): NCBI GI: 46137503 Blast Desc: FG10267.1 [Gibberella zeae PH-1]
  misc_feature (1)..(940): NCBI GI: 226283056 Blast Desc: C-1-tetrahydrofolate synthase [Paracoccidioides brasiliensis Pb01]
  misc_feature (1)..(940): NCBI GI: 169597611 Blast Desc: SNOG_01593 [Phaeosphaeria nodorum SN15] gi|160707555|gb|EAT91242.2| SNOG_01593 [Phaeosphaeria nodorum SN15]
  misc_feature (1)..(940): NCBI GI: 119492272 Blast Desc: C1 tetrahydrofolate synthase, [Neosartorya fischeri NRRL 181] gi|119411735|gb|EAW21678.1| C1 tetrahydrofolate synthase, [Neosartorya fischeri NRRL 181]
  misc_feature (3)..(939): SWISSPROT Homolog: EC 3.5.4.9 Methenyltetrahydrofolate cyclohydrolase
  misc_feature (3)..(939): SWISSPROT Homolog: EC 1.5.1.5 Methylenetetrahydrofolate dehydrogenase (NADP(+))
  misc_feature (3)..(939): SWISSPROT Homolog: EC 6.3.4.3 Formate--tetrahydrofolate ligase
  misc_feature: Useful for introducing or modulating the production of volatile compounds
MTATKLDGTAIAKAIREKLAAEVVEKQKINPKYKPNLKIIQVGDRSDSSTYVRMKLKAATEANIDCELVHYPESIPEAELLAHLHILNNDPDVTGILVQLPLPKHINEYAVTSAVADEKDVDGFGATNIGELAKKGGNPYFVPCTPKGVMVLLKEAGVDLKGKDAVVLGRSDIVGSPVSYLLKNADCTVTVCHSKTKDLEQKLKNADIVVAAIGQPNFVKGEWLKPGAVVIDVGTNYIADPSKKSGQRLVGDVDYDAASQVASHITPVPGGVGPMTVAMLLQNVIDATSLYFDKQRQRHINPLPLKLQTPVPSDIDVSRAQAPKHISKVAEEIGISHQELEPYGAYKAKVDLTLLKRLEHRKNGKYVVVTGITPTPLGEGKSTTTMGLAQALGAHLGRVTFANVRQPSQGPTFGIKGGAAGGGYSQVIPMDEFNMHLTGDIHAISAANNLLAAAIETRIFHENTQKDGALYKRLVPAKNGKRNFAPIMFRRLKKLGIEKTNPDELTEDEIHRFARLDIDPDTITWRRVLDVNDRHLRGITVGTAPTEKGQTRETGFDISVASECMAILAMSTSLSDMRERLGRMVVATSRSGDPVTCDDLGAGGALTALMKDAIKPNLMQSLEGTPVFVHAGPFANISIGNSSILADKMALKLAGTESDEDHASKAGFVVTEAGFDFTMGGERFFNIKCRASGLVPDVVVVVATVRALKVHGGGPPIAPGAPLNAVYKEENVEVLRKGCVNLKKHIENAKQYGCPVVVAVNKFSTDTDAEIAVIREEAIAAGAEDAILANHWAEGGKGAIDLANGVIAASDKPKDFKLLYATEGGSVQERMEAICKKMYGAAAVEFSELAQKKVDTYTKQGFGNLPICIAKTQYSLSHDPDLKGAPTGFTVPIRDVRMAAGAGYLYALAADIQTIPGLPTAPGYLNVDVDVETGEIQGLF

SEQ ID NO: 25883 - DNA, 4419 bp, Muscodor strobelii
  misc_feature: SGI EST ID NO. CUFF.61136.1
  misc_feature: Variant of the nucleotide sequence at SEQ ID NO 25881
aaagtcaactattccggtgggcaagcggttcttctccttccggattatatatatgcggtgtaactctatgcagttgtaacttgacaacagtttgcgagaggacatccaaggccattaataactctgagcttaaaagcacaataatccctcgttgacttgccaagtgaaaagtctttagactcgttgcttcatgaagcctgcactctcagatattggcgatcctttggttatctttgattcatcgtggactctagcgtctctgccgttattgacgttgtaacttgttacctgtggaggaaagccagggtcactttcgtaacgctaactgcgatcccggccagcctcatcggccagatcaagaattatcgactcgcttgacgaacccggtcaaccgttggtcaattttcttttgttgactcatggacatttttgagacttcctgaaatctactacatctgatatttcagttatctgtgtcactctttacctttttaggctctgttcgaggcttgtgcacgaggcaacgctcgctcagcatcaatctcaaagaaagctccttgttcggacaagctttttgttttctactagccaaatctttggagtaatctgcaggtcgcgcaaacgcattgcgatactcgttacggcgagcaaactttttctcccagaacctcggagctccgcggactcatatgtttataagctctgtcattggatgcacgaaacaagagtttaggaattggtaacatcatactacctgtgcagtggttgcgacggaggtttgataggctgggatagctatggtccgatcaatgtctttgctccatggcttgccctgcactctgccgaagaggaatttccctcacgcccgaacaccaggccgaagtcgacagctagccacaggtataagtaatggggcgtcgggcctagtgcggcagcgttggacaaagcttgccgaccgttctactccagcactaagttctccctcggcgtctgctccgcactgcggcgctcaaaaaccctgcataccatcgtctagtgctttacacatccggtcacacgattactacgccgtccgcccaatctctactcgtacaattgcctccgcttcgctctcacctctggcattttcaagcagggcggcgactcaagtcagtcacttcacgaataattcccattcgtctttaagaggcttccggcccgttgctacctcacccctctatcctcaagcgtcttccagccggtctttctctacaaatccctcagccatgacggctaccaagctagatggcacggccatcgcgaaggccattcgcgagaagcttgccgctgaggtagttgaaaagcaaaagataaaccctaagtataaacctaatctcaagatcattcaagtcggtgatcgatctgactcctccacttacgttcgcatgaaattgaaagctgccactgaggccaacattgattgcgagcttgttcactaccccgagtctatccctgaggccgagctcttggcacatctgcacatcttgaacaatgatcctgatgtgactggtattttggtacagttgccactcccgaagcatatcaacgagtatgctgtgacatcggctgttgcggatgagaaagatgttgatggcttcggagccaccaacatcggcgagctagccaagaagggtggcaacccttacttcgtcccatgcacgcctaagggtgtaatggtgctgctcaaagaggctggtgttgatctaaaggggaaagatgccgttgttctcggccgaagcgatatcgtcggcagcccagtcagctatctgctcaaaaatgccgactgcaccgtcactgtctgccactccaagactaaggatcttgagcagaagctgaaaaatgcagatattgtcgttgctgcgattggccaacctaatttcgtgaaaggcgagtggttgaagccgggagctgtagttattgatgtcggaaccaactacatcgccgacccttcaaagaagtcaggccagcgtcttgttggcgatgtcgactatgacgccgcttcacaagtcgcttcgcacatcactcccgttcctggcggtgttggtcccatgaccgttgccatgctcctccagaatgttatcgatgctacttctctatacttcgataagcaaaggcagaggcacattaaccccttgcctctcaagctacaaacgccagtcccgtccgacatcgatgtctcaagagcacaagcaccaaagcatatctcgaaggtcgctgaagaaatcggcatttcgcaccaagagctggaaccatatggtgcatacaaggccaaggtcgatcttaccttgctaaaacgactagagcaccgtaagaacggaaaatacgtcgttgtcactggtattacacctacccctctgggagaaggtaaatcaaccacaacgatgggtctggcacaggctctgggcgctcatcttggccgtgtgacctttgccaacgttcgtcaacccagccaaggacctacatttggtatcaagggaggtgctgctggcggcggctacagtcaagtcatccctatggatgagttcaacatgcatcttactggcgatattcacgccatctcggctgcaaacaacctcctcgctgctgctattgagacccgcatcttccacgagaatactcaaaaagacggcgctctatacaagagactggtacctgcgaagaatggcaagagaaacttcgcacccatcatgttccgtcggctcaagaagcttggaatcgagaagacgaatccagacgaactcacggaggacgagattcaccgattcgcgcggctcgacattgatcccgacaccattacctggagacgtgttctggatgtgaacgatcgtcatctccgtggtattaccgttggcaccgcccccaccgagaaaggccaaaccagagagactggattcgatatctcggttgccagcgagtgtatggccattcttgcgatgagcacatccctttctgatatgcgcgagcggctgggacgcatggttgtcgccacatccagatctggtgatcccgttacatgtgacgaccttggagccggaggtgctctaaccgctctcatgaaggatgctatcaagcccaacttgatgcagagtctagagggcacccctgtcttcgtccacgccggtcctttcgctaatattagcattggaaacagctctatccttgccgataagatggcactgaagctcgctggtactgagtccgatgaggaccacgcctcaaaggctggtttcgtcgtcaccgaagctggtttcgacttcaccatgggtggtgagcggttcttcaacatcaagtgccgtgcttcgggtctcgtcccagacgtcgtggttgtagtcgctaccgtccgtgctcttaaagtccatggcggcggtcccccgatcgcccctggtgctcctctaaacgctgtttacaaggaagagaacgtcgaagtgctacgcaagggttgtgtcaatctcaagaagcacattgaaaacgcaaagcaatacggatgccctgttgttgttgccgtcaacaagttctctactgacacggatgccgaaatcgctgtcattcgcgaggaagcgatcgctgccggagcggaggacgctatattggctaaccactgggctgagggaggcaagggcgctattgaccttgccaacggtgtcattgctgcctccgataaacccaaagacttcaagcttctatacgcgaccgaaggcggctctgtccaggaacgcatggaggctatttgcaagaaaatgtacggtgctgccgccgttgaattcagcgaactggctcagaagaaggtcgacacatacaccaagcagggctttggcaacctgccaatttgcattgcaaagacgcaatactctttgtcccatgatcctgatctcaagggcgcgccgactggcttcacggtccccatccgcgacgtacggatggcggccggtgctggatatctctacgcacttgcagccgacattcagacaatccctggtttgcctactgctcctggctatctcaacgtcgatgtcgatgttgaaaccggcgagatccaggggctcttctaaattaatcatatgataaacgtaattgcataggtcggtgttccggatggggaaaggtcttagactctacatcatggcatagagagggcaaaggtcatgattgcataagcttcttctgattcaaccagctaagaagcaggagttcgattttttttcaacaagaggcatctttagatcaccacatgatcgaaaccggagagcggcgtaaaatgtgattcatataaagatggcatgaaaatatgatactttcaacgagactagaagagatatagtgatggattatatagagatccattcgaactacgaattgattgaatggaatttgcgattatca

SEQ ID NO: 25884 - DNA, 1023 bp, Muscodor strobelii
  misc_feature: SGI cDNA ID NO. 568839
  misc_feature: Reduced expression when VOC is produced
  misc_feature: Encodes the peptide sequence at SEQ ID NO 25885
atgagaccgattctactttcaggtcacgaacgtgccctgacccagatcaagttcaattccgacggcgatctcctcttctccgtatccaaagaccagcagatctgtgtctggtttgcccacaatggcgagcgtctcggaacgtacaagggccaccagggtgccatctggaccgtcgacgtcgacccgacctccaccatgatcgcctccggcagtgccgacaacaccatacgcctatgggagatcaagaccggccgcctcatcaagacctgggacttccccaccgccgtcaagcgcgtcgagttcagccccgacggaaagcacctcctgggtgtcaccgagaagcgtatgggccacctcggaaccatcgtcgtcgtccccatcgagctcgacgccaacgctgagcagagcgacgagcgcgagctcaccatcgtctgcgacgagagcaaggccaccgtcgccggctggagctacctgagcctctacatcatcgccgggcatgaggatggctccgtctcccaatacgatgcacagactggcgagctcctcgtcaacgtacccatccacgaactcaacatgcaggtcacagatttacaatggtcgcccgaccgcaccttcttcatcacagcctccaaggacaagaccgccaggttactggctgccaacaacctcgagctcctcaagacctatcccgccgacacacccctcaacagcgcatgcatcacgcccaataaggactacgtcatccttggaggtggccaggccgccatggatgtcacgaccaccgctgcccgacagggtaaattcgaggccagattttaccacatggtcttcgaggacgagattggccgtgttcgtggacacttcggacctctgaataccgtcgctgccgatccaacaggcaagagctatgcaagcggtggagaggacggatacgtgcgcattcaccacttcgacaagggatacttcgactttcagtacgaggtcgagcgcgaacgggagcgggagcgacagaacaggctatag

SEQ ID NO: 25885 - protein, 340 aa, Muscodor strobelii
  misc_feature: SGI Peptide ID NO. 568839
  misc_feature (42)..(80): Pfam Id: PF00400 Pfam Desc: WD domain, G-beta repeat
  misc_feature (6)..(38): Pfam Id: PF00400 Pfam Desc: WD domain, G-beta repeat
  misc_feature (278)..(316): Pfam Id: PF00400 Pfam Desc: WD domain, G-beta repeat
  misc_feature (1)..(340): NCBI GI: 85080477 Blast Desc: eukaryotic translation initiation factor 3 subunit 2 [Neurospora crassa OR74A] gi|74696159|sp|Q7RXH4.1|EIF3I_NEUCR RecName: Full=Eukaryotic translation initiation factor 3 subunit
  misc_feature (1)..(340): NCBI GI: 116201583 Blast Desc: conserved [Chaetomium globosum CBS 148.51] gi|121779300|sp|Q2GTM8.1|EIF3I_CHAGB RecName: Full=Eukaryotic translation initiation factor 3 subunit I; Short=eIF3i; AltName:
  misc_feature (1)..(337): NCBI GI: 46137505 Blast Desc: FG10268.1 [Gibberella zeae PH-1]
  misc_feature (1)..(337): NCBI GI: 256732045 Blast Desc: [Nectria haematococca mpVI 77-13-4]
  misc_feature (1)..(332): NCBI GI: 171677951 Blast Desc: protein product [Podospora anserina] gi|170937044|emb|CAP61703.1| protein product [Podospora anserina]
  misc_feature (1)..(332): NCBI GI: 261355754 Blast Desc: eukaryotic translation initiation factor 3 39 kDa subunit [Verticillium albo-atrum VaMs.102]
  misc_feature (1)..(338): NCBI GI: 39973681 Blast Desc: conserved [Magnaporthe grisea 70-15] gi|224488061|sp|A4RDD7.1|EIF3I_MAGGR RecName: Full=Eukaryotic translation initiation factor 3 subunit I; Short=eIF3i; AltName:
  misc_feature (1)..(335): NCBI GI: 154315760 Blast Desc: eukaryotic translation initiation factor 3 [Botryotinia fuckeliana B05.10] gi|229501175|sp|A6RUL1.1|EIF3I_BOTFB RecName: Full=Eukaryotic 3 3
  misc_feature (1)..(335): NCBI GI: 156059762 Blast Desc: eukaryotic translation initiation factor 3 [Sclerotinia sclerotiorum 1980] gi|229501199|sp|A7EF03.1|EIF3I_SCLS1 RecName: Full=Eukaryotic 3 3
  misc_feature (1)..(334): NCBI GI: 242823120 Blast Desc: eukaryotic translation initiation factor 3 subunit 2i, [Talaromyces stipitatus ATCC 10500] gi|218712948|gb|EED12373.1| eukaryotic translation initiation factor 3 subunit 2i, stipitatus
  misc_feature: Useful for introducing or modulating the production of volatile compounds
MRPILLSGHERALTQIKFNSDGDLLFSVSKDQQICVWFAHNGERLGTYKGHQGAIWTVDVDPTSTMIASGSADNTIRLWEIKTGRLIKTWDFPTAVKRVEFSPDGKHLLGVTEKRMGHLGTIVVVPIELDANAEQSDERELTIVCDESKATVAGWSYLSLYIIAGHEDGSVSQYDAQTGELLVNVPIHELNMQVTDLQWSPDRTFFITASKDKTARLLAANNLELLKTYPADTPLNSACITPNKDYVILGGGQAAMDVTTTAARQGKFEARFYHMVFEDEIGRVRGHFGPLNTVAADPTGKSYASGGEDGYVRIHHFDKGYFDFQYEVERERERERQNRL

SEQ ID NO: 25886 - DNA, 1688 bp, Muscodor strobelii
  misc_feature: SGI EST ID NO. CUFF.61342.0
  misc_feature: Variant of the nucleotide sequence at SEQ ID NO 25884
gcacatgtagccatgctgaggtacatggaaatgtccgcaaggttcagtgagtcaacgcctctccctcgctcttatcgtcacgtgctcgcacaaaccctttaaaatccaccaaccccacgattcctcgattgcgccgtgacgccttggtctcgagagaatatcgcaaatcaacaccgccatcatgagaccgattctactttcaggtcacgaacgtgccctgacccagatcaagtacgcctctttctccaaatccgctagatagctacatatttcttaccccgcgacgccaaattatcaccgcattaccatcaaattctcgaccctcagctctaacccttttgcgcgcgcacaggttcaattccgacggcgatctcctcttctccgtatccaaagaccagcagatctgtgtctggtttgcccacaatggcgagcgtctcggaacgtacaagggccaccagggtgccatctggaccgtcgacgtcgacccgacctccaccatgatcgcctccggcagtgccgacaacaccatacgcctatgggagatcaagaccggccgcctcatcaagacctgggacttccccaccgccgtcaagcgcgtcgagttcagccccgacggaaagcacctcctgggtgtcaccgagaagcgtatgggccacctcggaaccatcgtcgtcgtccccatcgagctcgacgccaacgctgagcagagcgacgagcgcgagctcaccatcgtctgcgacgagagcaaggccaccgtcgccggctggagctacctgagcctctacatcatcgccgggcatgaggatggctccgtctcccaatacgatgcacagactggcgagctcctcgtcaacgtacccatccacgaactcaacatgcaggtcacagatttacaatggtcgcccgaccgcaccttcttcatcacagcctccaaggacaagaccgccaggttactggctgccaacaacctcgagctcctcaagacctatcccgccgacacacccctcaacagcgcatgcatcacgcccaataaggactacgtcatccttggaggtggccaggccgccatggatgtcacgaccaccgctgcccgacagggtaaattcgaggccagattttaccacatggtcttcgaggacgagattggccgtgttcgtggacacttcggacctctgaataccgtcgctgccgatccaacaggcaagagctatgcaagcggtggagaggacggatacgtgcgcattcaccacttcgacaagggatacttcgactttcagtacgaggtcgagcgcgaacgggagcgggagcgacagaacaggctataggctggtccgggttcacgcgccactgtcggattctcgtcgaattgaaatcggtactggtggcttgcacggcgttctccttttcgcaacagcatcgcatttggaagggcctaggcgttgagggataagggttgatttctacggataaaagtgccctttgtaatgcagacagtagactaccaatgtgactggtaattatgatgtctcctaatacggcgtattatgtaagtgacgtctggtcggacgtctagtcaggcgtctagtcttccgcttatcatcggacagattttgccctaagtattctagagaaacagtgggctagacgtcaatgtagtccaccgacctactattggtatttgacaaacc

SEQ ID NO: 25887 - DNA, 2148 bp, Muscodor strobelii
  misc_feature: SGI cDNA ID NO. 568840
  misc_feature: Elevated expression when VOC is produced
  misc_feature: Encodes the peptide sequence at SEQ ID NO 25888
atgaggtcgcaaagcttagcagcagccgcattggctgtcctgccccaggtcatgggtattacacccgagctcatgctgtctgccaaccgctacagtgatgcgctgccgaatccctcaggagactttgcgatcttccaagtgtccaactacaccttcgagacgcaggagaaggtggcttggtggaacaagcttgacctgaagaccggagagatctcgctgtggactaccaatactgacatctccgaggtcgtcttcgttggcgacaagcccacgagtattatctacatcaatggcaccaatgaagaaggagacggcggtatctctctgtactcagccgatgctactgcgctcgaggatgctcagcttattgggtcgcttccggctccttacggcggtttgaaggccgtccagaccgaatctggagacatccacttcctcgtttacacgcaggcatatcccaatggcactgcttacaatgaggctttggccgagccggccaagagcagcggtcgtctttacaactcaatttatgtccgccactgggacacatggttgactcctcagaaaaacgccgtcttcggcggtgttctcaaggccagcgacggctcttactcgctgtctggtgatctcaccaactacgttaccggaatctgcaacgtgacctgtgccgagtcgccgtacgaccagagtgaccagagcgattacgacatctctcccgacggaagcggagtcatcttcctgactaaggacacaactcttcctcttgccaattacactgccgatgtcgtttactgggtctccttcgatggcacgtcaaaggatgtcgtcccgatcaacgcccgcggcagcaccaagtatagcgaggctcagggagctgttaccaatcctcgcttctctccagacggcaagaagatctcgtacctccagatgaacggcattgcctatgagtctgatcgcagcattgtctacgtcgctgatgccaatcctgatgattttaatgtcactcgtcttgctggcgactgggaccgtgctcccgatggccaagcctgggccaaggactccaagaccatctacgttgctgcccctgatctaggccgtgagcgtatcttccccgtccctttgactgctggcgactcttacgtccccaagaacatcactaacgagggtgtccccgctggtttctacgttctcgcggatggcaacattctcgtctcagactccaaaatctggtccagccgcgacatctacagcgtttcgcctgagggcgaggttgtgaagacctacttccaagccaataaggtagacccgggactgaagggtcttggtcctgaggatgtgtccgagttctactactcgactaatacctccgagatcgaccaacaagcttggatcatctatcccgagggcttcgattgtaacaagaagtatcccttggcattcatcagccacggtggtccccagggcgctcacttcaactcctggagcacgcgctggaacttcaagacctgggctgaccagggttacgtcgtcattgcacctaacccgactgcgtccagcggttggggccagaacctgacggacgccgtccagggacgttggggttcctacccttactgggatcttgtccacgcatggcaatacgtcaacagcactcttgactacgtcgataccgccaacggtgtcgaggcaggtgcttcattcggtggttacatgaccaactggatgcaaggccacgagatgggtcgctggttcaaggccctcgttacccacgatggctccacctctactctcaaccagtacgcttccgaagaactctggttcatgaaccacgatttcgccggcccattcaactccactggcttcgaggccagctcgccctacgctgagtggaaccctctcctctacacgcacaactgggctactccccacttcgtcgtgcacaacgagcttgattaccgcttgcctgtaagtgagggtatcttgctgttcaatatgctccaggtcaagggcgtgccatcccgcatgcttagcttccccgatgagaaccattgggttcttaaccaggagaacagcttagtctggcacaccgagatctttaagtggatcaactactactctggtatcagcaatgctacttcgccttactag

SEQ ID NO: 25888 - protein, 715 aa, Muscodor strobelii
  misc_feature: SGI Peptide ID NO. 568840
  misc_feature (494)..(709): Pfam Id: PF00326 Pfam Desc: Prolyl oligopeptidase family
  misc_feature (3)..(715): NCBI GI: 39973165 Blast Desc: MGG_07877 [Magnaporthe grisea 70-15] gi|145012683|gb|EDJ97337.1| MGG_07877 [Magnaporthe grisea 70-15]
  misc_feature (1)..(711): NCBI GI: 115443380 Blast Desc: dipeptidyl-peptidase 5 precursor [Aspergillus terreus NIH2624] gi|114188366|gb|EAU30066.1| dipeptidyl-peptidase 5 precursor [Aspergillus terreus NIH2624]
  misc_feature (22)..(711): NCBI GI: 119480747 Blast Desc: secreted dipeptidyl peptidase [Neosartorya fischeri NRRL 181] gi|119408556|gb|EAW18505.1| secreted dipeptidyl peptidase [Neosartorya fischeri NRRL 181]
  misc_feature (22)..(711): NCBI GI: 229485354 Blast Desc: DPP5_ASPFC RecName: Full=Dipeptidyl-peptidase 5; AltName: Full=Dipeptidyl-peptidase V; Short=DPP V; Short=DppV; Flags: Precursor gi|159129322|gb|EDP54436.1| secreted dipeptidyl
  misc_feature (22)..(711): NCBI GI: 71001112 Blast Desc: secreted dipeptidyl peptidase DppV [Aspergillus fumigatus Af293] gi|229485355|sp|P0C959.1|DPP5_ASPFU RecName: Full=Dipeptidyl-peptidase 5; AltName: Full=Dipeptidyl-peptidase
  misc_feature (22)..(711): NCBI GI: 2340046 Blast Desc: secreted dipeptidyl peptidase [Aspergillus fumigatus]
  misc_feature (22)..(711): NCBI GI: 94730375 Blast Desc: secreted dipeptidyl peptidase [Aspergillus fumigatus]
  misc_feature (22)..(711): NCBI GI: 238493647 Blast Desc: secreted dipeptidyl peptidase DppV [Aspergillus flavus NRRL3357] gi|220696554|gb|EED52896.1| secreted dipeptidyl peptidase DppV [Aspergillus flavus NRRL3357]
  misc_feature (22)..(711): NCBI GI: 5305698 Blast Desc: AF125190_1 alanyl dipeptidyl peptidase [Aspergillus oryzae]
  misc_feature (20)..(711): NCBI GI: 121698850 Blast Desc: secreted dipeptidyl peptidase [Aspergillus clavatus NRRL 1] gi|119395969|gb|EAW06401.1| secreted dipeptidyl peptidase [Aspergillus clavatus NRRL 1]
  misc_feature (287)..(698): SWISSPROT Homolog: EC 3.4.19.1 Acylaminoacyl-peptidase
  misc_feature: Useful for introducing or modulating the production of volatile compounds
MRSQSLAAAALAVLPQVMGITPELMLSANRYSDALPNPSGDFAIFQVSNYTFETQEKVAWWNKLDLKTGEISLWTTNTDISEVVFVGDKPTSIIYINGTNEEGDGGISLYSADATALEDAQLIGSLPAPYGGLKAVQTESGDIHFLVYTQAYPNGTAYNEALAEPAKSSGRLYNSIYVRHWDTWLTPQKNAVFGGVLKASDGSYSLSGDLTNYVTGICNVTCAESPYDQSDQSDYDISPDGSGVIFLTKDTTLPLANYTADVVYWVSFDGTSKDVVPINARGSTKYSEAQGAVTNPRFSPDGKKISYLQMNGIAYESDRSIVYVADANPDDFNVTRLAGDWDRAPDGQAWAKDSKTIYVAAPDLGRERIFPVPLTAGDSYVPKNITNEGVPAGFYVLADGNILVSDSKIWSSRDIYSVSPEGEVVKTYFQANKVDPGLKGLGPEDVSEFYYSTNTSEIDQQAWIIYPEGFDCNKKYPLAFISHGGPQGAHFNSWSTRWNFKTWADQGYVVIAPNPTASSGWGQNLTDAVQGRWGSYPYWDLVHAWQYVNSTLDYVDTANGVEAGASFGGYMTNWMQGHEMGRWFKALVTHDGSTSTLNQYASEELWFMNHDFAGPFNSTGFEASSPYAEWNPLLYTHNWATPHFVVHNELDYRLPVSEGILLFNMLQVKGVPSRMLSFPDENHWVLNQENSLVWHTEIFKWINYYSGISNATSPY

SEQ ID NO: 25889 - DNA, 2580 bp, Muscodor strobelii
  misc_feature: SGI EST ID NO. CUFF.61096.0
  misc_feature: Variant of the nucleotide sequence at SEQ ID NO 25887
cgaagtggtggaagggtggtgatcaccggatgaccggattttgcagtgtcctcttttgtgctcatgacctcgactattacctgtacgagcatgttccccccgcggcatgatcgaggcaggatcgcggaaattgcttggagcaaggctaggagcttcctatcgtagcttttcaaggcttgttgacgaaatctataaagtcccttgcttccccacggacgccgcactcttggctgtctctcttgtcctactccgtgggtgttgcatgacgtcctgggtgctctacactagtcaattgaagctgcacccttcataatgaggtcgcaaagcttagcagcagccgcattggctgtcctgccccaggtcatgggtattacacccgagctcatgctgtctgccaaccgctacagtgatgcgctgccgaatccctcaggagactttgcgatcttccaagtgtccaactacaccttcgagacgcaggagaaggtggcttggtggaacaagcttgacctgaagaccggagagatctcgctgtggactaccaatactgacatctccgaggtcgtcttcgttggcgacaagcccacgagtattatctacatcaatggcaccaatgaagaaggagacggcggtatctctctgtactcagccgatgctactgcgctcgaggatgctcagcttattgggtcgcttccggctccttacggcggtttgaaggccgtccagaccgaatctggagacatccacttcctcgtttacacgcaggcatatcccaatggcactgcttacaatgaggctttggccgagccggccaagagcagcggtcgtctttacaactcaatttatgtccgccactgggacacatggttgactcctcagaaaaacgccgtcttcggcggtgttctcaaggccagcgacggctcttactcgctgtctggtgatctcaccaactacgttaccggaatctgcaacgtgacctgtgccgagtcgccgtacgaccagagtgaccagagcgattacgacatctctcccgacggaagcggagtcatcttcctgactaaggacacaactcttcctcttgccaattacactgccgatgtcgtttactgggtctccttcgatggcacgtcaaaggatgtcgtcccgatcaacgcccgcggcagcaccaagtatagcgaggctcagggagctgttaccaatcctcgcttctctccagacggcaagaagatctcgtacctccagatgaacggcattgcctatgagtctgatcgcagcattgtctacgtcgctgatgccaatcctgatgattttaatgtcactcgtcttgctggcgactgggaccgtgctcccgatggccaagcctgggccaaggactccaagaccatctacgttgctgcccctgatctaggccgtgagcgtatcttccccgtccctttgactgctggcgactcttacgtccccaagaacatcactaacgagggtgtccccgctggtttctacgttctcgcggatggcaacattctcgtctcagactccaaaatctggtccagccgcgacatctacagcgtttcgcctgagggcgaggttgtgaagacctacttccaagccaataaggtagacccgggactgaagggtcttggtcctgaggatgtgtccgagttctactactcgactaatacctccgagatcgaccaacaagcttggatcatctatcccgagggcttcgattgtaacaagaagtatcccttggcattcatcagccacggtggtccccagggcgctcacttcaactcctggagcacgcgctggaacttcaagacctgggctgaccagggttacgtcgtcattgcacctaacccgactgcgtccagcggttggggccagaacctgacggacgccgtccagggacgttggggttcctacccttactgggatcttgtccacgcatggcaatacgtcaacagcactcttgactacgtcgataccgccaacggtgtcgaggcaggtgcttcattcggtggttacatgaccaactggatgcaaggccacgagatgggtcgctggttcaaggccctcgttacccacgatggctccacctctactctcaaccagtacgcttccgaagaactctggttcatgaaccacgatttcgccggcccattcaactccactggcttcgaggccagctcgccctacgctgagtggaaccctctcctctacacgcacaactgggctactccccacttcgtcgtgcacaacgagcttgattaccgcttgcctgtaagtgagggtatcttgctgttcaatatgctccaggtcaagggcgtgccatcccgcatgcttagcttccccgatgagaaccattgggttcttaaccaggagaacagcttagtctggcacaccgagatctttaagtggatcaactactactctggtatcagcaatgctacttcgccttactagggtgggtatggatttggataccagtaggagggtctcggaatagaaggtctcataatcctaatgctataggctagtaatagtatgaaatgataatattaattatcctacttcactcgtcga

SEQ ID NO: 25890 - DNA, 1626 bp, Muscodor strobelii
  misc_feature: SGI cDNA ID NO. 568841
  misc_feature: Encodes the peptide sequence at SEQ ID NO 25891
atgggtgcatacccaaactcaccatcctacatggacaacgagaagctctcttccaaacacatcgaagaccacaatctttccgaaacagagagcgaatccagcattcaacactcgcgtgacgctatattcgcagacacacaatggagcaaaacgaccagagtttacaccggaggcctgctccgcctccgcctctcatctataatacaccatcttagaaaaatattcatattcttactcccgagtttcatacaaccatatttccacggcggtagccgagccataaaaccaaaagctctatacccaacttcatatctcgatggtatgagaggactcgcagcgctattcgtattcttcgaccattatttctataccagtttcgaagtagctcaaggctacagcaaaatcgttacctcgccaccagattcaccaacaccaggcgtacaaacagtggtatacacctccccctggcatctccctttcatcagactattgtatgctggtccatcaatggtctgcgtattctttataatatcaggatacgccctctcaatgcgacccatccaacttatctcccagcgcaacccagaagccctcacaaaaaccctatcctcgcttgttttccgacggattttcagactctacctaccacccataatctcaaccctaatctgcgtgctgttgattcgagcgggactctacgaatacacacgagaatacaccacggatcggcaattcatccgctatgtcatcgagcatcacccacctttactccccacgctctctgagcaactcaggcattggaccacgcagatgtggaacttcctagcagtctggacgtgggatcctgctgcgggccgggtggagtacgatgtccatctttggaccataccgatggaattccggtgctcaatggttgtcttcctgctcttgattgggaccgcgagattgagcgcaaatgcgaagttcgtcgtcttgactgctgtgagctggtttacgatccgctcgaatagatgggagatgttcctttttatcatcggtatggtaattgcggaacgggatgttaggagaggcgcacatgagaagtggaagaatgccgtttcgggctcgttgccttttaatgaaaaggcagaaccttcctctgaaaatggaccgatatctttctggacgctggcaactataccagtcctatatctcctgtcctgccctgacgccggagcagacggtgtacaaggctggatctacctcggctctctaattccagaatggttcatcgagaaatacagattctggcaaatcatcggcgcatgtctcttcgtgttttgcgccgcgcgctcacggggctggcagaaattcttcgagctcccgcctgtgcagtacatcggcagtcttagttacgctgtgtacctttgccacggaccggtaatccacattgcgggttttgctgttcaacggtacttcttccttcgcacgggcacggaagaccctggatatcagactggtgctattctcgctgcgttcgtgaatatcccgcttgtgatttgggtggcggatattttctggcgggcggtcgatgcgccgactgtgagattcgcgaagtggttggaggcgaagatgagtgttgattag

SEQ ID NO: 25891 - protein, 541 aa, Muscodor strobelii
  misc_feature: SGI Peptide ID NO. 568841
  misc_feature (102)..(534): Pfam Id: PF01757 Pfam Desc: Acyltransferase family
  misc_feature (433)..(516): Pfam Id: PF01757 Pfam Desc: Acyltransferase family
  misc_feature (102)..(192): Pfam Id: PF01757 Pfam Desc: Acyltransferase family
  misc_feature (5)..(538): NCBI GI: 46137131 Blast Desc: FG10081.1 [Gibberella zeae PH-1]
  misc_feature (21)..(541): NCBI GI: 256732116 Blast Desc: [Nectria haematococca mpVI 77-13-4]
  misc_feature (158)..(537): NCBI GI: 261351753 Blast Desc: conserved [Verticillium albo-atrum VaMs.102]
  misc_feature (80)..(539): NCBI GI: 116180076 Blast Desc: CHGG_00666 [Chaetomium globosum CBS 148.51] gi|88184963|gb|EAQ92431.1| CHGG_00666 [Chaetomium globosum CBS 148.51]
  misc_feature (170)..(541): NCBI GI: 145605281 Blast Desc: MGG_10657 [Magnaporthe grisea 70-15] gi|145013112|gb|EDJ97753.1| MGG_10657 [Magnaporthe grisea 70-15]
  misc_feature (71)..(540): NCBI GI: 171691911 Blast Desc: protein product [Podospora anserina] gi|170945904|emb|CAP72705.1| protein product [Podospora anserina]
  misc_feature (63)..(541): NCBI GI: 70994264 Blast Desc: acyltransferase [Aspergillus fumigatus Af293] gi|66849608|gb|EAL89936.1| acyltransferase, [Aspergillus fumigatus Af293] gi|159125113|gb|EDP50230.1| acyltransferase,
  misc_feature (63)..(541): NCBI GI: 119500826 Blast Desc: acyltransferase, [Neosartorya fischeri NRRL 181] gi|119415335|gb|EAW25273.1| acyltransferase, [Neosartorya fischeri NRRL 181]
  misc_feature (71)..(540): NCBI GI: 121707144 Blast Desc: acyltransferase, [Aspergillus clavatus NRRL 1] gi|119399893|gb|EAW10319.1| acyltransferase, [Aspergillus clavatus NRRL 1]
  misc_feature (71)..(540): NCBI GI: 169773507 Blast Desc: [Aspergillus oryzae RIB40] gi|83769083|dbj|BAE59220.1| protein product [Aspergillus oryzae]
MGAYPNSPSYMDNEKLSSKHIEDHNLSETESESSIQHSRDAIFADTQWSKTTRVYTGGLLRLRLSSIIHHLRKIFIFLLPSFIQPYFHGGSRAIKPKALYPTSYLDGMRGLAALFVFFDHYFYTSFEVAQGYSKIVTSPPDSPTPGVQTVVYTSPWHLPFIRLLYAGPSMVCVFFIISGYALSMRPIQLISQRNPEALTKTLSSLVFRRIFRLYLPPIISTLICVLLIRAGLYEYTREYTTDRQFIRYVIEHHPPLLPTLSEQLRHWTTQMWNFLAVWTWDPAAGRVEYDVHLWTIPMEFRCSMVVFLLLIGTARLSANAKFVVLTAVSWFTIRSNRWEMFLFIIGMVIAERDVRRGAHEKWKNAVSGSLPFNEKAEPSSENGPISFWTLATIPVLYLLSCPDAGADGVQGWIYLGSLIPEWFIEKYRFWQIIGACLFVFCAARSRGWQKFFELPPVQYIGSLSYAVYLCHGPVIHIAGFAVQRYFFLRTGTEDPGYQTGAILAAFVNIPLVIWVADIFWRAVDAPTVRFAKWLEAKMSVD

SEQ ID NO: 25892 - DNA, 1234 bp, Muscodor strobelii
  misc_feature: SGI EST ID NO. CUFF.61102.0
  misc_feature: Variant of the nucleotide sequence at SEQ ID NO 25890
cgaccatctgcttccattttcagcactctccacattccttacttacagctcacttacgccagcatcacaataaatagaataaatggttccatcatagagaaaccagacaccaaatacgtacagacagcaaccgtcacgatgggtgcatacccaaactcaccatcctacatggacaacgagaagctctcttccaaacacatcgaagaccacaatctttccgaaacagagagcgaatccagcattcaacactcgcgtgacgctatattcgcagacacacaatggagcaaaacgaccagagtttacaccggaggcctgctccgcctccgcctctcatctataatacaccatcttagaaaaatattcatattcttactcccgagtttcatacaaccatatttccacggcggtagccgagccataaaaccaaaagctctatacccaacttcatatctcgatggtatgagaggactcgcagcgctattcgtattcttcgaccattatttctataccagtttcgaagtagctcaaggctacagcaaaatcgttacctcgccaccagattcaccaacaccaggcgtacaaacagtggtatacacctccccctggcatctccctttcatcagactattgtatgctggtccatcaatggtctgcgtattctttataatatcaggatacgccctctcaatgcgacccatccaacttatctcccagcgcaacccagaagccctcacaaaaaccctatcctcgcttgttttccgacggattttcagactctacctaccacccataatctcaaccctaatctgcgtgctgttgattcgagcgggactctacgaatacacacgagaatacaccacggatcggcaattcatccgctatgtcatcgagcatcacccacctttactccccacgctctctgagcaactcaggcattggaccacgcagatgtggaacttcctagcagtctggacgtgggatcctgctgcgggccgggtggagtacgatgtccatctttggaccataccgatggaattccggtgctcaatggttgtcttcctgctcttgattgggaccgcgagattgagcgcaaatgcgaagttcgtcgtcttgactgctgtgagctggtttacgatccgctcgaatagatgggagatgttcctttttatcatcggtatggtaattgcggaacgggatgttaggagaggcgcacatgagaagtggaagaatgccg

SEQ ID NO: 25893 - DNA, 795 bp, Muscodor strobelii
  misc_feature: SGI cDNA ID NO. 568842
  misc_feature: Encodes the peptide sequence at SEQ ID NO 25894
atgtctccatctacacctccttcaacacacagacctctagacaagctgcccgacgagctcctcctaaggatcctgcacttcaccatgcagcgatcaacccccttcgtcctgcaacactgcgccaagaaagcggacgacagacctaacaacaggaacatagcaggcttcccccagcaaggcaaccagcgagctatcatcatccgctacccccacgccaacattaccaagcgccaaactcgctctctccccccttcccaaatgcaccacgtcacggactggttggcaatcaacacaacgaatcggcgcatccggcgagtcggtagggaggccttcatcagcagtaaaatcatcgggatgaacgtgctgcttcctggggaactacaatttgggactgccatgccaaattggtcccttcaattccaggccgaattcctccagaacatccgccaagttcacctccactgcctagcaagatgcactgccaacaaattggtcacgctcccaatcctaatcgcctccctcccgaaactgaagcacgtcatcctcggtttcgggtcccgggacgacgagggtgcggttctgaacccaggccagaacgaagtcggcgacaaattcaaagagctagaaatcctcttgcgcgcgatcggtgttcccgatcgggtgaggttgtcagttggtgtgattttagagttcgactggttatgggtgaagctgatcgttttccctattttgaggtcaagagagcgggctttgcgagagggtagcattgaaaagagatatgggaggaagcggtag

SEQ ID NO: 25894 - protein, 264 aa, Muscodor strobelii
  misc_feature: SGI Peptide ID NO. 568842
MSPSTPPSTHRPLDKLPDELLLRILHFTMQRSTPFVLQHCAKKADDRPNNRNIAGFPQQGNQRAIIIRYPHANITKRQTRSLPPSQMHHVTDWLAINTTNRRIRRVGREAFISSKIIGMNVLLPGELQFGTAMPNWSLQFQAEFLQNIRQVHLHCLARCTANKLVTLPILIASLPKLKHVILGFGSRDDEGAVLNPGQNEVGDKFKELEILLRAIGVPDRVRLSVGVILEFDWLWVKLIVFPILRSRERALREGSIEKRYGRKR

SEQ ID NO: 25895 - DNA, 5889 bp, Muscodor strobelii
  misc_feature: SGI cDNA ID NO. 568843
  misc_feature: Encodes the peptide sequence at SEQ ID NO 25896
atgtcgtggtatgatctttttgcggcgccctaccgggccaataccagcagcgttccttcgccctcaccactcccgacttccacacccacgccgccgcctccccacgacaccggccaccctaggcgaacgagctgtctgtctgcagcgatgacttcgtctgatgttgtcgcgacgaccggcgcgggtcgcgagtccccggccgcgcccgtcgcgaacaataccaccactaccaccgctactactccaccgcccgccgacgctgctgctaccgggccatccaatggtgcatctcccacgatgcctgcgcccgctcccgcgaccgagcacgcagccggtcaacccaccgttcagtcctcgagtccagatgctactacagcttttgcgctcacttccaccctcattcccggcgagtcactcggcgaagcactcagcggagcacacatatcagacgcagtcaccgagtcgcaagccgtcccactaccaaaccccgacgactatgatcccaactcacagccagatgcacagccagatgcgctcgccccaataccgcctctagatatatcagatatatccaatatgtcttcgactgcgattcttaccgaccagcagcaggatgccgactctctggcgctcccaaaggaccatctcaccgatctgtctatgccctctccgcccaccgtctctccgctgtccacccctgctgccaccaacatcaacgttgacgatatcgccgatgacgacctggccaagctcaatggcgaggccttgcccgcgccatcccacccttcccctttctggaccccgcacaaccaccacacggcacatgggagccgccatggctcccaagatctacggctgaacaccacctcttttgcgaatccattcgacatggacaattcttacagcgccgtcgaagctgtggctatggcggatcccgactacagcacggtagacttctctgcgcaccgcggtcatcgtcagtcccagggcagcattgacccaaacgcctatgtcatgaacatgcttcacgaggtcaacggcctcgctgatcacactggccacaatgatcaccacccatctgctgtgcacccttctgccgtttcgctgcactccttcactcagggcagcgaagccctcgaagacagcatcgagtctaccattgctagcggaagtcagaccctctcgtctttcgccaaggtcattttcgccgacagcgtcttccagatgaccacgtacgccgtcataataggtcgcgatcaacgagccatggaccaggccagaatggacgagaagcgaaaggctgcctataagcgcaagtgcgaggagcgcgccagacttggcttgcctctgcccccgtctcccaccatgggagaccgaagcaagttcagtaagtcctatgtcagcgaagagggaggcatgcttgggcctgaatgctctgacggtgaggccgagatgcggcagccaccaaggaaacgccgtctcagttccgccaatcggtctgccggtggcgaggaaaaccccggaggcgaccatggccaatggaatcgacagtatatatcacatactactggcgctgctgctgtcgacatgggcaccctgcaaccgtcgcccgatcacatcccattcctcgctattcattcccctggcccagacatagccgccaagacgaaaggcatttctcgacaacatctcaagatccagttcaacaagcagcgaggagtcttcgaggcaattgcgttgcacaagaacggattcttctgccaagacaaacttcatcaaaccgatcgtccggtaatattaaagagcggtgatcgactccagatcaaagatgttgaattcgatttcgttattaacggcgtgcccattggcaagactggaggcgaggacgaagacgctgcgtcgagcaaacgcatgtcggttggcggtaaggagatgagcctggatttcgaacatgaagatcaccagaacttcagggacacgagcgatgatggttcagatgcagttgttggagacatggatgtcccacatgtcgaaccctttcagactcccccggatcaaatgacagcacaagaaccagtcctaccacaacctattgcgcatgaagcactggaggcaattggaacacttgaaggtgaaatgcccgaagtaggagaggaaccccaagcactcgaaggatttgaagctctgacggacgagcaaatcattgagcttttgagattagatgccgagggcataacggatataccgcctgaactggctctgccactcaaacgtaggggtcccggtcggccacctaaggacggaattatgtcaaaacgagaacgcagactactcaagaagcagttgcaggaatcgactgcaagaaaggcattgcctcaagacccgcagagtgagaagatcaaacggccagtaggtcggccacggaagaaccccgttgcagaagacggagagacgcccgagaagcgcaaatacagcaagaaaaaggatggcgaggctggatctgatgttgaaaaacgggtcaaagagaaaaaggacaaaaaggtcaggcccaagtcaccacccttagaacttcgacgagaagactataccgaggagcaactgcagaaacccagcaagaactatggcgttctgattgacgaagcccttacgaacgagccatccaacggtctgacactgaagcaaatttacaaaagaatccaagcccggtatccgtggttttatttcatggcagaaactaaaggctgggagagcagtgtccgccacaatctcattggcaacgaagccttcttgaaagatgaagagacgagtctctggtctcgcgtgccaggcgttgagctggacgctggcaaaaagcgcaaggcaaactcgccggaccgacatcttgcagcccctcatcttcattcgcacctcgggcatggtccatattatcagaccaatccgtacgttgcaaatgccaacacggttggctatcctcataatacacagaattatagcaatgaggtaaaacatcctcaacaagtatatacaactgtccccggacaagcagcacaacccaaagccgccactacgcagccagtaacgcaaccggtatatacctcgcaaacaccagcgccggcacagctccaattacctgcggcattcggcgctccagccctgccgaggccgtcgaacataccacagcagagtacatacagttctccttacgcacgtccacctccctcgtccaaccccccagctcaggccgaaaggaatacagcgccaactccaactcctgcggttgcgtcggcgccgcaacctacgtcactgccccagcaaagccagcccgtacctcctgtcacagccggtgaaccgacaaagccattgtaccctcataccgaggaggcgatacatcatttccaagtcaagatgctaggccacttgcctcatctgaaagacatagctgtagacctgatagacatagctatacgtcaggcccgtggtttgcctcggataaagagcattccgaccggatatgaagttatggtcaataacatggctcatgcgttagatggcctgattaagcaaatggaggcgaaaggggcggctgcggcggcgtcaccagctcccgcgattgcgaccgctcctgcccaaagaacgccggcgcaaagtcctgcagcaattgacgctcttgaggccgacattcaatcacggctcaagggcttccgtgatagtatgatcaccgccttcggcagtggcaataaatttggcgatggtgccacccttgtagataatgccatcgcccgcgctcggggtttgccacatccagctgttgacccagggtgggccagcaaagacgaaatgatagtcgatgccgtcaggaaaatcattgctgaagcaaaggcaaaatttgcccgcactcagtccgcttcgccggcatccgcaatgtcaggccagcccattgctgctcctcgacctgcgccgccagtacaagcaactgctcgaacagagctatctgcttcgccggctgtagcacagaacgcggttccgagacccagccaacctactatttctggtaatagcaattcgtcggctgtccgagtatctactcctcaaggcacattgtcgaacgttggtcaagctgtctcctccccttcgacagtctctggctcgactctttaccgtccacctcccgcaacggcacctaccaccatttcaaggccttcagtaaacgctatggcacgcccggctgtgccccattcaactgcaactcatgcaaatgtaacaaggcctaatgtttcaagccctgctcctccgagtgctggtgtgctcgaccaaattagtggtcaaagaagattcttggacaataagaatagcaacctaggcactagctattcggcaaacagtactgctgcgaccaattccaatataggaagtttggcaactaataaatcaagtaccatcataccaagctctgccaacaatgctgcgggcaatcctgttcgcagccagcctagtattaccccgagcagttcgataaatcatgttgcgaacagtactccagtgactggttcgtcaagtaatttgatacatagagcaccaaccaattcaccagcgacagcgatagcgaaacctaatgccaatacgcagaccagtctgacgaacacagcaaggcccaattcaacagttcatacggcaagtccacatctagcaaacgttgcgcaagcatccacgatacccaagcctgctgcgaacattacgaacaccgccgcgggcacaatgactggtcttcagactcctagtccagccttgtctagagcacctggtcaagcagccatcacatctgggactattgcagacagtcaaaagcccactgtccccggtcacgccacagcctcgacatttgccacttcaacgggccatgcaagacagactccggaaactgccagagcgaatcacccagtaaccgtaacgacagccggtccagcgaactcaccaccaagcaatcctgggaaatttgctgcaggtagtcacacaaataaacccgcaagcactaattcaaccattccggcgacttcggcattaaggactccagctacacactcaccgaccattcctgcgccagctccaattccggctacaccacggattgccaacgcagtaacatctcaagcgacagctgcagcaaatatcccagcggccgtctccgtacctgcttcagcggcccgttcggcaatccctttatcagctgttcgatctgcaactcccgctaccgtcccggcagctgcacccactccttctactcccgccacttctaccacttctgcgaatgccgccactacaccaagtgttgcaaagcacattccaggtatcgaattatcagctacctccaataacactagtagtagcaaccacagtaccaatcatacaataagtaatgccactggtaccagtagccctggttacgggtcgatcaacaacccagccaagaatgttccggccgctgttgataagaagagtaatgtcaccataagcaactctactgctagtactattagcaccagcggtcttacgaaccactccccaataagcagcgcgggacctagcatgcagaccagtaatgttagcagtgtcaccccggtacgctcggggaatggtaccaatattgcgttgggacaaggcacatccaatatgcctcaaaaaaccctcaaccgccggacagctccacaacgctcaccgtcgaaggtagcagcgccagtgcgcaacatgtccagccctgccccgccaagtgccggagttgtggctcagatcgctggtcacaaacgaacgctagatgaaggaccaggtggtagcggcaacgtcgaacagcccgagcccaaaagacacagcgtgaccactcataggagatgctga

SEQ ID NO: 25896 - protein, 1962 aa, Muscodor strobelii
  misc_feature: SGI Peptide ID NO. 568843
  misc_feature (869)..(957): Pfam Id: PF00250 Pfam Desc: Fork head domain
  misc_feature (551)..(609): Pfam Id: PF00498 Pfam Desc: FHA domain
  misc_feature (869)..(931): Pfam Id: PF00250 Pfam Desc: Fork head domain
  misc_feature (286)..(1078): NCBI GI: 116180014 Blast Desc: CHGG_00635 [Chaetomium globosum CBS 148.51] gi|88184932|gb|EAQ92400.1| CHGG_00635 [Chaetomium globosum CBS 148.51]
  misc_feature (359)..(1265): NCBI GI: 171691905 Blast Desc: protein product [Podospora anserina] gi|170945901|emb|CAP72702.1| protein product [Podospora anserina]
  misc_feature (393)..(1072): NCBI GI: 16415994 Blast Desc: [Neurospora crassa]
  misc_feature (393)..(804): NCBI GI: 164426294 Blast Desc: NCU11138 [Neurospora crassa OR74A] gi|157071276|gb|EDO65224.1| [Neurospora crassa OR74A]
  misc_feature (736)..(1086): NCBI GI: 261355731 Blast Desc: forkhead domain-containing protein [Verticillium albo-atrum VaMs.102]
  misc_feature (740)..(1066): NCBI GI: 46137003 Blast Desc: FG10017.1 [Gibberella zeae PH-1]
  misc_feature (746)..(969): NCBI GI: 256731656 Blast Desc: NECHADRAFT_80246 [Nectria haematococca mpVI 77-13-4]
  misc_feature (394)..(953): NCBI GI: 154278419 Blast Desc: [Ajellomyces capsulatus NAm1] gi|150413608|gb|EDN08991.1| [Ajellomyces capsulatus NAm1]
  misc_feature (394)..(1069): NCBI GI: 154316436 Blast Desc: BC1G_04149 [Botryotinia fuckeliana B05.10] gi|150845949|gb|EDN21142.1| BC1G_04149 [Botryotinia fuckeliana B05.10]
  misc_feature (386)..(1073): NCBI GI: 225560643 Blast Desc: forkhead domain-containing protein [Ajellomyces capsulatus G186AR]
MSWYDLFAAPYRANTSSVPSPSPLPTSTPTPPPPHDTGHPRRTSCLSAAMTSSDVVATTGAGRESPAAPVANNTTTTTATTPPPADAAATGPSNGASPTMPAPAPATEHAAGQPTVQSSSPDATTAFALTSTLIPGESLGEALSGAHISDAVTESQAVPLPNPDDYDPNSQPDAQPDALAPIPPLDISDISNMSSTAILTDQQQDADSLALPKDHLTDLSMPSPPTVSPLSTPAATNINVDDIADDDLAKLNGEALPAPSHPSPFWTPHNHHTAHGSRHGSQDLRLNTTSFANPFDMDNSYSAVEAVAMADPDYSTVDFSAHRGHRQSQGSIDPNAYVMNMLHEVNGLADHTGHNDHHPSAVHPSAVSLHSFTQGSEALEDSIESTIASGSQTLSSFAKVIFADSVFQMTTYAVIIGRDQRAMDQARMDEKRKAAYKRKCEERARLGLPLPPSPTMGDRSKFSKSYVSEEGGMLGPECSDGEAEMRQPPRKRRLSSANRSAGGEENPGGDHGQWNRQYISHTTGAAAVDMGTLQPSPDHIPFLAIHSPGPDIAAKTKGISRQHLKIQFNKQRGVFEAIALHKNGFFCQDKLHQTDRPVILKSGDRLQIKDVEFDFVINGVPIGKTGGEDEDAASSKRMSVGGKEMSLDFEHEDHQNFRDTSDDGSDAVVGDMDVPHVEPFQTPPDQMTAQEPVLPQPIAHEALEAIGTLEGEMPEVGEEPQALEGFEALTDEQIIELLRLDAEGITDIPPELALPLKRRGPGRPPKDGIMSKRERRLLKKQLQESTARKALPQDPQSEKIKRPVGRPRKNPVAEDGETPEKRKYSKKKDGEAGSDVEKRVKEKKDKKVRPKSPPLELRREDYTEEQLQKPSKNYGVLIDEALTNEPSNGLTLKQIYKRIQARYPWFYFMAETKGWESSVRHNLIGNEAFLKDEETSLWSRVPGVELDAGKKRKANSPDRHLAAPHLHSHLGHGPYYQTNPYVANANTVGYPHNTQNYSNEVKHPQQVYTTVPGQAAQPKAATTQPVTQPVYTSQTPAPAQLQLPAAFGAPALPRPSNIPQQSTYSSPYARPPPSSNPPAQAERNTAPTPTPAVASAPQPTSLPQQSQPVPPVTAGEPTKPLYPHTEEAIHHFQVKMLGHLPHLKDIAVDLIDIAIRQARGLPRIKSIPTGYEVMVNNMAHALDGLIKQMEAKGAAAAASPAPAIATAPAQRTPAQSPAAIDALEADIQSRLKGFRDSMITAFGSGNKFGDGATLVDNAIARARGLPHPAVDPGWASKDEMIVDAVRKIIAEAKAKFARTQSASPASAMSGQPIAAPRPAPPVQATARTELSASPAVAQNAVPRPSQPTISGNSNSSAVRVSTPQGTLSNVGQAVSSPSTVSGSTLYRPPPATAPTTISRPSVNAMARPAVPHSTATHANVTRPNVSSPAPPSAGVLDQISGQRRFLDNKNSNLGTSYSANSTAATNSNIGSLATNKSSTIIPSSANNAAGNPVRSQPSITPSSSINHVANSTPVTGSSSNLIHRAPTNSPATAIAKPNANTQTSLTNTARPNSTVHTASPHLANVAQASTIPKPAANITNTAAGTMTGLQTPSPALSRAPGQAAITSGTIADSQKPTVPGHATASTFATSTGHARQTPETARANHPVTVTTAGPANSPPSNPGKFAAGSHTNKPASTNSTIPATSALRTPATHSPTIPAPAPIPATPRIANAVTSQATAAANIPAAVSVPASAARSAIPLSAVRSATPATVPAAAPTPSTPATSTTSANAATTPSVAKHIPGIELSATSNNTSSSNHSTNHTISNATGTSSPGYGSINNPAKNVPAAVDKKSNVTISNSTASTISTSGLTNHSPISSAGPSMQTSNVSSVTPVRSGNGTNIALGQGTSNMPQKTLNRRTAPQRSPSKVAAPVRNMSSPAPPSAGVVAQIAGHKRTLDEGPGGSGNVEQPEPKRHSVTTHRRC

SEQ ID NO: 25897 - DNA, 1308 bp, Muscodor strobelii
  misc_feature: SGI cDNA ID NO. 568844
  misc_feature: Encodes the peptide sequence at SEQ ID NO 25898
atgtctttcatctcaaacataaagcgcttccagcgaaacaatgtcgctaccatgcgtagttcgccgatggcggaagtgtccggagctctgggagacttgggaacattgcttccgctcatgatcaccctggccgtaaatggatcgatttctctttcgacgacactcgtcttctctggtttcttcaatgtgttcactggtgtggtttttggtattcctttaccagtccagccgatgaaggctatcgcggcagcagccatagcatcgcatacttctcaagatgagactatggccgctgggagcgtcacagctattctcgtactcatcttgagtctgacaggacttcttcgccttgtcactaaagtaattccgataccagtgatcaaaggaatccagttcggagccgggctctctctggtaatatcggccggctcatcgcttcttcagccattgacccattcctggaaacgaccgcttgataaccttgcttggacattattcgcttttatcttactcatcattacccaacgacgggctcgtttccccttcgcattgctgatctttgcggccggtgtcataatggctttgatccgcgtaggtgtgaaccaggagatggacatgcctggactacatatctggaacccttatttcatactgccttactggaccgcagacgccatcggcatgggaattgctcagctccctctcacaactctaaactccattattgctgttagcgcgttagcatcggatctttttccggcgttggcttcgccaggcgtcacatctgtggggatcagtgtcgctgccatgaatctcatcggatgttggttcggtgccatgccggtatgtcatggttccggcgggttggcggcgcaatatcgcttcggagcgcggagtggtgctagtatcatcatcctcgggcttgccaaagtcattctcggtctattcttcggagagtcactcctcgaccttctcggcgcgttcccgcgaagtcttctcggtatcatggtcctagccgcgggtctcgagctcgcgcgtgttggccaaagtctgaatcacggtgcaccagacctttgggaggcaagcgtcgaagggagccacagtgctaagcgccatcgcaacgttagtgatgaggaacgcacacagaggtggaacgttatgctggttacgacggcgggtatcttggctttcaaaaacgatgcggtcgggtttattgctggtatgctctgtcattatgcttataaagtcactgaatgggcggaacataaatgggatggacgtggagagagccgacccctcttggagtaa

SEQ ID NO: 25898 - protein, 435 aa, Muscodor strobelii
  misc_feature: SGI Peptide ID NO. 568844
  misc_feature (112)..(418): Pfam Id: PF00916 Pfam Desc: Sulfate transporter family
  misc_feature (4)..(435): NCBI GI: 39961599 Blast Desc: MGG_09545 [Magnaporthe grisea 70-15] gi|145011048|gb|EDJ95704.1| MGG_09545 [Magnaporthe grisea 70-15]
  misc_feature (2)..(435): NCBI GI: 256731655 Blast Desc: [Nectria haematococca mpVI 77-13-4]
  misc_feature (2)..(426): NCBI GI: 156055254 Blast Desc: SS1G_04978 [Sclerotinia sclerotiorum 1980] gi|154702763|gb|EDO02502.1| SS1G_04978 [Sclerotinia sclerotiorum 1980]
  misc_feature (2)..(427): NCBI GI: 46137005 Blast Desc: FG10018.1 [Gibberella zeae PH-1]
  misc_feature (1)..(435): NCBI GI: 261355730 Blast Desc: sulfate transporter [Verticillium albo-atrum VaMs.102]
  misc_feature (1)..(431): NCBI GI: 242786618 Blast Desc: sulfate transporter, [Talaromyces stipitatus ATCC 10500] gi|218720988|gb|EED20407.1| sulfate transporter, [Talaromyces stipitatus ATCC 10500]
  misc_feature (8)..(423): NCBI GI: 238492957 Blast Desc: sulfate transporter, [Aspergillus flavus NRRL3357] gi|220696209|gb|EED52551.1| sulfate transporter, [Aspergillus flavus NRRL3357]
  misc_feature (8)..(423): NCBI GI: 169783196 Blast Desc: [Aspergillus oryzae RIB40] gi|83774804|dbj|BAE64927.1| protein product [Aspergillus oryzae]
  misc_feature (4)..(427): NCBI GI: 121710836 Blast Desc: sulfate transporter, [Aspergillus clavatus NRRL 1] gi|119401184|gb|EAW11608.1| sulfate transporter, [Aspergillus clavatus NRRL 1]
  misc_feature (1)..(419): NCBI GI: 212543413 Blast Desc: sulfate transporter, [Penicillium marneffei ATCC 18224] gi|210066768|gb|EEA20861.1| sulfate transporter, [Penicillium marneffei ATCC 18224]
MSFISNIKRFQRNNVATMRSSPMAEVSGALGDLGTLLPLMITLAVNGSISLSTTLVFSGFFNVFTGVVFGIPLPVQPMKAIAAAAIASHTSQDETMAAGSVTAILVLILSLTGLLRLVTKVIPIPVIKGIQFGAGLSLVISAGSSLLQPLTHSWKRPLDNLAWTLFAFILLIITQRRARFPFALLIFAAGVIMALIRVGVNQEMDMPGLHIWNPYFILPYWTADAIGMGIAQLPLTTLNSIIAVSALASDLFPALASPGVTSVGISVAAMNLIGCWFGAMPVCHGSGGLAAQYRFGARSGASIIILGLAKVILGLFFGESLLDLLGAFPRSLLGIMVLAAGLELARVGQSLNHGAPDLWEASVEGSHSAKRHRNVSDEERTQRWNVMLVTTAGILAFKNDAVGFIAGMLCHYAYKVTEWAEHKWDGRGESRPLLE

SEQ ID NO: 25899 - DNA, 1702 bp, Muscodor strobelii
  misc_feature: SGI EST ID NO. CUFF.61130.0
  misc_feature: Variant of the nucleotide sequence at SEQ ID NO 25897
gcttctcagcgtgtctcaaagtaatcgcactcctagaatatcctacaacaacaaactcgcaatgtgatatcgcaggacatctatatagcatgtctttcatctcaaacataaagcgcttccagcgaaacaatgtcgctaccatgcgtagttcgccgatggcggaagtgtccggagctctgggagacttgggaacattgcttccgctcatgatcaccctggccgtaaatggatcgatttctctttcgacgacactcgtcttctctggtttcttcaatgtgttcactggtgtggtttttggtattcctttaccagtccagccgatgaaggctatcgcggcagcagccatagcatcgcatacttctcaagatgagactatggccgctgggagcgtcacagctattctcgtactcatcttgagtctgacaggacttcttcgccttgtcactaaagtaattccgataccagtgatcaaaggaatccagttcggagccgggctctctctggtaatatcggccggctcatcgcttcttcagccattgacccattcctggaaacgaccgcttgataaccttgcttggacattattcgcttttatcttactcatcattacccaacgacgggctcgtttccccttcgcattgctgatctttgcggccggtgtcataatggctttgatccgcgtaggtgtgaaccaggagatggacatgcctggactacatatctggaacccttatttcatactgccttactggaccgcagacgccatcggcatgggaattgctcagctccctctcacaactctaaactccattattgctgttagcgcgttagcatcggatctttttccggcgttggcttcgccaggcgtcacatctgtggggatcagtgtcgctgccatgaatctcatcggatgttggttcggtgccatgccggtatgtcatggttccggcgggttggcggcgcaatatcgcttcggagcgcggagtggtgctagtatcatcatcctcgggcttgccaaagtcattctcggtctattcttcggagagtcactcctcgaccttctcggcgcgttcccgcgaagtcttctcggtatcatggtcctagccgcgggtctcgagctcgcgcgtgttggccaaagtctgaatcacggtgcaccagacctttgggaggcaagcgtcgaagggagccacagtgctaagcgccatcgcaacgttagtgatgaggaacgcacacagaggtggaacgttatgctggttacgacggcgggtatcttggctttcaaaaacgatgcggtcgggtttattgctggtatgctctgtcattatgcttataaagtcactgaatgggcggaacataaatgggatggacgtggagagagccgacccctcttggagtaagaaacgcctttgtgtattaatatcatatgattgccagtctcgccttttgtgatgtacaaataagcccagaagatggcttacgtgggttcatgtcactagaaacgttcttcgcagagctctcctctaggctatgtacctgtcctttcacatgctacatttccgtgtgcaccggcttagaactctgaagatactaagtcagagatcatgctcatgcctcgacgtttgagcttacgagtctgaattagaagtcgactgtcagcatactgctaaatagctgactaaatagtaagagaactcaacctcgt

SEQ ID NO: 25900 - DNA, 1023 bp, Muscodor strobelii
  misc_feature: SGI cDNA ID NO. 568845
  misc_feature: Encodes the peptide sequence at SEQ ID NO 25901
atgtcgggcgcaaacagctggctgcagaggcagcgcaagtctgatctcaccgagctggctgagcacaccggtcttaagaactacgatgggctcaagaagagcgagctcgagctagctctggacgagtacctctcggagaacgcgacgacgttctcgaccgacccgaagctcgccaactactacgccagccgcgcccgaaccatcggctctcctgtcaagcgagatgtcgatgcgcccgtcgagagcaagctcaaggtcacaaggcgccgcgcgatcaaggccatcgaggattcgactgctcctgagtctgaggaggagcccagcagcacttcgaccgcgattgcgcacacccccgcccgcgcattatccctcgcgggccgcattcctctccccgccacacccgccgacgtggccaatgccgtcgaccgctcgaccgtcgcgatacgcactcgcgccgcgtccatgtacaaggagtcgggcatcaccgaagccacccacgcgacgcgcgagactctgtccaccgtcaactcggtgatgctcgccgtcgcgctcttcgaggcctacttcctgcgcccggagatcctcgccgaccgctacgccttcaccatcccggccatctctctcctcggcaccagcgactaccccgtcttcatccctgacatgttcctgctgctcaccgcgtctttctggtctcctgcgcttctctgggccttcaccagcaccatcctgcccagcgtcaccgggtacttcgtgaacctgaccaccggctccgctaatcatggtcgcgttactcgtcgcaccgcgcccgtgcccgatgtcgtcgtcgacccgctgacgttcagcatcgtcaaggccatcatctccttcgtcgtctacggccaaggcgtcacctttggcggctggatcgacgagacgtccatcgcgcgcatcaactccgccgtgtacggcgggtacaagggtatactcgtcggctctgccatcacgggaatcttcagcatctacgacgcggttctcaagaagtaa

SEQ ID NO: 25901 - protein, 340 aa, Muscodor strobelii
  misc_feature: SGI Peptide ID NO. 568845
  misc_feature (5)..(340): NCBI GI: 256732083 Blast Desc: NECHADRAFT_80345 [Nectria haematococca mpVI 77-13-4]
  misc_feature (1)..(340): NCBI GI: 39977973 Blast Desc: MGG_06871 [Magnaporthe grisea 70-15] gi|145013566|gb|EDJ98207.1| MGG_06871 [Magnaporthe grisea 70-15]
  misc_feature (1)..(340): NCBI GI: 171694301 Blast Desc: protein product [Podospora anserina] gi|170947099|emb|CAP73904.1| protein product [Podospora anserina]
  misc_feature (5)..(340): NCBI GI: 46136799 Blast Desc: FG09915.1 [Gibberella zeae PH-1]
  misc_feature (29)..(340): NCBI GI: 116197891 Blast Desc: CHGG_07101 [Chaetomium globosum CBS 148.51] gi|88178380|gb|EAQ85848.1| CHGG_07101 [Chaetomium globosum CBS 148.51]
  misc_feature (1)..(340): NCBI GI: 85101863 Blast Desc: NCU04232 [Neurospora crassa OR74A] gi|16944401|emb|CAD11367.1| [Neurospora crassa] gi|28922765|gb|EAA31987.1| [Neurospora crassa OR74A]
  misc_feature (1)..(340): NCBI GI: 154310429 Blast Desc: BC1G_07135 [Botryotinia fuckeliana B05.10] gi|150851466|gb|EDN26659.1| BC1G_07135 [Botryotinia fuckeliana B05.10]
  misc_feature (1)..(340): NCBI GI: 156056066 Blast Desc: SS1G_05385 [Sclerotinia sclerotiorum 1980] gi|154703169|gb|EDO02908.1| SS1G_05385 [Sclerotinia sclerotiorum 1980]
  misc_feature (1)..(340): NCBI GI: 242810454 Blast Desc: conserved [Talaromyces stipitatus ATCC 10500] gi|218716210|gb|EED15632.1| conserved [Talaromyces stipitatus ATCC 10500]
  misc_feature (1)..(340): NCBI GI: 115400013 Blast Desc: conserved [Aspergillus terreus NIH2624] gi|114191261|gb|EAU32961.1| conserved [Aspergillus terreus NIH2624]
MSGANSWLQRQRKSDLTELAEHTGLKNYDGLKKSELELALDEYLSENATTFSTDPKLANYYASRARTIGSPVKRDVDAPVESKLKVTRRRAIKAIEDSTAPESEEEPSSTSTAIAHTPARALSLAGRIPLPATPADVANAVDRSTVAIRTRAASMYKESGITEATHATRETLSTVNSVMLAVALFEAYFLRPEILADRYAFTIPAISLLGTSDYPVFIPDMFLLLTASFWSPALLWAFTSTILPSVTGYFVNLTTGSANHGRVTRRTAPVPDVVVDPLTFSIVKAIISFVVYGQGVTFGGWIDETSIARINSAVYGGYKGILVGSAITGIFSIYDAVLKK

SEQ ID NO: 25902 - DNA, 2641 bp, Muscodor strobelii
  misc_feature: SGI EST ID NO. CUFF.61153.1
  misc_feature: Variant of the nucleotide sequence at SEQ ID NO 25900
tggcaaatggtttaagatagccagggaccttatagtttcccaacggtcccgcgaaatgacattttgctagactagaatgatagatacttggggcatccgaagcggtaatgggaaatcttccgaagtcctacaacagtatctgaaccccgtggcaatggttcggttctcccattcttttggtctttggggtgacccgattcccttccaaacgcgcaagaacagtcccatctacacgcacgttagagagagtaacgcaagctggttcggctggatgtaacgggactctgacgggacgagccagggggatgtgctggccggggggcgatcagagcagagaagggtgcgggagaagctgctgttctccaatcgaatgggcgaatgtgggtgaggcagatgctggacgatgccccatacggtcattgcccataccagaagcagctggatgcaacatgaagatcctccccatctctgccccatctccgccttgtcaacttgtcaactgtcaagcgcaggacggcgtgcggtcaagcagtttgccaagctctccccagtctgttcttgctcgcatcacacaccaaaacacaccctggccccgtcactggacaggtcaacaagaggtaaacaatccattgccgaccccgaccccagcctcccgtcttccccatcagccatcagatccccccatcaaaacattggccttatttacacacgcgccaccagcttattgcttgggtatcataccacagacatacactttatacacatcatcatcgtcaaccaccacagcatccctggacccctcgttgtcacggaccacgtctcactacatcatttgcattctggtcgcaattgcttcgcgatcacattgatacccatcaaaggcatatcatctctgcttcgtcatcttttaaactacaatgtcgggcgcaaacagctggctgcagaggcagcgcaagtctgatctcaccgagctggctgagcacaccggtcttaagaactacgatgggctcaagaagagcgagctcgagctagctctggacgagtacctctcggagaacgcgacgacgttctcgaccgacccgaagctcgccaactactacgccagccgcgcccgaaccatcggctctcctgtcaagcgagatgtcgatgcgcccgtcgagagcaagctcaaggtcacaaggcgccgcgcgatcaaggccatcgaggattcgactgctcctgagtctgaggaggagcccagcagcacttcgaccgcgattgcgcacacccccgcccgcgcattatccctcgcgggccgcattcctctccccgccacacccgccgacgtggccaatgccgtcgaccgctcgaccgtcgcgatacgcactcgcgccgcgtccatgtacaaggagtcgggcatcaccgaagccacccacgcgacgcgcgagactctgtccaccgtcaactcggtgatgctcgccgtcgcgctcttcgaggcctacttcctgcgcccggagatcctcgccgaccgctacgccttcaccatcccggccatctctctcctcggcaccagcgactaccccgtcttcatccctgacatgttcctgctgctcaccgcgtctttctggtctcctgcgcttctctgggccttcaccagcaccatcctgcccagcgtcaccgggtacttcgtgaacctgaccaccggctccgctaatcatggtcgcgttactcgtcgcaccgcgcccgtgcccgatgtcgtcgtcgacccgctgacgttcagcatcgtcaaggccatcatctccttcgtcgtctacggccaaggcgtcacctttggcggctggatcgacgagacgtccatcgcgcgcatcaactccgccgtgtacggcgggtacaagggtatactcgtcggctctgccatcacgggaatcttcagcatctacgacgcggttctcaagaagtaaacaatcacatatgtcagccattcgcgtagtgcgtatttgagacttgaaaacattccccttcctgagctttcgcggtgctgtctatgaaaccatctccgtgcaggctcatggaaaacagactttgttgctgtgaactctcttcattctcaggcagtaacgtaacggccggggtaaactgctttttattcaagacggcgttcggcggtgttatcggcgttgatggcgaaatttgctcgtttttcccgtcagatacctgccctttggcacaataccctacctccccctttccccgtttacctttacttgcactcgacttatccgagtcggctagaggctttatttctcctttgcgggtagatttctgattgatgcgatcacaatgtctatattagcaggattgaacggcggaggtttcgcgtgctcgtttttaatgcccttcttttctgcttccccccttctaaaatatgagagaagagacgtgatgaagtcgatgggatcttatgagttgatgaatggtacacactaacacacatatgagtcgtatggcatggatggatggaagatggatgatgatgaggagagcgggtttgcggttgcgtacgcgttcataggagaggtcacgacacgtcggctggaaatatactgttttgaattttttctactctcttgcaagttgcattccctaaatcttcttcgtgcca

SEQ ID NO: 25903 - DNA, 2310 bp, Muscodor strobelii
  misc_feature: SGI cDNA ID NO. 568846
  misc_feature: Encodes the peptide sequence at SEQ ID NO 25904
atgactgcgaaaagcgacatggatctaccgacacacacccgcacgaaacctaagtccaagttctacatcagagcattattaggtcactgccactaccgccgagttctcatctggacagtgttggtggtcgtcctcgtgacgggctcattctttcgtccaactttgtctgcacaatctcggaatgtgttagatttggttcacggtggcaaggtcttgataaagggtgcgccgaagaccactgagcatctcggcatacaggcgcaagacaacgcaaataaggatcttccaaaacatgagatcagccccctggtgatccaagcggaaggaacagtgagcaccgaagcctcccaggagcaagagccggagcaagagcaagagaaaaaaggagaggaagagactgggcctaagtggctaaaatttaaacacctcgacgggtattataaagggttgagagcattagtgcctttttctgactacgaacctgcttatccaagacaaacctccacgtccaatccctcgcaagacatctcggcgccacatcattcgaaactgccgacacccactgtatacaggccacatcccgattacaaatctgaagagtggaagaagcactatgtgcaagtcactacatgttatgtcgactcagcgaagaagattccggcgcctgacatatatgcttaccatggccttgtgcaaggccagcccgagccggcgatagggtctcatgaggctcttggattgcgaaacgacgtgtgcttcgatcgcttcggacggtacggcccttacggcttgggatacagcttcgagctcggaggggcgacggggtcctctgggatcgagcgagagagtagtggagctgtttgggaaaagacgggccagattaattggaatagtatcgactgggctgaggcacagaaccgatgcttcaattcgaacgaggccaggtttttcaccggcaatgaaacgcgggacgccgagcttgcggcgagtggccgtaaaaagatgcatcgaacagccgtggttgtacgaacctatgtcggtttcaagtggacatcgcatgccgtgttgaacttcagggccatgatctccgagctcaatctgcgatcgggaggcgaatacgatgtccatttcctcctgcacgtgcgagacaacaacgcgcctatctgggctgacgtagcgactgctcaggagatcattgcgtccaatgtgcctcccgaatttcaggggctctgtactctgtggtcagaggctcaaatgaagctgtactatcctggtaattttggatctactttcgacaacccttccaacggggacatacacggagtatatcgatccgcgcacatgcctcttcaacattttgccatggagcacccagaatacgcacacttttggaattgggaaatggacatgcgttggactggctcttactatgagctctttgatcgcctcgacaaatggggtgcgaggcagacaaggattggcgcatgggaacgctcagccaaatactacattcccggcctacacggcacctgggaaaatttcaccgagctggtaagctcagagacaaattcatctgagaagcaacctgttttgggcccagtcaacttcgcaggaaagatcagtcttgagcataacgataatttcatgccaccaagctgtgcttccagctctgatcagtcccggtgcgggatcggagaagacgctgaccttatcaccttgaacccactctttgacgcggacgagtctggatgggtttttgcagcggatgttaccgggtacgagacatctcttcccaaaccaccaaggaggtgttccattgtgactgcgtctcgcctgtctcgtagactcctgtcagtcatgcacgaagaaacatggcgaatgcaccacagcatgttcagcgagatgttccccccaactatggcctatcaccatgggctgaaagcggtttacgcaccacacccggtgttcttagaccgtgactggccattgatagagatcgagaagtcgttcaatggcggccaagaccatagctctagtggccacggatccccgtttgatctcaagaatgagcacaaccacaaaggcacaagctggtattacaatagcgagttcgcggggttattatggaggagatggcttggctacgcgcaaatggatgggcgcggcgacaacggtggccgcgccggagaaggtactatgcgcggcggaaaagaagaagaagaatcttctgcaagtactggacgtctttgcctcaggagtatgctcgtgcatcccatcaagtgggaagatcccgaagaaaaagaggactag

SEQ ID NO: 25904 - protein, 769 aa, Muscodor strobelii
  misc_feature: SGI Peptide ID NO. 568846
  misc_feature (9)..(766): NCBI GI: 171693793 Blast Desc: protein product [Podospora anserina] gi|170946845|emb|CAP73649.1| protein product [Podospora anserina]
  misc_feature (16)..(766): NCBI GI: 145605778 Blast Desc: MGG_11809 [Magnaporthe grisea 70-15] gi|145013567|gb|EDJ98208.1| MGG_11809 [Magnaporthe grisea 70-15]
  misc_feature (143)..(769): NCBI GI: 116197929 Blast Desc: CHGG_07120 [Chaetomium globosum CBS 148.51] gi|88178399|gb|EAQ85867.1| CHGG_07120 [Chaetomium globosum CBS 148.51]
  misc_feature (18)..(767): NCBI GI: 256731707 Blast Desc: [Nectria haematococca mpVI 77-13-4]
  misc_feature (18)..(767): NCBI GI: 46136797 Blast Desc: FG09914.1 [Gibberella zeae PH-1]
  misc_feature (124)..(766): NCBI GI: 21622363 Blast Desc: [Neurospora crassa]
  misc_feature (124)..(762): NCBI GI: 169595692 Blast Desc: SNOG_00590 [Phaeosphaeria nodorum SN15] gi|111070965|gb|EAT92085.1| SNOG_00590 [Phaeosphaeria nodorum SN15]
  misc_feature (135)..(760): NCBI GI: 258568864 Blast Desc: conserved [Uncinocarpus reesii 1704] gi|237906622|gb|EEP81023.1| conserved [Uncinocarpus reesii 1704]
  misc_feature (136)..(760): NCBI GI: 115491641 Blast Desc: conserved [Aspergillus terreus NIH2624] gi|114197308|gb|EAU39008.1| conserved [Aspergillus terreus NIH2624]
  misc_feature (135)..(760): NCBI GI: 238839026 Blast Desc: conserved [Microsporum canis CBS 113480]
MTAKSDMDLPTHTRTKPKSKFYIRALLGHCHYRRVLIWTVLVVVLVTGSFFRPTLSAQSRNVLDLVHGGKVLIKGAPKTTEHLGIQAQDNANKDLPKHEISPLVIQAEGTVSTEASQEQEPEQEQEKKGEEETGPKWLKFKHLDGYYKGLRALVPFSDYEPAYPRQTSTSNPSQDISAPHHSKLPTPTVYRPHPDYKSEEWKKHYVQVTTCYVDSAKKIPAPDIYAYHGLVQGQPEPAIGSHEALGLRNDVCFDRFGRYGPYGLGYSFELGGATGSSGIERESSGAVWEKTGQINWNSIDWAEAQNRCFNSNEARFFTGNETRDAELAASGRKKMHRTAVVVRTYVGFKWTSHAVLNFRAMISELNLRSGGEYDVHFLLHVRDNNAPIWADVATAQEIIASNVPPEFQGLCTLWSEAQMKLYYPGNFGSTFDNPSNGDIHGVYRSAHMPLQHFAMEHPEYAHFWNWEMDMRWTGSYYELFDRLDKWGARQTRIGAWERSAKYYIPGLHGTWENFTELVSSETNSSEKQPVLGPVNFAGKISLEHNDNFMPPSCASSSDQSRCGIGEDADLITLNPLFDADESGWVFAADVTGYETSLPKPPRRCSIVTASRLSRRLLSVMHEETWRMHHSMFSEMFPPTMAYHHGLKAVYAPHPVFLDRDWPLIEIEKSFNGGQDHSSSGHGSPFDLKNEHNHKGTSWYYNSEFAGLLWRRWLGYAQMDGRGDNGGRAGEGTMRGGKEEEESSASTGRLCLRSMLVHPIKWEDPEEKED

SEQ ID NO: 25905 - DNA, 1356 bp, Muscodor strobelii
  misc_feature: SGI cDNA ID NO. 568847
  misc_feature: Reduced expression when VOC is produced
  misc_feature: Encodes the peptide sequence at SEQ ID NO 25906
atgtccagcgatcaagagatgatcactggcttgcatcaacagcagaccgaggaccgcgcggcggatcattcgagcagcaacaacagcattgcatcctctcattcactgcatttctcgtctacaaacgacaataatggagagcatttggaggacttagatcgatgctcgacgagacatacagccgcaggagatgctccgatccaacccatcaactcattgattgaggtcccagatgatttctatgatcggctccctaggcacagaaaactaataattgttattctgttatcattcagtgcatttctggctcctgtttccagcacttcagtgctagccgcgacgccggagatatctctaattactggttttggtttcattgttgcgagtgttgggactgctctctcgcctaacttgggatctttctttttcttccggctgtttacggcatttgagggaacgtctttcctcctcaatggagctgcagttattagtgatatttttcggccaacagaacgtggaacagctaccggctggttcatgtcggggacgttgattggtccagcctttggcccgtttctcggtggcatcatcgtgaccttcacgtcatggcgcgtgattttttggttacaaacagcactcgctggggctgcaacgatcggagtgtacatcctcatgccggagacgatattccacaagaagagcgatgacttagttggttacgggccgcgtgcaaaggctcgtgctctttcatctatgataaatccatggagagtagtcaaactttacgagtacccaaatgcagatcatgtcgtgaagaaatacatacaaaaacgcggcatccgaattcctgaagaccgtctgtactcggccctaccgttcatgggaattgtgattcccggttcggttctcatttacggatgggccgtagaaaaagatgttggtggaataccactcacggccattgtcctatttgtccaaggactagcgcaattattctgtttcccatctctgaacacatattgtttagatgttatgccaggtcgcggtgcggaggtcattgcaggtaattacgccatacgctacctgttcgctgcaactggtaccgcagttgttctaccagctatcaactccattggagtcggttggttctcgactattagcgtctttttcgtgctcggtggtacagcctgcacatggttaacaacgcagtacggaaagcagtggagagatgccatcgatgccaaacataagaagaaagccctcaagactgatagcttccctaccgaaaagtctgcaaagaaaaaccctgatcccgcacttcctagtgacgacagggaagagaaacagcaggtataa

SEQ ID NO: 25906 - protein, 451 aa, Muscodor strobelii
  misc_feature: SGI Peptide ID NO. 568847
  misc_feature (96)..(368): Pfam Id: PF07690 Pfam Desc: Major Facilitator Superfamily
  misc_feature (119)..(228): Pfam Id: PF07690 Pfam Desc: Major Facilitator Superfamily
  misc_feature (17)..(434): NCBI GI: 145605780 Blast Desc: MGG_06870 [Magnaporthe grisea 70-15] gi|145013568|gb|EDJ98209.1| MGG_06870 [Magnaporthe grisea 70-15]
  misc_feature (43)..(425): NCBI GI: 169597557 Blast Desc: SNOG_01565 [Phaeosphaeria nodorum SN15] gi|160707545|gb|EAT91214.2| SNOG_01565 [Phaeosphaeria nodorum SN15]
  misc_feature (30)..(451): NCBI GI: 256731706 Blast Desc: [Nectria haematococca mpVI 77-13-4]
  misc_feature (14)..(422): NCBI GI: 46136795 Blast Desc: FG09913.1 [Gibberella zeae PH-1]
  misc_feature (75)..(420): NCBI GI: 255942411 Blast Desc: Pc18g01290 [Penicillium chrysogenum Wisconsin 54-1255] gi|211586707|emb|CAP94353.1| Pc18g01290 [Penicillium chrysogenum Wisconsin 54-1255]
  misc_feature (13)..(425): NCBI GI: 189196050 Blast Desc: conserved [Pyrenophora tritici-repentis Pt-1C-BFP] gi|187980242|gb|EDU46868.1| conserved [Pyrenophora tritici-repentis Pt-1C-BFP]
  misc_feature (15)..(420): NCBI GI: 212527164 Blast Desc: MFS transporter, [Penicillium marneffei ATCC 18224] gi|210073137|gb|EEA27224.1| MFS transporter, [Penicillium marneffei ATCC 18224]
  misc_feature (75)..(406): NCBI GI: 259480367 Blast Desc: TPA: MFS transporter, (AFU_orthologue; AFUA_3G11760) [Aspergillus nidulans FGSC A4]
  misc_feature (125)..(406): NCBI GI: 67541208 Blast Desc: AN6774.2 [Aspergillus nidulans FGSC A4] gi|40739402|gb|EAA58592.1| AN6774.2 [Aspergillus nidulans FGSC A4]
  misc_feature (35)..(420): NCBI GI: 242782858 Blast Desc: MFS transporter, [Talaromyces stipitatus ATCC 10500] gi|218720230|gb|EED19649.1| MFS transporter, [Talaromyces stipitatus ATCC 10500]
  misc_feature: Useful for introducing or modulating the production of volatile compounds
MSSDQEMITGLHQQQTEDRAADHSSSNNSIASSHSLHFSSTNDNNGEHLEDLDRCSTRHTAAGDAPIQPINSLIEVPDDFYDRLPRHRKLIIVILLSFSAFLAPVSSTSVLAATPEISLITGFGFIVASVGTALSPNLGSFFFFRLFTAFEGTSFLLNGAAVISDIFRPTERGTATGWFMSGTLIGPAFGPFLGGIIVTFTSWRVIFWLQTALAGAATIGVYILMPETIFHKKSDDLVGYGPRAKARALSSMINPWRVVKLYEYPNADHVVKKYIQKRGIRIPEDRLYSALPFMGIVIPGSVLIYGWAVEKDVGGIPLTAIVLFVQGLAQLFCFPSLNTYCLDVMPGRGAEVIAGNYAIRYLFAATGTAVVLPAINSIGVGWFSTISVFFVLGGTACTWLTTQYGKQWRDAIDAKHKKKALKTDSFPTEKSAKKNPDPALPSDDREEKQQV

SEQ ID NO: 25907 - DNA, 3936 bp, Muscodor strobelii
  misc_feature: SGI EST ID NO. CUFF.61257.1
  misc_feature: Variant of the nucleotide sequence at SEQ ID NO 25905
taagcatcttcgctcctatggtacagtcttcaacgtaacgctcacaaaagtgggcatgtcacaacccaaaatgggctcaatccttgaatcaacggatgttaaaaataagttggaggatctgtcgggtgtcgtgatcaagccaggcgagaacccgtacaatgctctcatcacgacctgcaacaacgacccaacggagatccaagcactataccgggctcatcgtgttcgccgcaatgcgcagcagaagaacaagttcctagatccggacttcaaggagctgatcatcgatccctatctgcttcggatcgaaaatccgcagatagaaccagggttcatagacccacgtcattgtatgactttctggggaagaccgccgattccttgtcttgaattagctggtttgatccagcagaagctgaaggaagtctgtccaaacatatggttaatgccgcagtatcgcatgcatatcactacgttggagctagcattttctcgaacagcggaagaaatagaagcgctcaagagcacaatcagaccttctattccggcaatcgcgaactacacatataagcacagggcacgtctcgtcaaacccatgatctcatacgatctgtccgcttttgcgctctcgttcctgcctgctgccggtgaagctatgttatctgcaccagcggtcgtaaccagcgatgctactatcgagcaagaagaccattacacatatcaccaccttcgacgagatatgtgggatcaggctaaagccgccggcatcatcgtagactcacgatacatcgtccccagtgctcatatcacactaggaagatacttgactgatgtggatcatgctacgccaaagcaaagaaataaatgggtcgaatcaattgacgcgatcaacaactggctagaagatgagatctggggaaatcctaacgccgaagtgattggagaatgggtggttgggcaagagaagggcattgatgtccgggtgggaaacttatggtatggaggtgggcgtacagtcctagctggcgaagggttttagcgacgccatgtttaatctctttcagaataatacaatgatcagacctccgaatatcgacccgaatcattctctaataaaactcccagtaatcagtctggtcaacattcgagtaattcgtaacatgtacattttgctttaatttctagtagatagtggattacggatatgacactatgcgcaagtaaaagtaagagtgtcatttatgccgtgaggaacttgacgcgatagctatctcaaaaatgtttcagaactgtttggataacctccgaatatcattctctctcatcgaaagaagctcagcttgtggcgtagaagcagaagcaggttgagatatgacttcattagatcaccaaattcctgccaatgcaaggagtttgggatgcaagcattgatccggatccttctatagggataaatgaagagataaagtaatagtcaacagaagcataaatatactaagtactatcctaacgatgtcttgctggtaggcggcagcgcaggtgaagtgactcgcaggggaccgatgccgcgccggaaagttctccgaaatggacgggaataagcatcggccaaaacacaactggtggcaagtgtgggggtttatcggtctgcgccgacgaggtctcattcacccacctaatcaagttttggaacataattttgcgctgtgctggacacattcacgaactgtgaggaaagtgtcgcttgtgtgttctaattttcttgcaggagatgcgcaaggttgagagtccaggcctagcgaacggtgcgtcttgggatattatattaatctgtcacgagaccgatctccaaatggcgaactcagtattggttcagcaaatctcaaccgggcacagcccgtgaatggctcgagattttgcaacccaattacggtgaatcgagatatctatcggttagactccggcaccgatctcttcgttccagaaggtgcttgcggaagctcaacaccctaacccaaggtggatagctcagatttagtcaagaactgtcatggccctgaacagcaaagctcagaacccaattcatatacttcatctcagaaccaaatcggggagtaaacgttattgtcagtcaagagacaatatgtgcaacagctgttcagtgctggctgtgtgcccgcgaatcgaagtttccaccgatattcggcgcccagcgtttgcccctgatcgtagcgtatcaacggtttgaaggctcggcaaaagtccgtagacgtttccacttatactccgcttgtcccaatctttacttcgtatcattcgtctcggcttcatttgcgctatcatagttggtaagtagatgatcatattaggagccgaaggaacttctcgggccggtggtagcaagaaatgacggatccgttcgctattttcgccctgtccagtaatcgaaaaacttatcataaggggaacttcacaatttgaactgtctttgcagaggaccactaccactttatcttgtggatcattaactcccgtggatctcaaaactattttgagagtaatagctcgagttaattgaaagaatttgtctagaagtctgcttacgccgggagtactactaaagcggatttgtttgaatgttgaatttttccatctcaatagtatttgttgatttctcttgatgttctctacggtttggtttgtacccttcatcaaaatctttgttagaggcattgcctgtgatgacacgcggactgtcgttatcttggttacaatatctaccgaactattctcaacataaaaccagttgatcaccatacatcaagatgtccagcgatcaagagatgatcactggcttgcatcaacagcagaccgaggaccgcgcggcggatcattcgagcagcaacaacagcattgcatcctctcattcactgcatttctcgtctacaaacgacaataatggagagcatttggaggacttagatcgatgctcgacgagacatacagccgcaggagatgctccgatccaacccatcaactcattgattgaggtcccagatgatttctatgatcggctccctaggcacagaaaactaataattgttattctgttatcattcagtgcatttctggctcctgtttccagcacttcagtgctagccgcgacgccggaggttgctgcgacatatcatacgtcaggggctatctgtaatttagttaacgcactttatctgttgtttatgggactgtcgccatgtttttggggaccaatgagccaagtgtatggacgtcggaatatatctctaattactggttttggtttcattgttgcgagtgttgggactgctctctcgcctaacttgggatctttctttttcttccggctgtttacggcatttgagggaacgtctttcctcctcaatggagctgcagttattagtgatatttttcggccaacagaacgtggaacagctaccggctggttcatgtcggggacgttgattggtccagcctttggcccgtttctcggtggcatcatcgtgaccttcacgtcatggcgcgtgattttttggttacaaacagcactcgctggggctgcaacgatcggagtgtacatcctcatgccggagacgatattccacaagaagagcgatgacttagttggttacgggccgcgtgcaaaggctcgtgctctttcatctatgataaatccatggagagtagtcaaactttacgagtacccaaacattcttctaattggcttctccagctcatcgctagtgtggaacatgtacagcctcttgacaccgattagatatgtgctcaatccgcgatatcatctaacgacaccactccaaggaggtcttttctatcttgctccgggattgggatatctcgcaggtacatttgttggtggacgatggtacgtatagaaag

SEQ ID NO: 25908 - DNA, 969 bp, Muscodor strobelii
  misc_feature: SGI cDNA ID NO. 568848
  misc_feature: Encodes the peptide sequence at SEQ ID NO 25909
atgggctcaatccttgaatcaacggatgttaaaaataagttggaggatctgtcgggtgtcgtgatcaagccaggcgagaacccgtacaatgctctcatcacgacctgcaacaacgacccaacggagatccaagcactataccgggctcatcgtgttcgccgcaatgcgcagcagaagaacaagttcctagatccggacttcaaggagctgatcatcgatccctatctgcttcggatcgaaaatccgcagatagaaccagggttcatagacccacgtcattgtatgactttctggggaagaccgccgattccttgtcttgaattagctggtttgatccagcagaagctgaaggaagtctgtccaaacatatggttaatgccgcagtatcgcatgcatatcactacgttggagctagcattttctcgaacagcggaagaaatagaagcgctcaagagcacaatcagaccttctattccggcaatcgcgaactacacatataagcacagggcacgtctcgtcaaacccatgatctcatacgatctgtccgcttttgcgctctcgttcctgcctgctgccggtgaagctatgttatctgcaccagcggtcgtaaccagcgatgctactatcgagcaagaagaccattacacatatcaccaccttcgacgagatatgtgggatcaggctaaagccgccggcatcatcgtagactcacgatacatcgtccccagtgctcatatcacactaggaagatacttgactgatgtggatcatgctacgccaaagcaaagaaataaatgggtcgaatcaattgacgcgatcaacaactggctagaagatgagatctggggaaatcctaacgccgaagtgattggagaatgggtggttgggcaagagaagggcattgatgtccgggtgggaaacttatggtatggaggtgggcgtacagtcctagctggcgaagggttttag

SEQ ID NO: 25909 - protein, 322 aa, Muscodor strobelii
  misc_feature: SGI Peptide ID NO. 568848
  misc_feature (1)..(322): NCBI GI: 256731757 Blast Desc: NECHADRAFT_69438 [Nectria haematococca mpVI 77-13-4]
  misc_feature (1)..(322): NCBI GI: 261351903 Blast Desc: conserved [Verticillium albo-atrum VaMs.102]
  misc_feature (1)..(322): NCBI GI: 46137333 Blast Desc: FG10182.1 [Gibberella zeae PH-1]
  misc_feature (4)..(322): NCBI GI: 39945974 Blast Desc: MGG_08107 [Magnaporthe grisea 70-15] gi|145019350|gb|EDK03578.1| MGG_08107 [Magnaporthe grisea 70-15]
  misc_feature (1)..(322): NCBI GI: 85075981 Blast Desc: NCU03851 [Neurospora crassa OR74A] gi|28916885|gb|EAA26625.1| conserved [Neurospora crassa OR74A]
  misc_feature (42)..(322): NCBI GI: 171678003 Blast Desc: protein product [Podospora anserina] gi|170937070|emb|CAP61729.1| protein product [Podospora anserina]
  misc_feature (9)..(322): NCBI GI: 189192278 Blast Desc: conserved [Pyrenophora tritici-repentis Pt-1C-BFP] gi|187974084|gb|EDU41583.1| conserved [Pyrenophora tritici-repentis Pt-1C-BFP]
  misc_feature (9)..(313): NCBI GI: 169600703 Blast Desc: SNOG_03196 [Phaeosphaeria nodorum SN15] gi|160705496|gb|EAT89927.2| SNOG_03196 [Phaeosphaeria nodorum SN15]
  misc_feature (26)..(322): NCBI GI: 119497637 Blast Desc: NFIA_032430 [Neosartorya fischeri NRRL 181] gi|119413740|gb|EAW23679.1| conserved [Neosartorya fischeri NRRL 181]
  misc_feature (70)..(322): NCBI GI: 156056060 Blast Desc: SS1G_05382 [Sclerotinia sclerotiorum 1980] gi|154703166|gb|EDO02905.1| SS1G_05382 [Sclerotinia sclerotiorum 1980]
MGSILESTDVKNKLEDLSGVVIKPGENPYNALITTCNNDPTEIQALYRAHRVRRNAQQKNKFLDPDFKELIIDPYLLRIENPQIEPGFIDPRHCMTFWGRPPIPCLELAGLIQQKLKEVCPNIWLMPQYRMHITTLELAFSRTAEEIEALKSTIRPSIPAIANYTYKHRARLVKPMISYDLSAFALSFLPAAGEAMLSAPAVVTSDATIEQEDHYTYHHLRRDMWDQAKAAGIIVDSRYIVPSAHITLGRYLTDVDHATPKQRNKWVESIDAINNWLEDEIWGNPNAEVIGEWVVGQEKGIDVRVGNLWYGGGRTVLAGEGF

SEQ ID NO: 25910 - DNA, 3936 bp, Muscodor strobelii; identical to SEQ ID NO: 25907
  misc_feature: SGI EST ID NO. CUFF.61257.1
  misc_feature: Variant of the nucleotide sequence at SEQ ID NO 25908

SEQ ID NO: 25911 - DNA, 1044 bp, Muscodor strobelii
  misc_feature: SGI cDNA ID NO. 568849
  misc_feature: Encodes the peptide sequence at SEQ ID NO 25912
atgggctcaatccttgaatcaacggatgttaaaaataagttggaggatctgtcgggtgtcgtgatcaagccaggcgagaacccgtacaatgctctcatcacgacctgcaacaacgacccagttaagttcttcatcttgccttacgttgagcgtcgtgtttcataccgagctacggaagagtctccgttcataagcacggagatccaagcactataccgggctcatcgtgttcgccgcaatgcgcagcagaagaacaagttcctagatccggacttcaaggagctgatcatcgatccctatctgcttcggatcgaaaatccgcagatagaaccagggttcatagacccacgtcattgtatgactttctggggaagaccgccgattccttgtcttgaattagctggtttgatccagcagaagctgaaggaagtctgtccaaacatatggttaatgccgcagtatcgcatgcatatcactacgttggagctagcattttctcgaacagcggaagaaatagaagcgctcaagagcacaatcagaccttctattccggcaatcgcgaactacacatataagcacagggcacgtctcgtcaaacccatgatctcatacgatctgtccgcttttgcgctctcgttcctgcctgctgccggtgaagctatgttatctgcaccagcggtcgtaaccagcgatgctactatcgagcaagaagaccattacacatatcaccaccttcgacgagatatgtgggatcaggctaaagccgccggcatcatcgtagactcacgatacatcgtccccagtgctcatatcacactaggaagatacttgactgatgtggatcatgctacgccaaagcaaagaaataaatgggtcgaatcaattgacgcgatcaacaactggctagaagatgagatctggggaaatcctaacgccgaagtgattggagaatgggtggttgggcaagagaagggcattgatgtccgggtgggaaacttatggtatggaggtgggcgtacagtcctagctggcgaagggttttag

SEQ ID NO: 25912 - protein, 347 aa, Muscodor strobelii
  misc_feature: SGI Peptide ID NO. 568849
  misc_feature (1)..(347): NCBI GI: 256731757 Blast Desc: NECHADRAFT_69438 [Nectria haematococca mpVI 77-13-4]
  misc_feature (1)..(347): NCBI GI: 261351903 Blast Desc: conserved [Verticillium albo-atrum VaMs.102]
  misc_feature (1)..(347): NCBI GI: 46137333 Blast Desc: FG10182.1 [Gibberella zeae PH-1]
  misc_feature (4)..(347): NCBI GI: 39945974 Blast Desc: MGG_08107 [Magnaporthe grisea 70-15] gi|145019350|gb|EDK03578.1| MGG_08107 [Magnaporthe grisea 70-15]
  misc_feature (67)..(347): NCBI GI: 171678003 Blast Desc: protein product [Podospora anserina] gi|170937070|emb|CAP61729.1| protein product [Podospora anserina]
  misc_feature (1)..(347): NCBI GI: 85075981 Blast Desc: NCU03851 [Neurospora crassa OR74A] gi|28916885|gb|EAA26625.1| conserved [Neurospora crassa OR74A]
  misc_feature (9)..(347): NCBI GI: 189192278 Blast Desc: conserved [Pyrenophora tritici-repentis Pt-1C-BFP] gi|187974084|gb|EDU41583.1| conserved [Pyrenophora tritici-repentis Pt-1C-BFP]
  misc_feature (9)..(338): NCBI GI: 169600703 Blast Desc: SNOG_03196 [Phaeosphaeria nodorum SN15] gi|160705496|gb|EAT89927.2| SNOG_03196 [Phaeosphaeria nodorum SN15]
  misc_feature (95)..(347): NCBI GI: 156056060 Blast Desc: SS1G_05382 [Sclerotinia sclerotiorum 1980] gi|154703166|gb|EDO02905.1| SS1G_05382 [Sclerotinia sclerotiorum 1980]
  misc_feature (26)..(347): NCBI GI: 119497637 Blast Desc: NFIA_032430 [Neosartorya fischeri NRRL 181] gi|119413740|gb|EAW23679.1| conserved [Neosartorya fischeri NRRL 181]
MGSILESTDVKNKLEDLSGVVIKPGENPYNALITTCNNDPVKFFILPYVERRVSYRATEESPFISTEIQALYRAHRVRRNAQQKNKFLDPDFKELIIDPYLLRIENPQIEPGFIDPRHCMTFWGRPPIPCLELAGLIQQKLKEVCPNIWLMPQYRMHITTLELAFSRTAEEIEALKSTIRPSIPAIANYTYKHRARLVKPMISYDLSAFALSFLPAAGEAMLSAPAVVTSDATIEQEDHYTYHHLRRDMWDQAKAAGIIVDSRYIVPSAHITLGRYLTDVDHATPKQRNKWVESIDAINNWLEDEIWGNPNAEVIGEWVVGQEKGIDVRVGNLWYGGGRTVLAGEGF

SEQ ID NO: 25913 - DNA, 3936 bp, Muscodor strobelii; identical to SEQ ID NO: 25907
  misc_feature: SGI EST ID NO. CUFF.61257.1
  misc_feature: Variant of the nucleotide sequence at SEQ ID NO 25911

SEQ ID NO: 25914 - DNA, 7110 bp, Muscodor strobelii
  misc_feature: SGI cDNA ID NO. 568850
  misc_feature: Encodes the peptide sequence at SEQ ID NO 25915
atgacgaaagcaaagaaaacggtcgtcaaaaagccccaaggctctgatgccgcggataacgatgagcatcaccaaattgaatccgtcgatggcaaagatacttcttcaattctcgatcttagcttagagccgatcaacagccccgagatggcctttcgcgacatgatcaagcggttttccgatgagttgaagctcattgccaacaacaagggcatttcgatcaagatcgccacaatgtgctcaggcaccgaagcgccaatctttgctttgcaaatgctcaaagacgcgttcgatgagggcaacggtatcccttttcttcacttcgaccacgaattcagcgttgagattgtgcctttcaagcaagcatatctcgaacgcaacacagctaagtctaatacgatctttcgagacgtatatgatttcaagtcaaaaaatgccgaggaagctttcacacctttgggcttgaaagctaagattccaaaggacattgacgtgcttgttgctggaacctcatgcgttgacttctcaactttgaacaacaagaaacaatcatctatgggcgactttgttgacgatggatccaaacttctgcaagaatggcgcgattgggtcgataaagtccaaccgacaggtggtaggcgctctaagaaaggaagcaaccgcgcgaacaacattcccgacaatcctgaccagacagaacccaggcccaactattgggcggaagctgagaactacgtcttgcatttcggcaaacttagcggagaagttggtgatgacaagcttttgggtcagtcgaccctgacgttcctctcagtgttgaattatgcccactggcatcgcccaaaggtcatcattttggagaatgtgaacggtgcaccctggaaagatatctgcggattcttcttccccgccgttgggtaccgtgctgtgtatgagcatgttgacagcaaggacttctacactcctcagactcggacacgaggatatgcagtcgccgtggatctcaaggtttttggtgctaatgcagacgagattctcgagacgtggaaaacattgatggctggcgagctcagacgccgagcatcatcttcgatctctcagtggcttcttcctccgaacgacccctttgcactccgtgctcgccaaagtgacacagaagtggcgttgtcaaagtctaagaagaaagaagatgtttgggaacgtagcgaactgcgtcattaccgaaccaggcgaaatctggatcttggccagagcaacccaatcactggttggaaattgggtactgatcacccgccctacgatcgaatggaccgtttgatcaaagggctctggagcaccagagctttagattgcatcgatatgattcatctgagctgtctgagaaccggtacaaccgagagaaatcccgacacacgctttgatatgcgcttcaaaacgcaagtctacgatattagccaaaatattgatcgcactttggtatccaaaaactttggagtgagcatctgcttgactccgaatggcgcagcattcatcaccgatcaggtgcgccccgtgtctggctacgaatatcttcgacttcaagggctacccctgcagagcctagacctgatgaaagagacccaggaacaacttcgagacctcggtgggaatgccatgaccacgacagtcattggagctgccttccttgcgttatttcgcagcattaggcaagctagtcccgacttgagcaaatggttccgtacaatatcctcggaggaggcaaaaatgcctttcgagatacactctgacgaggagtcattctccagactcagagacgccaaaggagtcgtcattccgctcaaatcccatgcagtatattctttggacataccaacacgtaaccaggatttgctcatcaatgtagccaaacgagccaggcgatattgtttctgcagccaaagtgccaaatacagctccgaaaatctcaaatactgcgttgaatgtggcactattcgttgtcaggcatgcttgggcaacccacgccattactaccaagactatccagcagtccatagtccaattctatatgatacagtattgaaagagactatggaatatctccccgtcggtctctgcgacatttttgggaactcctgggaaaatttcaaggagcacttccagggccgagaaggagaggctctagaggaactccatgaatcactaataggagcagttttctactttgaacaaattctcgtcacggagcagctgactgtatgctactctaatcgggatgccgattgtgtcctcaacttgcagtgtgtcattgactgcgagaagatcatttggtatttgtacgtagatccctggtgtacagttggacgggagtttcgcgaaggactcaaaatttccgcggataagctttgccatccttttgctcgtcttccaatcgcaaaggataccaaagtctacgtcccggcaaagtctgtgtgggacctctggaacttcacgaagactgagctcacgatcaaagtcacacgacctcaacccgaacagataaagatcgaagcacttgaagatttggaggaccgtgaggaatctgaatgtctcgagcgcatcgaaggcttatatgttcatcggccagaatgcgatgttgcccagaatagcctctatgtgctcgagaaaaacagatttggggaacgcatattccttttcaaggatcccacgaaagtcatggcacctgagaccgatcgttttgtcatcgctcatgactgtagagttcttgacgtccatgaatttcgccagggtctattcacatttccccaattgtggaacgcggcttctgctgaagagcttatcactggctacatccctggacattggcgtccgttttctgctgcaaatcttagaatcgaccgacagagcttaccttctcgatctcggtattgcgtgggaagaatgcttatccccgaagatgatcatgaggacgataatcttcctgttcgccactattcacagcaatttgaacttggaatgaagccatcgcttttggccgagttgacgcttcctccacaatcccagcatgagaagcttggagccttgtctaaatacaagtcagtgcgaggagatagatgggctctagtccccaaaaaggactactcggttgtctttgataacttcgctccgctaaacaccgtactccaccgcagcggtctaggagccttcaagtttgagatttctgacaacggcggagatggtatcaaatatgaaaatacggctatgtccactgtcgagtggctacaagtcaatacggaaaaagacagctggcgagagccatatcgctcatctgaagttgtgaagatgtatgagcacaatatccgaagtcgtcgtcaagcgcccttcaaaatgctcctccaaaccaatgctgaatcggagatgaaggttcgttactgcgttcagccagatgaactagtacttgatgcaatatcattcctccggagcgccagccgatccaccgagcccatcaaatcctcagtagaagtctcatccggcgagctgaatgtacctcagatgaagttcgattcgttcaagaaatatctcaaaccccttccgtctcatttgcctacagaaacacgccgtactgcatcttttgtgaatgacaagaagttgagcccccagcaagaggtttcactcacctggatgtttaatcaagagcgcggcgagaaccaatacgtcgagaaagaaatccaagagcacggaattgaaacactgaatctccgagtcgctggtaaagctgagagacctatcctgatccgaggtggtgtactggcggatcaggtgggctatggtaaaacgataatctcactggctctcatgcaacaaggcgagaaagagagcttcgattcaaactcatccgtaagcggtcaaaaagccacagacgaggatgttctcgcgttgtcctgttctcttgtcattgcgccaggacatctcgtgaagcagtggactagcgaagctgaagcattcctgggttggacgaacaaagaggtcatcacgatcaacacctctaaggaccttcacttaccaatgctacaaagcaaattattcctcgagcgcatgaaaaaagcgaagctagtgatcgttagtactgaggtgtttgatcggaactattatacgtaccttgctaaatacgcgggagcttttgatccaccctcgcctggcaagctgcctagtatcccaggcgacgacttggtggtagaggcatttaagcattggtacgagcatgcagtaggacgtgctcgtaagaatgtcaacggttttgatcctcaaacattcaacttggacaagatcgatcccatcaagagccaaatgcaggaactggtttccagagacaccgctcttttgaacgactactgtgttgtgcacggccacgttgtccaagaaggtaaagattgtgaggaatgcatgtatacaccatccactccgtcgtcaatacagccagaagatgttgtcaccaatatcttccatattctggaatcgttctcatttacccgcgtgttctacgacgaattttcttacgaaaatccatgcgcatcttactttttcaagaataccattgcgtattctagatgggtcctatctgccacggcgccaacagccgatctcaaagctgtctgttccatagcagagcttttgggcgtgcatgttgcacgaccagcgatgatgcgtcctggtctgcctctcattaccaggggcccagcaaatatcagcaagtcatcagcggaccagcaccttgcctttaatacgttccattctgacaggggcgtacgtatgcgcatggagcaaggcgctacctttcttgagaaatttgccagcgcaaattcattcgaccatgaaggtctcggggccatccaggtgacacagaccgttcacgtatgctgctccactcttggagagctcgctgggtatctagatctcttgagagctcttcgagacgcggagttcgaagtgaagaagacattgaaacatggcggtctcaaatatttgaatgcgtcagagcagatttctgccggcgagctcttagcgtatacagcatctgtcttcagtggactctactacgtgagtcctagaaccctgctgcaaagacgaatgtcggaccttgtactcgctcagaaaagcttgaagcgaatcatcgatgtgtccatttggctcgtcctccgccgaaacaaggagcttagccgtgcagctaacgttaggaccgtcaaaaccaacccatccgctacgtcagccatagaggacttggtatatttcttccaagccattcgcagacaagaagcaggcactctcggcggtacagacgaactggaagccattactcatgctctattcatcgacggacttgtcccgagtgacattccagcagtcgacgactttaccgacgaagaatccagcaaagtattattcaactggttagacactacgactgccagacattcatctcccttcttccggtcagcggcttgggcatcatatctgccagtgacgcagagaaatatcaactccattgatgcccgtgatgcgacagatttgttgcgtgacctggtgggcagattagacattacggaaatgtctgagtttatgcgaatggactttacaaccctgaaaagcctgggaatcgacaagttcaacgacgaagagcgacgacgtttgctcagttattttctgaccggattaagcagcgtgaaagtccgcacgaagaagagaccgcaaacgaaaaagagaccgggcgcagttgatgattccagtgtatatttacagaacgaggaggtcttcgagactgcaaagttcccaatgtatgggggaaccttcagggtccgggggtctacctacacagagacggaagcacaactagtcgagatcaatatggagtttaatcgtgctcggcagaatgtcgctaaactagcgagacaggttcgagccatcgaatctttgttctacggcaagcgagggtcacgcaaatgctatgtctgtaaaggcaacgatgatcttcagttggttccagagtgtggtcacattgtttgtgccgcacacatcgcggacaatgaagtccgcctctgcggagacatccgaggcactgaccatttgggaggcagtggttgctcagctttgctcagaaatcgagtgattcccgtcgagcaaatcgacaattgtcaaaacgaagaagatcagccactcgatgtcggagaaggccctcaagacttgctcactgatgaggagatgttgaaactactctggacaaaccttcccaagaaacatcaggataaccttcctgacccattcccttccatcgtcatggaccaggtcccaagtattgacaatgactccaaaacttcagattcagacgatggcacaaataatgtgcccagcccgtcagctcaagatatagtgggacaagggtcaactactaaaggccactccagctcaggcctctcccgtcacctcagctcgaagacaattgcaatcatcgagaagattcactatattgttacgcatctgaatgaacgagcccttgtgttctatcaattcgatagacagctggaagagttgagtagtggtcttaacagaatcggcattgagcataaggttcttgcagcgccaaagacgaaattccaggttgaggatggcgcaactcctaattctgccgtcagattcatgaagattgacgcagtggaggctgctggttcgaaccttcaagacgcgaatcacgttattttcacgagcgcaccggtcttctctcgacaggaagatttcgatgcgtacgtcaaccaggcaaagggccgagctattcgtcacggacagaagaagcacgtccaggtatactggtatttgagtgcaaataccttcgaggtcgacctccttcaacttcgacttcgatcacatattcgactccgccgcggcgaggatgaagcacaggttatcccttgggcttcagaggataagaaagacgagacgacggatacagttgatgacggcagtgccgaatatatcaacatcacctcatccctctctaaagatgagatttggcgcctcacagatgagaagaactggctcgtgcagcaagccatcgagttctaa

SEQ ID NO: 25915 - protein, 2369 aa, Muscodor strobelii
  misc_feature: SGI Peptide ID NO. 568850
  misc_feature (74)..(566): Pfam Id: PF00145 Pfam Desc: C-5 cytosine-specific DNA methylase
  misc_feature (242)..(1397): NCBI GI: 169849243 Blast Desc: CC1G_00872 [Coprinopsis cinerea okayama7#130] gi|116507593|gb|EAU90488.1| CC1G_00872 [Coprinopsis cinerea okayama7#130]
  misc_feature (242)..(1397): NCBI GI: 170086666 Blast Desc: [Laccaria bicolor S238N-H82] gi|164649756|gb|EDR13997.1| [Laccaria bicolor S238N-H82]
  misc_feature (262)..(1396): NCBI GI: 238842207 Blast Desc: DNA repair protein rad8 [Microsporum canis CBS 113480]
  misc_feature (17)..(954): NCBI GI: 171677999 Blast Desc: protein product [Podospora anserina] gi|170937068|emb|CAP61727.1| protein product [Podospora anserina]
  misc_feature (263)..(1429): NCBI GI: 255941182 Blast Desc: Pc16g10500 [Penicillium chrysogenum Wisconsin 54-1255] gi|211585983|emb|CAP93720.1| Pc16g10500 [Penicillium chrysogenum Wisconsin 54-1255]
  misc_feature (263)..(1400): NCBI GI: 145246596 Blast Desc: An12g04770 [Aspergillus niger] gi|134080265|emb|CAK97168.1| protein product [Aspergillus niger]
  misc_feature (478)..(1426): NCBI GI: 116201631 Blast Desc: CHGG_08700 [Chaetomium globosum CBS 148.51] gi|88177218|gb|EAQ84686.1| CHGG_08700 [Chaetomium globosum CBS 148.51]
  misc_feature (263)..(944): NCBI GI: 121698875 Blast Desc: C-5 cytosine-specific DNA methylase, [Aspergillus clavatus NRRL 1] gi|119395977|gb|EAW06409.1| C-5 cytosine-specific DNA methylase, [Aspergillus clavatus NRRL 1]
  misc_feature (38)..(744): NCBI GI: 258574543 Blast Desc: [Uncinocarpus reesii 1704] gi|237901719|gb|EEP76120.1| [Uncinocarpus reesii 1704]
  misc_feature (262)..(944): NCBI GI: 71001130 Blast Desc: SNF2 family helicase [Aspergillus fumigatus Af293] gi|66852884|gb|EAL93208.1| SNF2 family helicase, [Aspergillus fumigatus Af293] gi|159129330|gb|EDP54444.1| SNF2 family A1163]
MTKAKKTVVKKPQGSDAADNDEHHQIESVDGKDTSSILDLSLEPINSPEMAFRDMIKRFSDELKLIANNKGISIKIATMCSGTEAPIFALQMLKDAFDEGNGIPFLHFDHEFSVEIVPFKQAYLERNTAKSNTIFRDVYDFKSKNAEEAFTPLGLKAKIPKDIDVLVAGTSCVDFSTLNNKKQSSMGDFVDDGSKLLQEWRDWVDKVQPTGGRRSKKGSNRANNIPDNPDQTEPRPNYWAEAENYVLHFGKLSGEVGDDKLLGQSTLTFLSVLNYAHWHRPKVIILENVNGAPWKDICGFFFPAVGYRAVYEHVDSKDFYTPQTRTRGYAVAVDLKVFGANADEILETWKTLMAGELRRRASSSISQWLLPPNDPFALRARQSDTEVALSKSKKKEDVWERSELRHYRTRRNLDLGQSNPITGWKLGTDHPPYDRMDRLIKGLWSTRALDCIDMIHLSCLRTGTTERNPDTRFDMRFKTQVYDISQNIDRTLVSKNFGVSICLTPNGAAFITDQVRPVSGYEYLRLQGLPLQSLDLMKETQEQLRDLGGNAMTTTVIGAAFLALFRSIRQASPDLSKWFRTISSEEAKMPFEIHSDEESFSRLRDAKGVVIPLKSHAVYSLDIPTRNQDLLINVAKRARRYCFCSQSAKYSSENLKYCVECGTIRCQACLGNPRHYYQDYPAVHSPILYDTVLKETMEYLPVGLCDIFGNSWENFKEHFQGREGEALEELHESLIGAVFYFEQILVTEQLTVCYSNRDADCVLNLQCVIDCEKIIWYLYVDPWCTVGREFREGLKISADKLCHPFARLPIAKDTKVYVPAKSVWDLWNFTKTELTIKVTRPQPEQIKIEALEDLEDREESECLERIEGLYVHRPECDVAQNSLYVLEKNRFGERIFLFKDPTKVMAPETDRFVIAHDCRVLDVHEFRQGLFTFPQLWNAASAEELITGYIPGHWRPFSAANLRIDRQSLPSRSRYCVGRMLIPEDDHEDDNLPVRHYSQQFELGMKPSLLAELTLPPQSQHEKLGALSKYKSVRGDRWALVPKKDYSVVFDNFAPLNTVLHRSGLGAFKFEISDNGGDGIKYENTAMSTVEWLQVNTEKDSWREPYRSSEVVKMYEHNIRSRRQAPFKMLLQTNAESEMKVRYCVQPDELVLDAISFLRSASRSTEPIKSSVEVSSGELNVPQMKFDSFKKYLKPLPSHLPTETRRTASFVNDKKLSPQQEVSLTWMFNQERGENQYVEKEIQEHGIETLNLRVAGKAERPILIRGGVLADQVGYGKTIISLALMQQGEKESFDSNSSVSGQKATDEDVLALSCSLVIAPGHLVKQWTSEAEAFLGWTNKEVITINTSKDLHLPMLQSKLFLERMKKAKLVIVSTEVFDRNYYTYLAKYAGAFDPPSPGKLPSIPGDDLVVEAFKHWYEHAVGRARKNVNGFDPQTFNLDKIDPIKSQMQELVSRDTALLNDYCVVHGHVVQEGKDCEECMYTPSTPSSIQPEDVVTNIFHILESFSFTRVFYDEFSYENPCASYFFKNTIAYSRWVLSATAPTADLKAVCSIAELLGVHVARPAMMRPGLPLITRGPANISKSSADQHLAFNTFHSDRGVRMRMEQGATFLEKFASANSFDHEGLGAIQVTQTVHVCCSTLGELAGYLDLLRALRDAEFEVKKTLKHGGLKYLNASEQISAGELLAYTASVFSGLYYVSPRTLLQRRMSDLVLAQKSLKRIIDVSIWLVLRRNKELSRAANVRTVKTNPSATSAIEDLVYFFQAIRRQEAGTLGGTDELEAITHALFIDGLVPSDIPAVDDFTDEESSKVLFNWLDTTTARHSSPFFRSAAWASYLPVTQRNINSIDARDATDLLRDLVGRLDITEMSEFMRMDFTTLKSLGIDKFNDEERRRLLSYFLTGLSSVKVRTKKRPQTKKRPGAVDDSSVYLQNEEVFETAKFPMYGGTFRVRGSTYTETEAQLVEINMEFNRARQNVAKLARQVRAIESLFYGKRGSRKCYVCKGNDDLQLVPECGHIVCAAHIADNEVRLCGDIRGTDHLGGSGCSALLRNRVIPVEQIDNCQNEEDQPLDVGEGPQDLLTDEEMLKLLWTNLPKKHQDNLPDPFPSIVMDQVPSIDNDSKTSDSDDGTNNVPSPSAQDIVGQGSTTKGHSSSGLSRHLSSKTIAIIEKIHYIVTHLNERALVFYQFDRQLEELSSGLNRIGIEHKVLAAPKTKFQVEDGATPNSAVRFMKIDAVEAAGSNLQDANHVIFTSAPVFSRQEDFDAYVNQAKGRAIRHGQKKHVQVYWYLSANTFEVDLLQLRLRSHIRLRRGEDEAQVIPWASEDKKDETTDTVDDGSAEYINITSSLSKDEIWRLTDEKNWLVQQAIEF

SEQ ID NO: 25916 - DNA, 795 bp, Muscodor strobelii
  misc_feature: SGI cDNA ID NO. 568851
  misc_feature: Encodes the peptide sequence at SEQ ID NO 25917
atgctcgtccgaacagtcccaatagaagaacccatagccctcactgccgtgccactgactcgtgctgcattcgcaaatttcggcgatgtagtggcaaatccgcggccagatgtgcgtccatccaatacaccgcctgaagtgatcgcgcggggcgatctaccatgcggtgccgtatctgcgaatcagggaaccgcaatccaataccgtgcgattgccaccatgcgaaatctctctgcctcggcttcaacgcccgcaacacccaggatgaccatgttcgttagtgaggcacggaaactagagccaagtgatgtaagcggcaaggtgaacgcaatacctgatagcattgagatcaaagtactcgagcgccacccttttaccacgcagacattcataccgctcacagccgacaaaacaaaacgatacatcgtcgtggtttcgcctactttacctgattctgaagacaaacatgatttgcctgccccctcgccaagctccgtggagttgggaggatggaagtcaccaggaaacggcctcccagatctagcaggtttaagggctttcatcgcaacgggcgagcaggctgtcacctatggagcgggtacgtggcatgcgcctatgatcgctttagggcctaataatacgacgattgacttcgttgttgtccaattctctaatgacgtacccctcgaagactgtcaggaggtttctcttacggggagcgacgtaagggaggagaaagcaaggattatgattcgtattcctgagcaggcgacgaaagcacttgcgaagttgtaa

SEQ ID NO: 25917 - protein, 264 aa, Muscodor strobelii
  misc_feature: SGI Peptide ID NO. 568851
  misc_feature (14)..(245): Pfam Id: PF04115 Pfam Desc: Ureidoglycolate hydrolase
  misc_feature (175)..(245): Pfam Id: PF04115 Pfam Desc: Ureidoglycolate hydrolase
  misc_feature (58)..(147): Pfam Id: PF04115 Pfam Desc: Ureidoglycolate hydrolase
  misc_feature (11)..(250): NCBI GI: 39945976 Blast Desc: MGG_08108 [Magnaporthe grisea 70-15] gi|145019351|gb|EDK03579.1| MGG_08108 [Magnaporthe grisea 70-15]
  misc_feature (12)..(253): NCBI GI: 171678025 Blast Desc: protein product [Podospora anserina] gi|170937081|emb|CAP61740.1| protein product [Podospora anserina]
  misc_feature (12)..(244): NCBI GI: 46137333 Blast Desc: FG10182.1 [Gibberella zeae PH-1]
  misc_feature (12)..(257): NCBI GI: 261351888 Blast Desc: ureidoglycolate hydrolase [Verticillium albo-atrum VaMs.102]
  misc_feature (12)..(235): NCBI GI: 85075976 Blast Desc: NCU03850 [Neurospora crassa OR74A] gi|28916884|gb|EAA26624.1| conserved [Neurospora crassa OR74A]
  misc_feature (12)..(254): NCBI GI: 256731757 Blast Desc: NECHADRAFT_69438 [Nectria haematococca mpVI 77-13-4]
  misc_feature (8)..(264): NCBI GI: 156037558 Blast Desc: SS1G_12493 [Sclerotinia sclerotiorum 1980] gi|154697901|gb|EDN97639.1| SS1G_12493 [Sclerotinia sclerotiorum 1980]
  misc_feature (8)..(237): NCBI GI: 169618098 Blast Desc: SNOG_12237 [Phaeosphaeria nodorum SN15] gi|111059529|gb|EAT80649.1| SNOG_12237 [Phaeosphaeria nodorum SN15]
  misc_feature (19)..(244): NCBI GI: 189194705 Blast Desc: conserved [Pyrenophora tritici-repentis Pt-1C-BFP] gi|187979255|gb|EDU45881.1| conserved [Pyrenophora tritici-repentis Pt-1C-BFP]
  misc_feature (12)..(237): NCBI GI: 119484240 Blast Desc: ureidoglycolate hydrolase, [Neosartorya fischeri NRRL 181] gi|119410179|gb|EAW20126.1| ureidoglycolate hydrolase, [Neosartorya fischeri NRRL 181]
  misc_feature (10)..(233): SWISSPROT Homolog: EC 3.5.3.19 Ureidoglycolate hydrolase
MLVRTVPIEEPIALTAVPLTRAAFANFGDVVANPRPDVRPSNTPPEVIARGDLPCGAVSANQGTAIQYRAIATMRNLSASASTPATPRMTMFVSEARKLEPSDVSGKVNAIPDSIEIKVLERHPFTTQTFIPLTADKTKRYIVVVSPTLPDSEDKHDLPAPSPSSVELGGWKSPGNGLPDLAGLRAFIATGEQAVTYGAGTWHAPMIALGPNNTTIDFVVVQFSNDVPLEDCQEVSLTGSDVREEKARIMIRIPEQATKALAKL

SEQ ID NO: 25918 - DNA, 1002 bp, Muscodor strobelii
  misc_feature: SGI cDNA ID NO. 568852
  misc_feature: Encodes the peptide sequence at SEQ ID NO 25919
atgatggaaataggcacggcgaaagaggcgaagccaggaccacagacacctttgcttgagcaggcgctatgtccagacaccagcgaattcgggtccaaagggttgactaagaagattctttacataccatatctaatatgggcatttacggaaagcaatttcgatacctttgtcttgcccaacacagcattcggtgttctcggtgcctgtgccgctcccgtactgattgagggtttccaacaacaacctacagcctatgagataatatggcgctactcacttgcattggtctttaattggctcaatgtcttaatattcgaccttgcgaatcaacgatcccccgaatccatccaagaagacctcatcaacaagccctggcggcccataccaactggcaaggtcactgcagcacaaactcgtcggtttatgttgggtgctataccaattgctcttttgttcaactatcttctcggggtctggaggcagggcttgttcatactcatactcacctggctatataatgatttacggggaggtgacgaggtcgtccgcgatctgatcatctccctagcctacggcatgttcaacagcgcgtccctagaaattgcaataggaggcggtgaatataccgacttgcacatcagttaccgaggaatggtctggacggctatgatcagtggtgtcatcttgacaacgatgcaagttcaggacctgaaggaccaagccggagatcgcactcgcggtcgtcagaccattgcgctctggcttggcgatcgattctcgcgaatgtcgattgcattcttcatctgcgtttggtccgtcgcctgcttgatattctgggatctcaatccaattggacttgtagttccagccacatcaggcgcaatcacagcttggcgcgttgtctttaagaccacgtcaaaggaagatgctaccacgtggcgatggtggtgtttttggaccatcacgctctacctcttacccgtcattagtgttttatga

SEQ ID NO: 25919 - protein, 333 aa, Muscodor strobelii
  misc_feature: SGI Peptide ID NO. 568852
  misc_feature (42)..(331): NCBI GI: 121720150 Blast Desc: conserved [Aspergillus clavatus NRRL 1] gi|119404985|gb|EAW15347.1| conserved [Aspergillus clavatus NRRL 1]
  misc_feature (14)..(331): NCBI GI: 171683724 Blast Desc: protein product [Podospora anserina] gi|170941822|emb|CAP67475.1| protein product [Podospora anserina]
  misc_feature (38)..(299): NCBI GI: 145257245 Blast Desc: An04g02940 [Aspergillus niger] gi|134058573|emb|CAK96460.1| protein product [Aspergillus niger]
  misc_feature (42)..(329): NCBI GI: 154313037 Blast Desc: BC1G_05520 [Botryotinia fuckeliana B05.10] gi|150849605|gb|EDN24798.1| BC1G_05520 [Botryotinia fuckeliana B05.10]
  misc_feature (83)..(329): NCBI GI: 171678385 Blast Desc: protein product [Podospora anserina] gi|170937262|emb|CAP61919.1| protein product [Podospora anserina]
  misc_feature (46)..(301): NCBI GI: 145237052 Blast Desc: An07g00810 [Aspergillus niger] gi|134075638|emb|CAK39304.1| protein product [Aspergillus niger]
  misc_feature (14)..(333): NCBI GI: 85083377 Blast Desc: NCU05126 [Neurospora crassa OR74A] gi|28881416|emb|CAD70533.1| [Neurospora crassa] gi|28918197|gb|EAA27876.1| [Neurospora crassa OR74A]
  misc_feature (64)..(333): NCBI GI: 169594564 Blast Desc: SNOG_00008 [Phaeosphaeria nodorum SN15] gi|111070383|gb|EAT91503.1| SNOG_00008 [Phaeosphaeria nodorum SN15]
  misc_feature (44)..(330): NCBI GI: 119495957 Blast Desc: NFIA_015490 [Neosartorya fischeri NRRL 181] gi|119412915|gb|EAW22856.1| conserved [Neosartorya fischeri NRRL 181]
  misc_feature (44)..(330): NCBI GI: 70995239 Blast Desc: conserved [Aspergillus fumigatus Af293] gi|66850017|gb|EAL90344.1| conserved [Aspergillus fumigatus Af293] gi|159131136|gb|EDP56249.1| conserved [Aspergillus A1163]
MMEIGTAKEAKPGPQTPLLEQALCPDTSEFGSKGLTKKILYIPYLIWAFTESNFDTFVLPNTAFGVLGACAAPVLIEGFQQQPTAYEIIWRYSLALVFNWLNVLIFDLANQRSPESIQEDLINKPWRPIPTGKVTAAQTRRFMLGAIPIALLFNYLLGVWRQGLFILILTWLYNDLRGGDEVVRDLIISLAYGMFNSASLEIAIGGGEYTDLHISYRGMVWTAMISGVILTTMQVQDLKDQAGDRTRGRQTIALWLGDRFSRMSIAFFICVWSVACLIFWDLNPIGLVVPATSGAITAWRVVFKTTSKEDATTWRWWCFWTITLYLLPVISVL

SEQ ID NO: 25920 - DNA, 2902 bp, Muscodor strobelii
  misc_feature: SGI EST ID NO. CUFF.61223.0
  misc_feature: Variant of the nucleotide sequence at SEQ ID NO 25918
cactactctaagcctggcaaccttcatgaacttgctacggaatcaaccacgtcaatccttgtccgattcgtctcgacaacgacataattaacgcgcagtggtcgcggcctcctgagccgaatcatggagggcgggtagcgcggagcgaaagagatatctcgcgaacaacagccggatgctatgacccttctaggaatcgggcctccacatgtcttcacagttccgaagctaaaggagacgaacgttgatggcagagtggcagatatacaaattaacaacaccacttgaagccatcgtcacttcttgagcgccctgaattgggccatgtgcttgatctcggctcggtgacaacaacacagggacatggcactatggtacggttacattctacccacataagccgaggatacctacataccggtgcgtagagaatatggcgatcaaagaaaaagtcagccaacgatcaaaattttgtgtggcaagacggcagagtgcgactgcaactaacactctgggtgttcaatactcctttctgactcgtggcgaagaggtcagacatggggtcaaatgcagattacagaatatgccgccaccagcaagtagataaggtagtcaactggagcttgaaatgcgtcacgaattgttctctcaatgagggggttcagctaacggtatttacctactaatgagactacttccaagacgaaaggaacaggtgagattcgccaaccgcaacactcgaattgattgcacgatagccttctactcgcccagtccgctcgtattcaatggcatctcggcagccaagtaattatctgtctattccttgcgagatgtcatttccaaattggcacatatctccaacttgtaacgggactattgacactgacagacccactcctggtcgatacattagtaccatcctcaaccctgtccggccttgtcggtactgtgagttttcacttatgaagtcccgtttctgcaatttgccctctgcagctaaaggacagcaccactgcatcggtcccgttccgtcttctgtacaagcaccgatgtacctatttccttcttagttcgtcattgaatgtacctccagacatgtgcatggcaaacagggagatgcgacccatccctataagtatgtcatgcctccgtgcccttggcgattctggctggccattgactggttcaaatgtgtatgtccatcacgagtctaagtctgagttaacttagtcgacacgatatgattcaaactcttatgggctgtcgaaacatcgatattgtaggaaaagtaaagcaggactcactcgtggacattgaaggtttctgttccttactgatcttctatcgacgttgatgcccgctgttccgccatactgcttgagtttgccaaactcccaagaaagagagtgtcaagcgtcgaaactaccttgggccttctatcccgttccggccgactgaggagaatgatggaaataggcacggcgaaagaggcgaagccaggaccacagacacctttgcttgagcaggcgctatgtccagacaccagcgaattcgggtccaaagggttgactaagaagattctttacataccatatctaatatgggcatttacggaaagcaatttcgatacctttgtcttgcccaacacagcattcggtgttctcggtgcctgtgccgctcccgtactgattgagggtttccaacaacaacctacagcctatgagataatatggcgctactcacttgcattggtctttaattggctcaatgtcttaatattcgaccttgcgaatcaacgatcccccgaatccatccaagaagacctcatcaacaagccctggcggcccataccaactggcaaggtcactgcagcacaaactcgtcggtttatgttgggtgctataccaattgctcttttgttcaactatcttctcggggtctggaggcagggcttgttcatactcatactcacctggctatataatgatttacggggaggtgacgaggtcgtccgcgatctgatcatctccctagcctacggcatgttcaacagcgcgtccctagaaattgcaataggaggcggtgaatataccgacttgcacatcagttaccgaggaatggtctggacggctatgatcagtggtgtcatcttgacaacgatgcaagttcaggacctgaaggaccaagccggagatcgcactcgcggtcgtcagaccattgcgctctggcttggcgatcgattctcgcgaatgtcgattgcattcttcatctgcgtttggtccgtcgcctgcttgatattctgggatctcaatccaattggacttgtagttccagccacatcaggcgcaatcacagcttggcgcgttgtctttaagaccacgtcaaaggaagatgctaccacgtggcgatggtggtgtttttggaccatcacgctctacctcttacccgtcattagtgttttatgaaactcgacctaatcctcggggccacaatccttaacgaatctatccttcctaatgattaaccaacgattctatatttcaaggcggcggcgtggaggtatcctcttttagcgttcaagggctcatcccttatccagcggcgtgttatgtgtttgggatactttattttgttttgcataaggcggcatgacttggcgtttttgtctatgataccactgcttagattcctcacgatgaacacaacatatacccctaaatgatagtaacttgagcaatactttatcactttgtatcaatctagagtcaacgtaacgtgctcattatgagaatttacagctctaaaaggtcaattccagtaccatctcaggtgcccgactcggcattgtttgcatttactacgacaaatgtgggcgcttagtttccatccgacgctgttg

SEQ ID NO: 25921 - DNA, 600 bp, Muscodor strobelii
  misc_feature: SGI cDNA ID NO. 568853
  misc_feature: Encodes the peptide sequence at SEQ ID NO 25922
atgctggcgacgtccctcgctatctccgcagtgttcgcggcgcccacggagatcgagagccgacaagtcggagatcataccatgggcttcatcgggtgctcaatgagcgagaatgttgcgcaaggttacgtcgccgtcggtggcaagcgtatgtggggtccctacggaacaggcgggctcgtcgtgcagtcgtggacggacgtgaactcggcgtcgtggaagttatttgatcagcaagtagccaagtacggcaagccggacactgtctgggtacagatttgtatcttcgccaatccaggtgcatcctatgccgaggtcaagcagctgattgccaatgcgcgcactcattcggcccctaatgccaccatctacatcaccggccagcctcagtacgacccaggacaatcttgtttcctcgccggtaccggcggtgccgagctcacagataatttggctaggcaggccgccaatgacactactcagagcgtgaagtaccctggcagcttcattctgcacaaagctgaagtccaggatgggtgtcacgccaacactgccggtcagtcatcgctaggtaaacaagctatcgctttctggggatag

SEQ ID NO: 25922 - protein, 199 aa, Muscodor strobelii
  misc_feature: SGI Peptide ID NO. 568853
  misc_feature (1)..(199): NCBI GI: 171682972 Blast Desc: protein product [Podospora anserina] gi|170941445|emb|CAP67096.1| protein product [Podospora anserina]
  misc_feature (24)..(199): NCBI GI: 162455766 Blast Desc: exported glycine-rich protein [Sorangium cellulosum 'So ce 56'] gi|161166348|emb|CAN97653.1| exported glycine-rich protein [Sorangium cellulosum 'So ce 56']
MLATSLAISAVFAAPTEIESRQVGDHTMGFIGCSMSENVAQGYVAVGGKRMWGPYGTGGLVVQSWTDVNSASWKLFDQQVAKYGKPDTVWVQICIFANPGASYAEVKQLIANARTHSAPNATIYITGQPQYDPGQSCFLAGTGGAELTDNLARQAANDTTQSVKYPGSFILHKAEVQDGCHANTAGQSSLGKQAIAFWG

SEQ ID NO: 25923 - DNA, 1287 bp, Muscodor strobelii
  misc_feature: SGI cDNA ID NO. 568854
  misc_feature: Encodes the peptide sequence at SEQ ID NO 25924
atgactgtccccgacaccgtattagatgttctcagcccgttaccaccggtgattaggacgggatctattgccatcagcgtcttcgcttacttgtcgttcttctcggcgcttattttattttcataccttacctacaagatcgtgtcatggcaactggggagatcggatcgcaaagatcgtaagaaaagtgcagctgggcacagatttgcgaatgggccaaacgagttcgggccgcggcacgacgctgcaaaactcacatcggtttcgagggagacagacgtggaaatggtggctcctcgtgctccaaatcaatttatggtccttatcatcaacctcctggtggctgatctgcttcaagcaactgccttccttttgagctccgcttgggttgcacgagatggcatatgggttcatactgcgatctgcttcacgcagggcttgttcatctctgtaggggatctagcatccagctgcttcatgtcggctatcgcaattcacacattcttttcagttgtaaagggccaaagaccttcacacaaaatactctacatcggaatagccatcatttggtgcttcgtgtatctcatttctttgttgccattggccgggaccttgaatggtgcctcagcaggcgggttcttcgtccgtgctggtgcttggtgctggataaacgaggcctacggcgatattcgactacttacgcattacatcttcatattcatttcgattgcgctatcctggacgctatacaccgcaattttccttcacctacgacgccaacataagcgaggggagttaggagagagcaaatcttccggataccaccctgcctttttggcataccccgtcatttatctgttatgcattttgcctctggcagttggtcgcgttgcatctatggctggcaagactccgcctcttggctatttctgtttcgccggtgcgttggccgcaagcaacggctggctggacgttttgctcttcaccacaactcgtcaaacaatcgtcttcgcacacggcgacgaattgggtaacgaagacaccggcttaaacactttcgcattcatgaatcctacacctaccacgttcggcaataccgtttgggtatggagtgccaaaagggcagagcagcgggatgctgcaagcggctggtggcgtatacttggcgacacggatgctgaagcgcaacgaaagcgttcgctgagccagacctctctggctccaacggaacaaaatgctatacagatggaagtcgtcactagcattgttgtcgagacccatcactaa

SEQ ID NO: 25924 - protein, 428 aa, Muscodor strobelii
  misc_feature: SGI Peptide ID NO. 568854
  misc_feature (9)..(425): NCBI GI: 256734597 Blast Desc: NECHADRAFT_75030 [Nectria haematococca mpVI 77-13-4]
  misc_feature (11)..(425): NCBI GI: 46113790 Blast Desc: FG02942.1 [Gibberella zeae PH-1]
  misc_feature (11)..(425): NCBI GI: 256722241 Blast Desc: NECHADRAFT_97370 [Nectria haematococca mpVI 77-13-4]
  misc_feature (5)..(428): NCBI GI: 261360947 Blast Desc: conserved [Verticillium albo-atrum VaMs.102]
  misc_feature (19)..(425): NCBI GI: 145608926 Blast Desc: MGG_06257 [Magnaporthe grisea 70-15] gi|145016347|gb|EDK00837.1| MGG_06257 [Magnaporthe grisea 70-15]
  misc_feature (5)..(372): NCBI GI: 39977825 Blast Desc: MGG_06797 [Magnaporthe grisea 70-15] gi|145013664|gb|EDJ98305.1| MGG_06797 [Magnaporthe grisea 70-15]
  misc_feature (11)..(389): NCBI GI: 171692543 Blast Desc: protein product [Podospora anserina] gi|170946220|emb|CAP73021.1| protein product [Podospora anserina]
  misc_feature (5)..(357): NCBI GI: 154312702 Blast Desc: BC1G_05052 [Botryotinia fuckeliana B05.10] gi|150849754|gb|EDN24947.1| BC1G_05052 [Botryotinia fuckeliana B05.10]
  misc_feature (11)..(354): NCBI GI: 119482740 Blast Desc: NFIA_025740 [Neosartorya fischeri NRRL 181] gi|119409553|gb|EAW19501.1| conserved [Neosartorya fischeri NRRL 181]
  misc_feature (11)..(354): NCBI GI: 94966272 Blast Desc: [Aspergillus oryzae]
MTVPDTVLDVLSPLPPVIRTGSIAISVFAYLSFFSALILFSYLTYKIVSWQLGRSDRKDRKKSAAGHRFANGPNEFGPRHDAAKLTSVSRETDVEMVAPRAPNQFMVLIINLLVADLLQATAFLLSSAWVARDGIWVHTAICFTQGLFISVGDLASSCFMSAIAIHTFFSVVKGQRPSHKILYIGIAIIWCFVYLISLLPLAGTLNGASAGGFFVRAGAWCWINEAYGDIRLLTHYIFIFISIALSWTLYTAIFLHLRRQHKRGELGESKSSGYHPAFLAYPVIYLLCILPLAVGRVASMAGKTPPLGYFCFAGALAASNGWLDVLLFTTTRQTIVFAHGDELGNEDTGLNTFAFMNPTPTTFGNTVWVWSAKRAEQRDAASGWWRILGDTDAEAQRKRSLSQTSLAPTEQNAIQMEVVTSIVVETHH

SEQ ID NO: 25925 - DNA, 1175 bp, Muscodor strobelii
  misc_feature: SGI EST ID NO. CUFF.61232.0
  misc_feature: Variant of the nucleotide sequence at SEQ ID NO 25923
tttcctttggttctcttgtttctggtcgccgttccgactgtctgagacgagtcaagacacggcactccagtgtgtcaaaaccacgacatacagcgcctgtcgtcacgatgactgtccccgacaccgtattagatgttctcagcccgttaccaccggtgattaggacgggatctattgccatcagcgtcttcgcttacttgtcgttcttctcggcgcttattttattttcataccttacctacaagatcgtgtcatggcaactggggagatcggatcgcaaagatcgtaagaaaagtgcagctgggcacagatttgcgaatgggccaaacgagttcgggccgcggcacgacgctgcaaaactcacatcggtttcgagggagacagacgtggaaatggtggctcctcgtgctccaaatcaatttatggtccttatcatcaacctcctggtggctgatctgcttcaagcaactgccttccttttgagctccgcttgggttgcacgagatggcatatgggttcatactgcgatctgcttcacgcagggcttgttcatctctgtaggggatctagcatccagctgcttcatgtcggctatcgcaattcacacattcttttcagttgtaaagggccaaagaccttcacacaaaatactctacatcggaatagccatcatttggtgcttcgtgtatctcatttctttgttgccattggccgggaccttgaatggtgcctcagcaggcgggttcttcgtccgtgctggtgcttggtgctggataaacgaggcctacggcgatattcgactacttacgcattacatcttcatattcatttcgattgcgctatcctggacgctatacaccgcaattttccttcacctacgacgccaacataagcgaggggagttaggagagagcaaatcttccggataccaccctgcctttttggcataccccgtcatttatctgttatgcattttgcctctggcagttggtcgcgttgcatctatggctggcaagactccgcctcttggctatttctgtttcgccggtgcgttggccgcaagcaacggctggctggacgttttgctcttcaccacaactcgtcaaacaatcgtcttcgcacacggcgacgaattgggtaacgaagacaccggcttaaacactttcgcattcatg

SEQ ID NO: 25926 - DNA, 679 bp, Muscodor strobelii
  misc_feature: SGI cDNA ID NO. 568855
  misc_feature: Encodes the peptide sequence at SEQ ID NO 25927
atgaagttctcactaacactctacctcttcgcctccctaaccaccgcctcatcccttctttcctcctcctccgatgtctcccccgcagctcacacacgtcgtcaagtccgacgccccgtaaaatactccggctcatcaggtttcgcgcccccacccatgcccccgggagcaccgtcgggtttcaaaatgaccatgggcaaagcaacagagatgcacgataagactaagatgaagaagttgccaagcaacatgatagacgtggatgatccaaatgcgccgcttaaacccctgacgaaaagagatgtgctgagggtgttgagaggagcacgggcgccgcttgctgctaatgatttctatgagtgttctacttctggcaaccctccaaaagtagcagactgcgacgtagtaatcgacaacgtatacaacgccaacacagcggtatccatcgcctcggggtcttgtatcttgttccagtatcagacgtgctgggggtttttctgctcgctttgcgaacaacttagtaccacgactgatttcatcgggaatcaactctcgactgctgagacgctttgtgtttctgggggcgaaccggggacggttgttggtgaggatagtccacagtttatgaagaagtgggatggtgaaggtgagcgcgaggaaggtgtgggaggaggggact

SEQ ID NO: 25927 - protein, 226 aa, Muscodor strobelii
  misc_feature: SGI Peptide ID NO. 568855
  misc_feature (1)..(214): NCBI GI: 171677073 Blast Desc: protein product [Podospora anserina] gi|170936604|emb|CAP61263.1| protein product [Podospora anserina]
  misc_feature (1)..(214): NCBI GI: 116205601 Blast Desc: CHGG_10684 [Chaetomium globosum CBS 148.51] gi|88176812|gb|EAQ84280.1| CHGG_10684 [Chaetomium globosum CBS 148.51]
MKFSLTLYLFASLTTASSLLSSSSDVSPAAHTRRQVRRPVKYSGSSGFAPPPMPPGAPSGFKMTMGKATEMHDKTKMKKLPSNMIDVDDPNAPLKPLTKRDVLRVLRGARAPLAANDFYECSTSGNPPKVADCDVVIDNVYNANTAVSIASGSCILFQYQTCWGFFCSLCEQLSTTTDFIGNQLSTAETLCVSGGEPGTVVGEDSPQFMKKWDGEGEREEGVGGGD

SEQ ID NO: 25928 - DNA, 1886 bp, Muscodor strobelii
  misc_feature: SGI EST ID NO. CUFF.61244.1
  misc_feature: Variant of the nucleotide sequence at SEQ ID NO 25926
ctcaatcgaagaaacagtacttaaaattagaaaccgcagcttattgaaactaaagatagctcttgccgccttgctggatatcaagctgaatattaaggccactttcgccatattgcacaatataaggctgaacgaaggactaggcgaggctttgtgtttaacctgatatcttgatgggataaatttctctttcagcgaagatttttaaagcacctaatcacaaaacatattgcacgcggcgaacacctacctaggagtaccgaatccagctctaggaatcgtatacgaagggaccccgacttcatgtgccgtgtctgcatctcagcgtcttccgaaatagaacgtcgttctcttgccacgttacagtgtatgcaacgctgtcaaagaggaatacttcctaatccagcagctgtcaaccccatcccacgcatctgctctcctcagtcgtcccaaggacccatcacacggacgttgcacgtgcagcggcggttcttacaacgcgatgagcaatatgcacctccattggccggttctcgattccgagtccggggaatagacggacgggacatggacatgggtttgcaactactacccgtgttatgaactttttcttcaatagatgtcgcgtaacaagcatttaaatcaagaaattgtttcttatctccttgtttggctcgttctagatcctgatacttatactcatgacccatgaatagcgggtagatatattcctaggaagtcccggggcagtgagccagaaagcttatacaccttgacgtgaccggaatataaataccacttacctcgtctcctgtatttccaatacaacgattcattcatatcaacaaccatttccaacaccttacccatctctcttccccctcaacctccaacgcaatcctaaaaatgaagttctcactaacactctacctcttcgcctccctaaccaccgcctcatcccttctttcctcctcctccgatgtctcccccgcagctcacacacgtcgtcaagtccgacgccccgtaaaatactccggctcatcaggtttcgcgcccccacccatgcccccgggagcaccgtcgggtttcaaaatgaccatgggcaaagcaacagagatgcacgataagactaagatgaagaagttgccaagcaacatgatagacgtggatgatccaaatgcgccgcttaaacccctgacgaaaagagatgtgctgagggtgttgagaggagcacgggcgccgcttgctgctaatgatttctatgagtgttctacttctggcaaccctccaaaagtagcagactgcgacgtagtaatcgacaacgtatacaacgccaacacagcggtatccatcgcctcggggtcttgtatcttgttccagtatcagacgtgctgggggtttttctgctcgctttgcgaacaacttagtaccacgactgatttcatcgggaatcaactctcgactgctgagacgctttgtgtttctgggggcgaaccggggacggttgttggtgaggatagtccacagtgggaggcggggttgcttagggaggggagctcgatacctaattatgatgtttgttaggtttatgaagaagtgggatggtgaaggtgagcgcgaggaaggtgtgggaggaggggactgtgagtgagtagtacctcggtgtggtatgtgtatatcggagtattgaatatcaagttcaaatttagcagttgtgagtacgtgtccgccgtcacattgctaatcagatgaaccgcccacgtcagatagcagtgcaagaaaaagcgagaaaaaaaaaccgaagctctttttttatgtgagatagttatacaggtcggcatgcaccttccgactttgccaaattttacttgacatatgcggggctc

SEQ ID NO: 25929 - DNA, 1812 bp, Muscodor strobelii
  misc_feature: SGI cDNA ID NO. 568856
  misc_feature: Reduced expression when VOC is produced
  misc_feature: Encodes the peptide sequence at SEQ ID NO 25930
atggacgccacaaagcatagcaagaagcggaaattcaaagacgccaatggcgcaaagatcaccgtcaccgaatcagccacctctgttgccgccgctctgaaaataaagaaggccaagaaagcgaagagagcccatgcggcagagcaggagcaggaggaggcagaggccgtcgatgtcgatgcgcagcagaatggacacatcgaggctgttgaagaggcccaagaggacgacagggaagatgatgtggaggacgacgagggagacgaagtagatgctacccggggtgctgaggctgaagcagacgacctcgacctcgaggctcccgatgccaccgacactgccatatcctcgcttgtcgcgcccaccgaagccgccgagaagtttgccgagctcaacctctccccgaagaccttgcaggctatcaacgaagatatgaagttcgagaccatgacccaaatccagcgtcgcgccatccctcctctcctcgccggccgcgatgtgctcggtgccgccaagacgggctccggcaagacgctgtccttcctcatcccggccatcgagatgttgagctccctacgcttcaagcccaggaacggtaccggtgtcatcgttgtctcgccgacgagagaactggctttgcagatcttccaagtcgccaccgagctgatgaagcaccattcccagacctacggtatcgtcattggaggtgcaaaccgccgtgccgaggccgacaaactagccaagggcgtcaattgcctgattgctacccctggtcggctgctggatcacttgcagaacacccctgggtttgtcttcaagaacctgcggaccttggtcattgacgaggcagaccgtattctagaagtcggtttcgaggatgaaatgaagcaaatcatcaagatactaccaaatggaaacagacagaccgctctgttttctgccacccagacgaccaaggtcgaagacttggcgagaatatctcttcgccccggtcccctctatatcaacgtggatgagcaaaaggaattctcgacagtcgagggtttggagcaagggtatctcatatgcgaagcagatatgcgcttccttgtgctcttttctttcctcaagaagaatctcaagaagaaaatcattgtcttcttgaacagctgcaatagcgttaaatactatgcagaacttctgaattatatcgatcttccgtgccttgatcttcacggaaagatgaaacagcagaagcgaaccaacactttcttcgaattcgtaaatgctgagaaggctatcctcatatgcaccgacgttgccgcgcgaggtctcgatatcccctccgtcgattacattgttcagctagatcctcccgatgatccaagagaatacattcatagagttggccgaacagcaagaggttccggcagtaaaggacgcagcctgctattcctacaaccgtcagaagtcggatttctttcacatctgaaagccgctcgtgtaccggtagttgaatacgatttccctgctaagaaaattctgaacgtcacatcacagcttgagaagctcgtcgcgggcaatttctatctgaaccagagtgccaaggagggttatcgtgcttatctacatgcatacgcttctcacagcctccggacggtatttgacatcaataaactagaccttgccaaggtcgcgaagagctttggattttcgacgcctccaagaatagatcttgtattgggtgcaagcatgaacagagacaagaaggtgcagggaagaagagcttttggaagccagcctaggcagaaccagaagttccaaagaaggtga

SEQ ID NO: 25930 - protein, 603 aa, Muscodor strobelii
  misc_feature: SGI Peptide ID NO. 568856
  misc_feature (151)..(323): Pfam Id: PF00270 Pfam Desc: DEAD/DEAH box helicase
  misc_feature (393)..(469): Pfam Id: PF00271 Pfam Desc: Helicase conserved C-terminal domain
  misc_feature (7)..(598): NCBI GI: 46117016 Blast Desc: FG04350.1 [Gibberella zeae PH-1] gi|91206844|sp|Q4IEK8.1|HAS1_GIBZE RecName: Full=ATP-dependent RNA helicase HAS1
  misc_feature (4)..(603): NCBI GI: 226289876 Blast Desc: ATP-dependent RNA helicase HAS1 [Paracoccidioides brasiliensis Pb18]
  misc_feature (10)..(603): NCBI GI: 225559047 Blast Desc: ATP-dependent RNA helicase HAS1 [Ajellomyces capsulatus G186AR]
  misc_feature (4)..(603): NCBI GI: 225682474 Blast Desc: ATP-dependent RNA helicase has1 [Paracoccidioides brasiliensis Pb03]
  misc_feature (29)..(603): NCBI GI: 146323887 Blast Desc: ATP-dependent RNA helicase [Aspergillus fumigatus Af293] gi|91206842|sp|Q4WQM4.2|HAS1_ASPFU RecName: Full=ATP-dependent RNA helicase has1 gi|129557486|gb|EAL89460.2|
  misc_feature (5)..(603): NCBI GI: 152032523 Blast Desc: ATP-dependent RNA helicase [Aspergillus fumigatus Af293] gi|91206842|sp|Q4WQM4.2|HAS1_ASPFU RecName: Full=ATP-dependent RNA helicase has1 gi|129557486|gb|EAL89460.2|
  misc_feature (1)..(603): NCBI GI: 240106116 Blast Desc: ATP-dependent RNA helicase, [Coccidioides posadasii C735 delta SOWgp]
  misc_feature (1)..(603): NCBI GI: 119192364 Blast Desc: ATP-dependent RNA helicase [Coccidioides immitis RS] gi|118572554|sp|Q1EA54.1|HAS1_COCIM RecName: Full=ATP-dependent RNA helicase HAS1
  misc_feature (74)..(598): NCBI GI: 85091492 Blast Desc: ATP-dependent RNA helicase DDX18 [Neurospora crassa OR74A] gi|74696328|sp|Q7S2N9.1|HAS1_NEUCR RecName: Full=ATP-dependent RNA helicase has-1 gi|28920320|gb|EAA29692.1|
  misc_feature (1)..(599): NCBI GI: 256729232 Blast Desc: [Nectria haematococca mpVI 77-13-4]
  misc_feature: Useful for introducing or modulating the production of volatile compounds
MDATKHSKKRKFKDANGAKITVTESATSVAAALKIKKAKKAKRAHAAEQEQEEAEAVDVDAQQNGHIEAVEEAQEDDREDDVEDDEGDEVDATRGAEAEADDLDLEAPDATDTAISSLVAPTEAAEKFAELNLSPKTLQAINEDMKFETMTQIQRRAIPPLLAGRDVLGAAKTGSGKTLSFLIPAIEMLSSLRFKPRNGTGVIVVSPTRELALQIFQVATELMKHHSQTYGIVIGGANRRAEADKLAKGVNCLIATPGRLLDHLQNTPGFVFKNLRTLVIDEADRILEVGFEDEMKQIIKILPNGNRQTALFSATQTTKVEDLARISLRPGPLYINVDEQKEFSTVEGLEQGYLICEADMRFLVLFSFLKKNLKKKIIVFLNSCNSVKYYAELLNYIDLPCLDLHGKMKQQKRTNTFFEFVNAEKAILICTDVAARGLDIPSVDYIVQLDPPDDPREYIHRVGRTARGSGSKGRSLLFLQPSEVGFLSHLKAARVPVVEYDFPAKKILNVTSQLEKLVAGNFYLNQSAKEGYRAYLHAYASHSLRTVFDINKLDLAKVAKSFGFSTPPRIDLVLGASMNRDKKVQGRRAFGSQPRQNQKFQRR

SEQ ID NO: 25931 - DNA, 2201 bp, Muscodor strobelii
  misc_feature: SGI EST ID NO. CUFF.61241.0
  misc_feature: Variant of the nucleotide sequence at SEQ ID NO 25929
ccactacagaaagtcccttatcccgtatcgataacggccaacctccaaggcgacccagcaaaaagttgcccgtgtcgggagatcgcaacttttgtctcacagccagaaacagcatcccaccttcagcttcgatacggtttcattgcgacaacaacagcacatcacagcaaccatggacgccacaaagcatagcaagaagcggaaattcaaagacgccaatggcgcaaagatcaccgtcaccgaatcagccacctctgttgccgccgctctgaaaataaagaaggccaagaaagcgaagagagcccatgcggcagagcaggagcaggaggaggcagaggccgtcgatgtcgatgcgcagcagaatggacacatcgaggctgttgaagaggcccaagaggacgacagggaagatgatgtggaggacgacgagggagacgaagtagatgctacccggggtgctgaggctgaagcagacgacctcgacctcgaggctcccgatgccaccgacactgccatatcctcgcttgtcgcgcccaccgaagccgccgagaagtttgccgagctcaacctctccccgaagaccttgcaggctatcaacgaagatatgaagttcgagaccatgacccaaatccagcgtcgcgccatccctcctctcctcgccggccgcgatgtgctcggtgccgccaagacgggctccggcaagacgctgtccttcctcatcccggccatcgagatgttgagctccctacgcttcaagcccaggaacggtaccggtgtcatcgttgtctcgccgacgagagaactggctttgcagatcttccaagtcgccaccgagctgatgaagcaccattcccagacctacggtatcgtcattggaggtgcaaaccgccgtgccgaggccgacaaactagccaagggcgtcaattgcctgattgctacccctggtcggctgctggatcacttgcagaacacccctgggtttgtcttcaagaacctgcggaccttggtcattgacgaggcagaccgtattctagaagtcggtttcgaggatgaaatgaagcaaatcatcaagatactaccaaatggaaacagacagaccgctctgttttctgccacccagacgaccaaggtcgaagacttggcgagaatatctcttcgccccggtcccctctatatcaacgtggatgagcaaaaggaattctcgacagtcgagggtttggagcaagggtatctcatatgcgaagcagatatgcgcttccttgtgctcttttctttcctcaagaagaatctcaagaagaaaatcattgtcttcttgaacagctgcaatagcgttaaatactatgcagaacttctgaattatatcgatcttccgtgccttgatcttcacggaaagatgaaacagcagaagcgaaccaacactttcttcgaattcgtaaatgctgagaaggctatcctcatatgcaccgacgttgccgcgcgaggtctcgatatcccctccgtcgattacattgttcagctagatcctcccgatgatccaagagaatacattcatagagttggccgaacagcaagaggttccggcagtaaaggacgcagcctgctattcctacaaccgtcagaagtcggatttctttcacatctgaaagccgctcgtgtaccggtagttgaatacgatttccctgctaagaaaattctgaacgtcacatcacagcttgagaagctcgtcgcgggcaatttctatctgaaccagagtgccaaggagggttatcgtgcttatctacatgcatacgcttctcacagcctccggacggtatttgacatcaataaactagaccttgccaaggtcgcgaagagctttggattttcgacgcctccaagaatagatcttgtattgggtgcaagcatgaacagagacaagaaggtgcagggaagaagagcttttggaagccagcctaggcagaaccagaagttccaaagaaggtgatagagggtattcgatagttccagcacgttttacagtggtctcatggctatgagcgtgagactccagatttgcactaataggcgtttggtaaggatatgatatgtgttgtacgtaaaaggtaccgacgaatggtcgtggtattattatgatattcccaagctgagattacaaactagtatggagtttcgtttcacaaaaatcagtctttctattattt

SEQ ID NO: 25932 - DNA, 3708 bp, Muscodor strobelii
  misc_feature: SGI cDNA ID NO. 568857
  misc_feature: Reduced expression when VOC is produced
  misc_feature: Encodes the peptide sequence at SEQ ID NO 25933
atgtacggtgcacttccgcagtcagaagtcgacgacgaccgagcagatggtcacacgccgtctgactctctttctcccgcgccctcgtcgtcacccatgccttttctacctcgggtcgagtccaccttcaccccgttatcgatggacagcgatctgtacagcgcacccggcaacatagatagtactgcagccgacacacccaccagctctgtcaaagccgacgatgtggtcgcatctacgaccggagcgaagggcacggtcgacgttggcagcatggcgcgatcgccgctgtctgcacaagccaccggcttagctgaccacctcgtattgcccaccaaagccccatcgcctccctcgtctggattgggtacgaagagcactgcaggcccgagtctgcagccccagaatccagacgctagtcatgcagcaggatcagacgccgacagaaactttgcatcaaaatttgtcccgaccagcagcgcaaaacctagcattgccagcactcttggcgccatcgaagaggatcctcctcaccaccaagcagtcgccgagcaacctcttctcatcaaaccgaagccgattgtccgcacggcttccaccaagagcgtatctctccgtcacccagctccagacctcactccgcgctcggcaacccacgcgaccaacatcgcccagatcgaagctctggccgaaaagctgtccatgacatcgtctatcgaggacgccatcagagatctccacgacgaacagaagcgggccgacagccgccgctcgtccatcttggctgctagtattgcgtctatccccgaggccgacgaaccggtatctttcccccttatcaggtccgtgtcagcagccaactccatccgcgagacgaacaccgctgcacgatacggcggctactctccggctggctatgtcatgtcacctgattcttccatagcgtcaggtcccacgcggctcagatccggatcaaccggcttgaccagagcagacatcgaccagggcagctcgctgtctcgacacggcccgggaaagagctccattcgtagtgtgcggtctaccacaaagcctgtattaacaaacattgccgagatcgagacctcgttgaacgcggctgctatggacgaagcagataggctagcagaggagcccgaggaagacgagcatctacacatcccgcatctacatgatgttgatctcacgcccaatgcgaacggatacaacacatccggcgcgcatgactattggaaccaggcagtggaggagtcgcgcagagaattcgaatataatggtgctaggcgaacaacatctcctgggtctgaagggacatttgaacaagcggagcgggcgtttgccgatttcgatggcgctcactgctcaccagatgttgacttcgaagaatctctgaactttcagactctgtttgcttcgccgccagccataccacctttctcccctccaaacgagcatgagtatgcggctgatggacacgaggaggaatatgaaagacctgtcatatcgcggcctgttcgtctgccaactgttcgcccaaagtcttacttggacccggaaacaggggacactatgatgtattacccggcaagagtgccaatgatgctcaatctaccacagaagctttcaaagaaacctaaagctgaggtgcggaatgtccggaggtcacaggtactcagcgctatgcctgaagcaaaccgcaactcggctacatcatggctacctgacatcacgtctgagccgcttcttcctctcggatctatgggcgatcactcgaaccccgaagccacggccagcactatagatcacaaaccagaacactatgttgatattgaagatggcaggcaatacccggccgatgattacccacccgctgacgaagacagacggaagtcgcgtatgtctatgttagctattgataagcgtatgtcacaaactatggacaaaagaatgtcgcagactctggacaaacgtatgtcacaaataccggatttgggccaactaccacctcaacttcgggccagcgcgtttttcgacttacccgcctctgaaatgcctacgattcaactaaaagatggttctgccaccaacacactggacgatattctcaatgcttcagccaaagccccagtcagcgctttcactgatcacgcttttgctgggtcgttggggaacgaggtttatggcgccgataacaaacgaaagtcgcatatgaaacgtgctagtgctgctgagctttctgcccccaaaactcggagttcaatgttccatatccgtaaaattagtggactgagccggccatccacgtcttccgagcaacaccgcgaggccatcgaggaagaggagcgacaacatctttctggctctgttgatggggaggcaatccatgagggagaagaggaatcatctgaaagtgaacatgagcccgtctacaatggaccgcccactacccttctagctgaactccagatgcgcaaacaacagcaaaagctacgcacacgaccgcctgcctccgccttcccaaatggaatgcattctacacttctcgagatggacacagtcgccgaaatagagcgccgagcacgcaaagacaagcgtataaaccttgcctgggaagacccaaattccaaactagcggacgatgaggacgacgaagacgtgcctcttggaattctagctgctaataagggccagaagggcggcttggtcaatgccatagcagaggtgaatcggcccattgggttgatggagcgtcgtgacatggaagacaatgaacccctgagtgttcgacgcaatcggcttcaagggcgagaggctgggcccatccagcgcattgctctcacacgtggtattaccgcgcctggagcactagcgccaccaagccctcagcttcgtgttatcacccctgaggccgatgaagaggagggcgagacattgggagcgcgcctgcgccgtctgcgggcccagaaggatgaaaattcccttcctcaagctcgtcctgtcagttcagcattctccgcagaactcctcagccagtttggagatgccctaaaagacgaagagaagcaagagaacaaaaagggtccgtctccagtgcaacccacggaggaggaggaaacactgggtcaacggcggaaacgactacaagaagaacgcgaggcacgggagcgtgaactggcacgtatcaaactcgatggaggaaggactagtgtttcgcctcagcctcagctgaagagccggcactctctggctgatgttcttggaacatataaccgtcagaaaatgaccgatcccagagccgagaccgaacgagccagacaagaggaggccgtgcgttataagcgagatcaagagcaaaagctcgctatatatcgcaatcaagtgcccaccaacttgagtgctcctaacttagtgaagcctggtggcttcatggccggtcgtttcaacgacggcactggcggcgggtttggacagtcacggtcgacagtgacagtaaacgcatatcctggccagtcaggattaccgaatcccgcggcgaatgccagcatgttaggcaatgccttccgagcaggtggcgctatgacgggctatgccgtggccaacccttatgggactacatatgcagcgccctcgcagactcaagtcggccaaatggatagagtcgagcgttggagacaaggagtctctccgtaa

SEQ ID NO: 25933 - protein, 1235 aa, Muscodor strobelii
  misc_feature: SGI Peptide ID NO. 568857
  misc_feature (188)..(1235): NCBI GI: 256729484 Blast Desc: NECHADRAFT_47857 [Nectria haematococca mpVI 77-13-4]
  misc_feature (188)..(1235): NCBI GI: 46117166 Blast Desc: FG04425.1 [Gibberella zeae PH-1]
  misc_feature (194)..(1233): NCBI GI: 145614188 Blast Desc: MGG_08920 [Magnaporthe grisea 70-15] gi|145021136|gb|EDK05265.1| MGG_08920 [Magnaporthe grisea 70-15]
  misc_feature (193)..(1235): NCBI GI: 171677207 Blast Desc: protein product [Podospora anserina] gi|170936671|emb|CAP61330.1| protein product [Podospora anserina]
  misc_feature (187)..(1162): NCBI GI: 85109983 Blast Desc: NCU08420 [Neurospora crassa OR74A] gi|28924847|gb|EAA33944.1| [Neurospora crassa OR74A]
  misc_feature (189)..(1142): NCBI GI: 116205441 Blast Desc: CHGG_10604 [Chaetomium globosum CBS 148.51] gi|88176732|gb|EAQ84200.1| CHGG_10604 [Chaetomium globosum CBS 148.51]
  misc_feature (360)..(1080): NCBI GI: 261354379 Blast Desc: conserved [Verticillium albo-atrum VaMs.102]
  misc_feature (512)..(1233): NCBI GI: 154291444 Blast Desc: BC1G_15183 [Botryotinia fuckeliana B05.10] gi|150846796|gb|EDN21989.1| BC1G_15183 [Botryotinia fuckeliana B05.10]
  misc_feature (182)..(1060): NCBI GI: 189191156 Blast Desc: conserved [Pyrenophora tritici-repentis Pt-1C-BFP] gi|187973523|gb|EDU41022.1| conserved [Pyrenophora tritici-repentis Pt-1C-BFP]
  misc_feature (670)..(1233): NCBI GI: 154287392 Blast Desc: [Ajellomyces capsulatus NAm1] gi|150408132|gb|EDN03673.1| [Ajellomyces capsulatus NAm1]
  misc_feature: Useful for introducing or modulating the production of volatile compounds
MYGALPQSEVDDDRADGHTPSDSLSPAPSSSPMPFLPRVESTFTPLSMDSDLYSAPGNIDSTAADTPTSSVKADDVVASTTGAKGTVDVGSMARSPLSAQATGLADHLVLPTKAPSPPSSGLGTKSTAGPSLQPQNPDASHAAGSDADRNFASKFVPTSSAKPSIASTLGAIEEDPPHHQAVAEQPLLIKPKPIVRTASTKSVSLRHPAPDLTPRSATHATNIAQIEALAEKLSMTSSIEDAIRDLHDEQKRADSRRSSILAASIASIPEADEPVSFPLIRSVSAANSIRETNTAARYGGYSPAGYVMSPDSSIASGPTRLRSGSTGLTRADIDQGSSLSRHGPGKSSIRSVRSTTKPVLTNIAEIETSLNAAAMDEADRLAEEPEEDEHLHIPHLHDVDLTPNANGYNTSGAHDYWNQAVEESRREFEYNGARRTTSPGSEGTFEQAERAFADFDGAHCSPDVDFEESLNFQTLFASPPAIPPFSPPNEHEYAADGHEEEYERPVISRPVRLPTVRPKSYLDPETGDTMMYYPARVPMMLNLPQKLSKKPKAEVRNVRRSQVLSAMPEANRNSATSWLPDITSEPLLPLGSMGDHSNPEATASTIDHKPEHYVDIEDGRQYPADDYPPADEDRRKSRMSMLAIDKRMSQTMDKRMSQTLDKRMSQIPDLGQLPPQLRASAFFDLPASEMPTIQLKDGSATNTLDDILNASAKAPVSAFTDHAFAGSLGNEVYGADNKRKSHMKRASAAELSAPKTRSSMFHIRKISGLSRPSTSSEQHREAIEEEERQHLSGSVDGEAIHEGEEESSESEHEPVYNGPPTTLLAELQMRKQQQKLRTRPPASAFPNGMHSTLLEMDTVAEIERRARKDKRINLAWEDPNSKLADDEDDEDVPLGILAANKGQKGGLVNAIAEVNRPIGLMERRDMEDNEPLSVRRNRLQGREAGPIQRIALTRGITAPGALAPPSPQLRVITPEADEEEGETLGARLRRLRAQKDENSLPQARPVSSAFSAELLSQFGDALKDEEKQENKKGPSPVQPTEEEETLGQRRKRLQEEREARERELARIKLDGGRTSVSPQPQLKSRHSLADVLGTYNRQKMTDPRAETERARQEEAVRYKRDQEQKLAIYRNQVPTNLSAPNLVKPGGFMAGRFNDGTGGGFGQSRSTVTVNAYPGQSGLPNPAANASMLGNAFRAGGAMTGYAVANPYGTTYAAPSQTQVGQMDRVERWRQGVSP

SEQ ID NO: 25934 - DNA, 1743 bp, Muscodor strobelii
  misc_feature: SGI cDNA ID NO. 568858
  misc_feature: Reduced expression when VOC is produced
  misc_feature: Encodes the peptide sequence at SEQ ID NO 25935
atgtcgcagactctggacaaacgtatgtcacaaataccggatttgggccaactaccacctcaacttcgggccagcgcgtttttcgacttacccgcctctgaaatgcctacgattcaactaaaagatggttctgccaccaacacactggacgatattctcaatgcttcagccaaagccccagtcagcgctttcactgatcacgcttttgctgggtcgttggggaacgaggtttatggcgccgataacaaacgaaagtcgcatatgaaacgtgctagtgctgctgagctttctgcccccaaaactcggagttcaatgttccatatccgtaaaattagtggactgagccggccatccacgtcttccgagcaacaccgcgaggccatcgaggaagaggagcgacaacatctttctggctctgttgatggggaggcaatccatgagggagaagaggaatcatctgaaagtgaacatgagcccgtctacaatggaccgcccactacccttctagctgaactccagatgcgcaaacaacagcaaaagctacgcacacgaccgcctgcctccgccttcccaaatggaatgcattctacacttctcgagatggacacagtcgccgaaatagagcgccgagcacgcaaagacaagcgtataaaccttgcctgggaagacccaaattccaaactagcggacgatgaggacgacgaagacgtgcctcttggaattctagctgctaataagggccagaagggcggcttggtcaatgccatagcagaggtgaatcggcccattgggttgatggagcgtcgtgacatggaagacaatgaacccctgagtgttcgacgcaatcggcttcaagggcgagaggctgggcccatccagcgcattgctctcacacgtggtattaccgcgcctggagcactagcgccaccaagccctcagcttcgtgttatcacccctgaggccgatgaagaggagggcgagacattgggagcgcgcctgcgccgtctgcgggcccagaaggatgaaaattcccttcctcaagctcgtcctgtcagttcagcattctccgcagaactcctcagccagtttggagatgccctaaaagacgaagagaagcaagagaacaaaaagggtccgtctccagtgcaacccacggaggaggaggaaacactgggtcaacggcggaaacgactacaagaagaacgcgaggcacgggagcgtgaactggcacgtatcaaactcgatggaggaaggactagtgtttcgcctcagcctcagctgaagagccggcactctctggctgatgttcttggaacatataaccgtcagaaaatgaccgatcccagagccgagaccgaacgagccagacaagaggaggccgtgcgttataagcgagatcaagagcaaaagctcgctatatatcgcaatcaagtgcccaccaacttgagtgctcctaacttagtgaagcctggtggcttcatggccggtcgtttcaacgacggcactggcggcgggtttggacagtcacggtcgacagtgacagtaaacgcatatcctggccagtcaggattaccgaatcccgcggcgaatgccagcatgttaggcaatgccttccgagcaggtggcgctatgacgggctatgccgtggccaacccttatgggactacatatgcagcgccctcgcagactcaagtcggccaaatggatagagtcgagcgttggagacaaggagtctctccgtaa

SEQ ID NO: 25935 - protein, 580 aa, Muscodor strobelii
  misc_feature: SGI Peptide ID NO. 568858
  misc_feature (6)..(578): NCBI GI: 145614188 Blast Desc: MGG_08920 [Magnaporthe grisea 70-15] gi|145021136|gb|EDK05265.1| MGG_08920 [Magnaporthe grisea 70-15]
  misc_feature (6)..(507): NCBI GI: 85109983 Blast Desc: NCU08420 [Neurospora crassa OR74A] gi|28924847|gb|EAA33944.1| [Neurospora crassa OR74A]
  misc_feature (6)..(580): NCBI GI: 171677207 Blast Desc: protein product [Podospora anserina] gi|170936671|emb|CAP61330.1| protein product [Podospora anserina]
  misc_feature (18)..(425): NCBI GI: 261354379 Blast Desc: conserved [Verticillium albo-atrum VaMs.102]
  misc_feature (6)..(580): NCBI GI: 256729484 Blast Desc: NECHADRAFT_47857 [Nectria haematococca mpVI 77-13-4]
  misc_feature (15)..(580): NCBI GI: 46117166 Blast Desc: FG04425.1 [Gibberella zeae PH-1]
  misc_feature (1)..(487): NCBI GI: 116205441 Blast Desc: CHGG_10604 [Chaetomium globosum CBS 148.51] gi|88176732|gb|EAQ84200.1| CHGG_10604 [Chaetomium globosum CBS 148.51]
  misc_feature (15)..(578): NCBI GI: 154287392 Blast Desc: [Ajellomyces capsulatus NAm1] gi|150408132|gb|EDN03673.1| [Ajellomyces capsulatus NAm1]
  misc_feature (6)..(578): NCBI GI: 212542327 Blast Desc: conserved [Penicillium marneffei ATCC 18224] gi|210066225|gb|EEA20318.1| conserved [Penicillium marneffei ATCC 18224]
  misc_feature (15)..(578): NCBI GI: 225559816 Blast Desc: conserved [Ajellomyces capsulatus G186AR]
  misc_feature: Useful for introducing or modulating the production of volatile compounds
MSQTLDKRMSQIPDLGQLPPQLRASAFFDLPASEMPTIQLKDGSATNTLDDILNASAKAPVSAFTDHAFAGSLGNEVYGADNKRKSHMKRASAAELSAPKTRSSMFHIRKISGLSRPSTSSEQHREAIEEEERQHLSGSVDGEAIHEGEEESSESEHEPVYNGPPTTLLAELQMRKQQQKLRTRPPASAFPNGMHSTLLEMDTVAEIERRARKDKRINLAWEDPNSKLADDEDDEDVPLGILAANKGQKGGLVNAIAEVNRPIGLMERRDMEDNEPLSVRRNRLQGREAGPIQRIALTRGITAPGALAPPSPQLRVITPEADEEEGETLGARLRRLRAQKDENSLPQARPVSSAFSAELLSQFGDALKDEEKQENKKGPSPVQPTEEEETLGQRRKRLQEEREARERELARIKLDGGRTSVSPQPQLKSRHSLADVLGTYNRQKMTDPRAETERARQEEAVRYKRDQEQKLAIYRNQVPTNLSAPNLVKPGGFMAGRFNDGTGGGFGQSRSTVTVNAYPGQSGLPNPAANASMLGNAFRAGGAMTGYAVANPYGTTYAAPSQTQVGQMDRVERWRQGVSP

SEQ ID NO: 25936 - DNA, 1518 bp, Muscodor strobelii
  misc_feature: SGI cDNA ID NO. 568859
  misc_feature: Elevated expression when VOC is produced
  misc_feature: Encodes the peptide sequence at SEQ ID NO 25937
atggatacacacgtcgacaccatcatcctcgaagagaagggggtaactcatcaagcgttatccccgagctcttcgggttttggtggccgtgatgaagctatgctcgcccggctgggcaaaaagcaggtcctgaaaagaaacttcggctttatgacaattctgggcttcagctgtactgtgctgattacgtgggaaggatccttaactacttttctcgtcggtcttcaaaatggtggacctgctggcatcgtatacagctatctggtcgtgtgggctggcaccctatcggtctttgcgacactttccgaactggtttcgatggcaccgacctctggcggacaataccactgggtgtcgatgctggcgcctgcatcgtcgcgtaagttctttggatacttgacaggttggctggctattacggggtggcaagccctggtagcttctggcggattcgtcactggaactatgatacaaggacttatcgtattgacgcaccctgagtacttgccgacgatgcagaactggcacgggaccctattgttctgggctgtgatattgggcagttatgctatcaacgccgccgttggatccgtccttgccaagtttgaaggtctcgtacttgtccttcatatcctcggcttcttcgctaccgtgctgcctctggtgctgctcagccagcatgtcactgccaaagatgtcttcgatacttggttgaaccttggaggctggcagacccaaggattatcctttagtgtcggcatactggggaacgtattcgccttcttgggcggagatggagctatccacatgtccgaggaaattcgaaatgccgccgtcgttgtgccacgttctctgatgaccggtctggcagtcaatggctcgcttggcttcgctatgatcatcatcacgctatactcccttggagacatcgaccaggctttagcagaaaacccgcagtaccctttcatggccgtgtttcgtcacgccactgggtcgacagtggccgcagctgttatgtctgctattgtggtagtcatgtcgttcagtgctaccactggatgtatcgcctccacttctcgaatatactgggcattcgctcgcgatcgcggtctcccaggctggagagtactcaagaagattaaccctaaaaccttcatccccgagtattccgtatttctgaccgttattgtcgccattattctgtctttggtcaacatcggaaacgcgaccgctttcaatggcgaaggcgatctcttcaccaacacaatgggagagagtctcacgtggggaccatggcgcctgcgaggtgcttttggtattgcgaacaacgtgttttgttgctcttaccttctctatatcttcttcttcagtttctggccagcgttcaaggacgtgacgcccgccacattcaactacgccgttctcgtctttggcgtggtcgtatcttttagtatgctctattacggaatatgggcgagaaaggtttataatgggccgatcgtcgaattcgatgcttga

SEQ ID NO: 25937 - protein, 505 aa, Muscodor strobelii
  misc_feature: SGI Peptide ID NO. 568859
  misc_feature (47)..(505): Pfam Id: PF00324 Pfam Desc: Amino acid permease
  misc_feature (31)..(502): NCBI GI: 115492221 Blast Desc: conserved [Aspergillus terreus NIH2624] gi|114197598|gb|EAU39298.1| conserved [Aspergillus terreus NIH2624]
  misc_feature (16)..(502): NCBI GI: 46127687 Blast Desc: FG08221.1 [Gibberella zeae PH-1]
  misc_feature (23)..(502): NCBI GI: 256720570 Blast Desc: [Nectria haematococca mpVI 77-13-4]
  misc_feature (30)..(503): NCBI GI: 212540776 Blast Desc: amino acid permease, [Penicillium marneffei ATCC 18224] gi|210067842|gb|EEA21934.1| amino acid permease, [Penicillium marneffei ATCC 18224]
  misc_feature (15)..(502): NCBI GI: 256728317 Blast Desc: NECHADRAFT_73000 [Nectria haematococca mpVI 77-13-4]
  misc_feature (10)..(505): NCBI GI: 119188281 Blast Desc: CIMG_04188 [Coccidioides immitis RS]
  misc_feature (10)..(505): NCBI GI: 240107898 Blast Desc: choline transport protein, [Coccidioides posadasii C735 delta SOWgp]
  misc_feature (11)..(502): NCBI GI: 259485677 Blast Desc: TPA: GABA transporter, (Eurofung) [Aspergillus nidulans FGSC A4]
  misc_feature (17)..(505): NCBI GI: 258568376 Blast Desc: conserved [Uncinocarpus reesii 1704] gi|237906378|gb|EEP80779.1| conserved [Uncinocarpus reesii 1704]
  misc_feature (30)..(502): NCBI GI: 212531439 Blast Desc: GABA permease, [Penicillium marneffei ATCC 18224] gi|210071240|gb|EEA25329.1| GABA permease, [Penicillium marneffei ATCC 18224]
  misc_feature: Useful for introducing or modulating the production of volatile compounds
MDTHVDTIILEEKGVTHQALSPSSSGFGGRDEAMLARLGKKQVLKRNFGFMTILGFSCTVLITWEGSLTTFLVGLQNGGPAGIVYSYLVVWAGTLSVFATLSELVSMAPTSGGQYHWVSMLAPASSRKFFGYLTGWLAITGWQALVASGGFVTGTMIQGLIVLTHPEYLPTMQNWHGTLLFWAVILGSYAINAAVGSVLAKFEGLVLVLHILGFFATVLPLVLLSQHVTAKDVFDTWLNLGGWQTQGLSFSVGILGNVFAFLGGDGAIHMSEEIRNAAVVVPRSLMTGLAVNGSLGFAMIIITLYSLGDIDQALAENPQYPFMAVFRHATGSTVAAAVMSAIVVVMSFSATTGCIASTSRIYWAFARDRGLPGWRVLKKINPKTFIPEYSVFLTVIVAIILSLVNIGNATAFNGEGDLFTNTMGESLTWGPWRLRGAFGIANNVFCCSYLLYIFFFSFWPAFKDVTPATFNYAVLVFGVVVSFSMLYYGIWARKVYNGPIVEFDA

SEQ ID NO: 25938 - DNA, 2918 bp, Muscodor strobelii
  misc_feature: SGI EST ID NO. CUFF.61358.1
  misc_feature: Variant of the nucleotide sequence at SEQ ID NO 25936
gcggcaggcaatgctaggatttgaattcttcagttgcctatttagacgcagtgttgcgagagtcaaaatatgataggtgacagaatatgtggaaacgcacgttggtccttgatgcatatacacgttgcatcaagtattggagaatcttggcgcgggttggcggtctcagtagcaggggacattctcatttgcagtgcgaaaaagcaagtatgttctagagtgccaggaacaatgatctattcagctacgcccccggcaattatgatctatccaaatatcgattctgtgatacggatgagctaggagattccccggccacccatccccgcggttcctcctattgcgagacctgccgatgataatatctatggacgaactccctctctgcgacaccctcattcatatatcggtgcaacgctgatctatgctgcttctttctggtaattaagcagtctatcatacacaacatggatacacacgtcgacaccatcatcctcgaagagaagggggtaactcatcaagcgttatccccgagctcttcgggttttggtggccgtgatgaagctatgctcgcccggctgggcaaaaagcaggtcctgaaaagaaacttcggctttatgacaattctgggcttcagctgtactgtgctgattacgtgggaaggatccttaacgtacgtcacgacagaccctttgcccaaccgctctcgataactaacagatactagtacttttctcgtcggtcttcaaaatggtggacctgctggcatcgtatacagctatctggtcgtgtgggctggcaccctatcggtctttgcgacactttccgaactggtttcgatggcaccgacctctggcggacaataccactgggtgtcgatgctggcgcctgcatcgtcgcgtaagttctttggatacttgacaggttggctggctattacggggtggcaagccctggtagcttctggcggattcgtcactggaactatgatacaaggacttatcgtattgacgcaccctgagtacttgccgacgatgcagaactggcacgggaccctattgttctgggctgtgatattgggcagttatgctatcaacgccgccgttggatccgtccttgccaagtttgaaggtctcgtacttgtccttcatatcctcggcttcttcgctaccgtgctgcctctggtgctgctcagccagcatgtcactgccaaagatgtcttcgatacttggttgaaccttggaggctggcagacccaaggattatcctttagtgtcggcatactggggaacgtattcgccttcttgggcggagatggagctatccacatgtccgaggaaattcgaaatgccgccgtcgttgtgccacgttctctgatgaccggtctggcagtcaatggctcgcttggcttcgctatgatcatcatcacgctatactcccttggagacatcgaccaggctttagcagaaaacccgcagtaccctttcatggccgtgtttcgtcacgccactgggtcgacagtggccgcagctgttatgtctgctattgtggtagtcatgtcgttcagtgctaccactggatgtatcgcctccacttctcgaatatactgggcattcgctcgcgatcgcggtctcccaggctggagagtactcaagaagattaaccctaaaaccttcatccccgagtattccgtatttctgaccgttattgtcgccattattctgtctttggtcaacatcggaaacgcgaccgctttcaatggcgtcatttcgatctctattgctgtatcgcagactgaagggagacatcaaggagcgccaggaaggcgatctcttcaccaacacaatgggagagagtctcacgtggggaccatggcgcctgcgaggtgcttttggtattgcgaacaacgtgttttgttgctcttaccttctctatatcttcttcttcagtttctggccagcgttcaaggacgtgacgcccgccacattcaactacgccgttctcgtctttggcgtggtcgtatcttttagtatgctctattacggaatatgggcgagaaaggtttataatgggccgatcgtcgaattcgatgcttgagttgacatcggtgaaaggcagttgatatctgcaatatcttaccgatagtatcaacgggtggataagtcaagctatcaacgcgtgcgctggcgcagtattgtgcaaccaatttcgaagcctcatctttcattggccatgcagagcggatgggtcaagaagtatatatcgggccatcgtgttgtatatctgaaatgctaatagaaaaccggagagtttagcttatgtttctcaacccgaagaaatggccaatacggtctcaaaaattggaccatcaagttaccacggttgccatttgttcagtgaattgtccttctgcgtgaagctttgtagcaccgctcaaacacagttgaagtatgtctctgaagagtgagcagtagacatggggcccaatactatatcaaatggtaacttgattgtatctgatagtccggcaaactgtgggccgacgggctaaccagtcggtgacaatgttgacgatctgctgggagtagatggtgctgtcagcgagacattgtaattaccttggcccacatcagctaccatatgtagtcgtgtttgcagggctgccgaatcgcaacatttcttttggagatgatacgaagtaaaatgtcttggcgatctctggtcaacttgacttatacgacatgtgtgtaacctggatgaaaaactaggagcattctcagcagacgtgtttattagacaacaaggtcactcccagtccaactcttcacggtgccttgcatcacctgcggtcggcagggtactgggtcccagaattgatgaatcacgacaccgaaaaatactggtggcttccacgtgca

SEQ ID NO: 25939 - DNA, 951 bp, Muscodor strobelii
  misc_feature: SGI cDNA ID NO. 568860
  misc_feature: Elevated expression when VOC is produced
  misc_feature: Encodes the peptide sequence at SEQ ID NO 25940
atggataggcgcgatgtgattatgaacagccagagcaatgtcttccagatattgctctggttcatctttgtcgtcgccatcttcagtgttggtgcccgcctagcgacaaaactcgccatgactagaaaattagcctgggatgactggatcatgctagctgctacacttgcatatttagcccagtgtatctcgatctcacaaggcgcctcgcaaggtttgggaaagccccaaaacactctaagcacagagcaacttggaagctttctcaaagcagagtatgctagcattgtgtttctactcttaacctgggccctcataaagtggtccatttccgcgttcatccaccaactcagcccaagcacgacacacatacgcctgaaccagaccctcagcaccattgtcgcagcatggttcctctcttcaatactcgtttctctattccaatgcgagctcccggcgccatgggactacatccatggtcaacgttgcattgatcggcgagtatggtggatatatgtggtcgtggtcaatatctcgaccgaattctttattgttgccctttactttattatgctggcgacgctcaaaatgtccagggtgaagaaagcaatcgtacttctgatattttcaactcgtctactaataatcggcgctgctgtggcacagttactcgtgtttctgaactcattcccaagtagcgatttgaccgacgcactttggaccccaatacttctcaaccaagtagttctttcactgagtgtagtaaccgcatgcgcgccctatctcaaacctttcatggaaagcctcgagtcagggatcgtgcgagtagaaaatctgccggattctgaggaggagctttcaagagatagaactggaacaagccgctactatctgagcgacttgagcaactcgtctgcgggttgttcttcacgggcgaccgaccggtgttaa

SEQ ID NO: 25940 - protein, 316 aa, Muscodor strobelii
  misc_feature: SGI Peptide ID NO. 568860
  misc_feature (21)..(296): NCBI GI: 256719806 Blast Desc: NECHADRAFT_89559 [Nectria haematococca mpVI 77-13-4] gi|256730184|gb|EEU43536.1| NECHADRAFT_82920 [Nectria haematococca mpVI 77-13-4]
  misc_feature (3)..(311): NCBI GI: 256728318 Blast Desc: NECHADRAFT_97744 [Nectria haematococca mpVI 77-13-4]
  misc_feature (16)..(311): NCBI GI: 212531441 Blast Desc: conserved [Penicillium marneffei ATCC 18224] gi|210071241|gb|EEA25330.1| conserved [Penicillium marneffei ATCC 18224]
  misc_feature (16)..(290): NCBI GI: 242796225 Blast Desc: conserved [Talaromyces stipitatus ATCC 10500] gi|218719342|gb|EED18762.1| conserved [Talaromyces stipitatus ATCC 10500]
  misc_feature (16)..(279): NCBI GI: 115492219 Blast Desc: [Aspergillus terreus NIH2624] gi|114197597|gb|EAU39297.1| [Aspergillus terreus NIH2624]
  misc_feature (10)..(313): NCBI GI: 256720571 Blast Desc: NECHADRAFT_55806 [Nectria haematococca mpVI 77-13-4]
  misc_feature (11)..(299): NCBI GI: 212540778 Blast Desc: PMAA_057240 [Penicillium marneffei ATCC 18224] gi|210067843|gb|EEA21935.1| PMAA_057240 [Penicillium marneffei ATCC 18224]
  misc_feature (11)..(304): NCBI GI: 119188277 Blast Desc: CIMG_04186 [Coccidioides immitis RS]
  misc_feature (11)..(304): NCBI GI: 240107899 Blast Desc: CPC735_002400 [Coccidioides posadasii C735 delta SOWgp]
  misc_feature (1)..(297): NCBI GI: 121714216 Blast Desc: conserved [Aspergillus clavatus NRRL 1] gi|119402872|gb|EAW13293.1| conserved [Aspergillus clavatus NRRL 1]
  misc_feature: Useful for introducing or modulating the production of volatile compounds
MDRRDVIMNSQSNVFQILLWFIFVVAIFSVGARLATKLAMTRKLAWDDWIMLAATLAYLAQCISISQGASQGLGKPQNTLSTEQLGSFLKAEYASIVFLLLTWALIKWSISAFIHQLSPSTTHIRLNQTLSTIVAAWFLSSILVSLFQCELPAPWDYIHGQRCIDRRVWWIYVVVVNISTEFFIVALYFIMLATLKMSRVKKAIVLLIFSTRLLIIGAAVAQLLVFLNSFPSSDLTDALWTPILLNQVVLSLSVVTACAPYLKPFMESLESGIVRVENLPDSEEELSRDRTGTSRYYLSDLSNSSAGCSSRATDRC

SEQ ID NO: 25941 - DNA, 2111 bp, Muscodor strobelii
  misc_feature: SGI EST ID NO. CUFF.61253.0
  misc_feature: Variant of the nucleotide sequence at SEQ ID NO 25939
aaaaaactctggaaagaggggataacgaaatcatgctgaggtcgagatgaaaccaatataggagttccaaaaggcgttttcaagttctagtggtcggttctgagatcgacaaagatataactcaaggcgatcaagcggtgtattcgatgtatcacattccgaccagtgggacggggtcttgtgcgacacgttccggtgccaatgtgtggccgaagcaaaagggatgctggaatcaggaacactttcacaagctcttcgaggtccaatgccaaccaccactcaagacgggatgtcgaaataacggtttagagtatcctttttctcatatcaatatacggccctatatcgtccttcgccatggaaatttcgtgtgctcaatcgttgttcacccttataacctcactcactccatgagatacggctcagcaagatctactagttgctctatggagcttctggcgcaccactactcgcatgctatacaacgagatcaaaatggataggcgcgatgtgattatgaacagccagagcaatgtcttccagatattgctctggttcatctttgtcgtcgccatcttcagtgttggtgcccgcctagcgacaaaactcgccatgactagaaaattagcctgggatgactggatcatgctagctgctacacttgcatatttagcccagtgtatctcgatctcacaaggcgcctcgcaaggtttgggaaagccccaaaacactctaagcacagagcaacttggaagctttctcaaagcagagtatgctagcattgtgtttctactcttaacctgggccctcataaagtggtccatttccgcgttcatccaccaactcagcccaagcacgacacacatacgcctgaaccagaccctcagcaccattgtcgcagcatggttcctctcttcaatactcgtttctctattccaatgcgagctcccggcgccatgggactacatccatggtcaacgttgcattgatcggcgagtatggtggatatatgtggtcgtggtcaatatctcgaccgaattctttattgttgccctttactttattatgctggcgacgctcaaaatgtccagggtgaagaaagcaatcgtacttctgatattttcaactcgtctactaataatcggcgctgctgtggcacagttactcgtgtttctgaactcattcccaagtagcgatttgaccgacgcactttggaccccaatacttctcaaccaagtagttctttcactgagtgtagtaaccgcatgcgcgccctatctcaaacctttcatggaaagcctcgagtcagggatcgtgcgagtagaaaatctgccggattctgaggaggagctttcaagagatagaactggaacaagccgctactatctgagcgacttgagcaactcgtctgcgggttgttcttcacgggcgaccgaccggtgttaatggcccacgccgagggttcacaacaatggatacatgtcttagatttagtagcccttgtttgttgatattgtttagatagaaagtccacaaattaaacgtcgccacaaggctgtttaaacaagggaagttacacaacgccatgttccagatttcgcgatgttccgagtttcgtgatcaagtcgcagccaccagcagctgcggaggcgctcttaggttctcagtacttgagagtgccgtggtgaccataggaaggcattttacttgtaaactgttgatagctattttcagtctactgtctatatcattgtgtttatagcggcagatgaggtcccagacatcagctatgaagcctgcgtagagaacggaatactgccgcgaaaaactagaggtcgaaggctgcggacgatgcaccggtatcagtcgctgttagctgcaggctaagaataataaactgcaacacatgtggctcagatacgtaacacgacctacggaaaaacgggtggtggcatgaacgaccggtcaaacaaaaaagccacaaatcttgacctgcctcggctgcgtaggctacacacacagtaagcctctgattaggataccacagcaataataagcgaggagaaaacgccacgccgaccacccgacgtcgctccttgatgggccgcctc

SEQ ID NO: 25942 - DNA, 726 bp, Muscodor strobelii
  misc_feature: SGI cDNA ID NO. 568861
  misc_feature: Encodes the peptide sequence at SEQ ID NO 25943
atggcttttgaattgcgagagatcgatccgaaggcggattttccggccctcgcgcgatgccttttcgaatcctacgaagacccgccacagccatttttccacatgtggttccctatacatggaagtggccccgaagcacgcgaagaagccatcgccgagtgtgcagaccgcctcaaacaatggcatacccatgatcctaccagttactggcaaaaggtcattgaaacagaaactgggaaaatcgcgggcggttgtctatggaatatacacaaggaaaacccttttgcgaatcctcatgagttagaggtgtcctggtttcccgatggcggggctcgtcgatttatagagaaagccattgcgaatcatactcgacctcgatctcaagcagctcaacggcctcacatttacatgttcattatcttcacacacccggactacagacgcagaggagttggacagcagtttgtggattggggtaacaaggaagctgataaactcgaattcgagctgtttttggatgccacgccttacggtcgacctttgtacgaagctaataagatggtctacatcgaggagaatcggatcaacccggttacggatgagccggatgccgaatgggaagagatagagaaaaaggtcggccctgtcacgttctggttgatgtggagacccattggaggtaagtatgtagagggagaaactatcaagccgtgggagaccagttga

SEQ ID NO: 25943 - protein, 241 aa, Muscodor strobelii
  misc_feature: SGI Peptide ID NO. 568861
  misc_feature (1)..(236): NCBI GI: 156055888 Blast Desc: SS1G_05296 [Sclerotinia sclerotiorum 1980] gi|154703080|gb|EDO02819.1| SS1G_05296 [Sclerotinia sclerotiorum 1980]
  misc_feature (1)..(236): NCBI GI: 154302378 Blast Desc: BC1G_09973 [Botryotinia fuckeliana B05.10] gi|150855461|gb|EDN30653.1| BC1G_09973 [Botryotinia fuckeliana B05.10]
  misc_feature (1)..(239): NCBI GI: 256720567 Blast Desc: NECHADRAFT_55801 [Nectria haematococca mpVI 77-13-4]
  misc_feature (1)..(240): NCBI GI: 256728132 Blast Desc: NECHADRAFT_102153 [Nectria haematococca mpVI 77-13-4]
  misc_feature (1)..(225): NCBI GI: 154298180 Blast Desc: BC1G_12055 [Botryotinia fuckeliana B05.10] gi|150858241|gb|EDN33433.1| BC1G_12055 [Botryotinia fuckeliana B05.10]
  misc_feature (3)..(240): NCBI GI: 67525773 Blast Desc: AN3344.2 [Aspergillus nidulans FGSC A4] gi|40744132|gb|EAA63312.1| AN3344.2 [Aspergillus nidulans FGSC A4] gi|259485678|tpe|CBF82903.1| TPA: acetyltransferase nidulans
  misc_feature (1)..(241): NCBI GI: 145237354 Blast Desc: An07g02400 [Aspergillus niger] gi|134075793|emb|CAK39329.1| protein product [Aspergillus niger]
  misc_feature (1)..(238): NCBI GI: 242796234 Blast Desc: conserved [Talaromyces stipitatus ATCC 10500] gi|218719344|gb|EED18764.1| conserved [Talaromyces stipitatus ATCC 10500]
  misc_feature (7)..(234): NCBI GI: 119499411 Blast Desc: GNAT family acetyltransferase, [Neosartorya fischeri NRRL 181] gi|119414627|gb|EAW24566.1| GNAT family acetyltransferase, [Neosartorya fischeri NRRL 181]
  misc_feature (1)..(238): NCBI GI: 119490735 Blast Desc: NFIA_063540 [Neosartorya fischeri NRRL 181] gi|119411250|gb|EAW21193.1| conserved [Neosartorya fischeri NRRL 181]
MAFELREIDPKADFPALARCLFESYEDPPQPFFHMWFPIHGSGPEAREEAIAECADRLKQWHTHDPTSYWQKVIETETGKIAGGCLWNIHKENPFANPHELEVSWFPDGGARRFIEKAIANHTRPRSQAAQRPHIYMFIIFTHPDYRRRGVGQQFVDWGNKEADKLEFELFLDATPYGRPLYEANKMVYIEENRINPVTDEPDAEWEEIEKKVGPVTFWLMWRPIGGKYVEGETIKPWETS

SEQ ID NO: 25944 - DNA, 1272 bp, Muscodor strobelii
  misc_feature: SGI EST ID NO. CUFF.61417.1
  misc_feature: Variant of the nucleotide sequence at SEQ ID NO 25942
ttggggtaattacatactgtgatttgagtccccggaccagaccctcgttcccaacaactttcataaaaggaaaaatgccccgataaggactgtatcaataatcatttgctcttcgaaatccgacagattggtatatacggcaaatccttgcttaaagctagcgtgtgaagaatacgtggccgcaaacgaggaacatcgcaccaaagctcaaacaacacccttgaggaaaagcaaacgacttgatgcaacttgcatgccgaatcaccaactcgcaagcacttctcaaataatcaagatggcttttgaattgcgagagatcgatccgaaggcggattttccggccctcgcgcgatgccttttcgaatcctacgaagacccgccacagccatttttccacatgtggttccctatacatggaagtggccccgaagcacgcgaagaagccatcgccgagtgtgcagaccgcctcaaacaatggcatacccatgatcctaccagttactggcaaaaggtcattgaaacagaaactgggaaaatcgcgggcggttgtctatggaatatacacaaggaaaacccttttgcgaatcctcatgagttagaggtgtcctggtttcccgatggcggggctcgtcgatttatagagaaagccattgcgaatcatactcgacctcgatctcaagcagctcaacggcctcacatttcgtatctacagcagaactaacgtcgaggctagacatgttcattatcttcacacacccggactacagacgcagaggagttggacagcagtttgtggattggggtaacaaggaagctgataaactcgaattcgagctgtttttggatgccacgccttacggtcgacctttgtacgaagctaataagatggtctacatcgaggagaatcggatcaacccggttacggatgagccggatgccgaatgggaagagatagagaaaaaggtcggccctgtcacgttctggttgatgtggagacccattggaggtaagtatgtagagggagaaactatcaagccgtgggagaccagttgattcgactccactgaatcgttgtactggagtctgttgactatggtagttcattttgagtacatgtcggagcttgttccgatattacatgtattaggtgaacaatcaaaagaataaagacatgaaacataggtgtctaacgtagtaagacgataattggaatctgtgtacttgctttactaaaatgcggctcaatgcctacacgtctatactatattttag

SEQ ID NO: 25945 - DNA, 684 bp, Muscodor strobelii
  misc_feature: SGI cDNA ID NO. 568862
  misc_feature: Reduced expression when VOC is produced
  misc_feature: Encodes the peptide sequence at SEQ ID NO 25946
atgcctgaaacagtccttgacccaatacgtagcggggctctagataacggactgaccagctcagctcaacctgtgcgccagcttttcaatcgcgtgcgagcgcgagttatgatctcagggcttgacggcgtagggaaaaccacgattctccacaaatatctctctcagaacgagggtcgtgatgttttgacgacaatactagccgacggactcgttctacaaacgctacagtatggacagacccagttcgagacgatggacctcgtaagagcgggcaaggcggcagttctcgagaggcagatatttcttgccgatgatgcactggtctgggtaatcgatgcttctgatcaccatcgcgttaccgatattctgtggggtttgaaccaacttctcggatatggtgctggggaggagaaatacgagaagaaagtgcccgttctgatgttagtcaataaacagcgtatggaaatgattgttcctcaggagaaaatgacaacggatgacgtgtaccatcgtgtagtagctggagttaagacttttgaggaaaggcgataccttcgattgctcaccgtgggacagcacattgcagctaccgatgctgtaacaggagatggcattctggaagcattctcttggctgagtgatcaactgcaagtctctggagaacaactagagacgagctag

SEQ ID NO: 25946 - protein, 227 aa, Muscodor strobelii
  misc_feature: SGI Peptide ID NO. 568862
  misc_feature (26)..(218): NCBI GI: 149054474 Blast Desc: ADP-ribosylation factor 2, isoform CRA_c [Rattus norvegicus]
  misc_feature (22)..(218): NCBI GI: 89258459 Blast Desc: Arf1 [Suberites domuncula]
  misc_feature (26)..(218): NCBI GI: 57091007 Blast Desc: : similar to ADP-ribosylation factor 2 isoform 1 [Canis familiaris] gi|73965148|ref|XP_850048.1| : similar to ADP-ribosylation factor 2 isoform 2 [Canis familiaris]
  misc_feature (26)..(218): NCBI GI: 6671571 Blast Desc: ADP-ribosylation factor 2 [Mus musculus] gi|13162341|ref|NP_077064.1| ADP-ribosylation factor 2 [Rattus norvegicus] gi|27807247|ref|NP_777114.1| ADP-ribosylation factor
  misc_feature (22)..(218): NCBI GI: 193709134 Blast Desc: : similar to ADP ribosylation factor 79F CG8385-PF [Acyrthosiphon pisum]
  misc_feature (26)..(218): NCBI GI: 26327163 Blast Desc: protein product [Mus musculus]
  misc_feature (25)..(218): NCBI GI: 2492925 Blast Desc: ARF1_PLAFO RecName: Full=ADP-ribosylation factor 1 gi|1399034|gb|AAB03195.1| ADP-ribosylation factor 1 [Plasmodium falciparum]
  misc_feature (19)..(218): NCBI GI: 255719392 Blast Desc: KLTH0H02222p [Lachancea thermotolerans] gi|238941942|emb|CAR30114.1| KLTH0H02222p [Lachancea thermotolerans]
  misc_feature (31)..(221): NCBI GI: 193575609 Blast Desc: : similar to tripartite motif-containing 23 [Acyrthosiphon pisum]
  misc_feature (26)..(217): NCBI GI: 66358980 Blast Desc: ARF1/2 like small GTpase [Cryptosporidium parvum Iowa II] gi|46228393|gb|EAK89292.1| ARF1/2 like small GTpase [Cryptosporidium parvum Iowa II]
  misc_feature: Useful for introducing or modulating the production of volatile compounds
MPETVLDPIRSGALDNGLTSSAQPVRQLFNRVRARVMISGLDGVGKTTILHKYLSQNEGRDVLTTILADGLVLQTLQYGQTQFETMDLVRAGKAAVLERQIFLADDALVWVIDASDHHRVTDILWGLNQLLGYGAGEEKYEKKVPVLMLVNKQRMEMIVPQEKMTTDDVYHRVVAGVKTFEERRYLRLLTVGQHIAATDAVTGDGILEAFSWLSDQLQVSGEQLETS

SEQ ID NO: 25947 - DNA, 2682 bp, Muscodor strobelii
  misc_feature: SGI EST ID NO. CUFF.61308.0
  misc_feature: Variant of the nucleotide sequence at SEQ ID NO 25945
ggttcaggcattaccatcactttgagatatgctggtcgtttgattatctccacacgttccacataccgcggccagaggatccaattcatacttacttacgttaggtaaggacacaatgccgcatacagttttaggtaatttgatgataatgaatggatggtctatgcgctttactttacctctctcaacaatagaatctgcagtctggggaaacagactggtcacgatgccctcaaaacctgcggccactgtaccttggtctgatgtccggcctcggtgactaaactgtattgaccgctaacgcttgtcgctcacggggctgtgctctctggatccgattaaaaacggcgatgctcagactagctagaatagtccggtcacttattttcctaatttcaggtcgacgataccaatcgagcaaatgtgtataaccgcggtatctgagaggctttgacaggaccgaaatcaacgatagcaatataacgttcttcaccgactcttcgggagcaaccgctattccccgtatggtggttcagcctgcatacctaatcttacatccactagagccaccatagagctgcggagacccagcaaccatcaggcttggctgcttgtcagtacgtatcgtgaagagagtcgtcgccctgcatcagccactgtgcccatgtgactacaatgtgaagtatctcgcaggtttgtatagtaagaattacataatgaacagttgttaccccggatttctcagaaacacgtctgatgattgtcttaccctagacgaactatactgctctgaaccaacgaaaacctcgtcagtcacgttggcgcttgccactgcgttgcagtggatcgaaagactgcagtgtgacaaaggacatctgtgagtgtctcacgttgctaaacatctactcgtactacacatatgggtaaaaatagccatctgatatgcatgagtggtcttctattcagcatcctcgttaccttgaagactcgttcaacgtagcaaagcggaccgagcggctgccatccaatgacatgttgccaagccatcgtatctggtaagtcatcgttcaatacacaagacatgaatccttccagtctctgtgttactatacaacctacaacttacaatatacgaagatttcatttccgatgtagaaccttttaacggactgaagtgcgagtacataatggaagctctgcgaaacttcgctagcattctgcaaatattcgtaatcaagcacaatacacaaggttatacggatgtagcatgaccggaattcggtggcagcagttcaattagcactctctgcctatagtgtttttgattgaactgataagacatccgagcggaaactctacctgtccagcatctccgatttctcaagtcatggtatcatgcgcattctcagtcgcccctcatgatgggcgggcaaaatttcaatctacttgttgaagcgaggagcgacaggttagattgacctagagcgtaacctcatgtgccaaggatattgcaacagatatatcatcaatgatttttggtatttttctctccttcggtaatcgatagaaaatgtaccagaagtcctaagtatttgatgggaatataggaacgcgttgtatcccatgacacagatctatgtatttgagaaactagcttttgtagaatgttgatgccttttcggtacgtgaccactaccctacctggtaactgacatgggttcatatatgacatgaagtacgaagtgcatgcgggtaactatacccctctcttccaacaagatccacgatcagtcaattgtcaaaacaggccaactacgaagacatatgagatcacaatgcctgaaacagtccttgacccaatacgtagcggggctctagataacggactgaccagctcagctcaacctgtgcgccagcttttcaatcgcgtgcgagcgcgagttatgatctcagggcttgacggcgtagggaaaaccacgattctccacaaatatctctctcagaacgagggtcgtgatgttttgacgacaatactagccgacggactcgttctacaaacgctacagtatggacagacccagttcgagacgatggacctcgtaagagcgggcaaggcggcagttctcgagaggcagatatttcttgccgatgatgcactggtctgggtaatcgatgcttctgatcaccatcgcgttaccgatattctgtggggtttgaaccaacttctcggatatggtgctggggaggagaaatacgagaagaaagtgcccgttctgatgttagtcaataaacagcgtatggaaatgattgttcctcaggagaaaatgacaacggatgacgtgtaccatcgtgtagtagctggagttaagacttttgaggaaaggcgatacgtgagtgaacgataatgctatgtagtgatacttgctatggatttcagcttcgattgctcaccgtgggacagcacattgcagctaccgatgctgtaacaggagatggcattctggaagcattctcttggctgagtgatcaactgcaagtctctggagaacaactagagacgagctagatacgtagatacgctctttgtgaactcatcgaatagccgcgagtaattcttaagtaggtcacgaagtggcctacttgggtattcagtttcttcaacagaggcagtttggtatgctt

SEQ ID NO: 25948 - DNA, 2397 bp, Muscodor strobelii
  misc_feature: SGI cDNA ID NO. 568863
  misc_feature: Reduced expression when VOC is produced
  misc_feature: Encodes the peptide sequence at SEQ ID NO 25949
atgggtgcaggggacgatgagcccatgccagacgcaccggcgccagctccagtagcgaagccaaagcgtcgattcgcaccccaactcgttgagcacacggtcaagtcttctggtaacaagaaacctccggtatcagacaatgtaagcactacaaatcatggcggcgacagcagcggcaacagcaacacgtcgacgagattgaattcctcctccagcaacacagcagcctccgatacttcccgaagcaccagagatgtctccgtacaggtcaatgatattgacatgcccgatgccccccgaccaccacagacgaaaccagctcgacgctttgctccagtccctattgcaaccaccttcgattcatatagagttggcaatagaaatcctcatggcccgaccgctgagccaacacccgatccctcgcccacaactccgcagtcgtcttttgcatcatcatccaacgtctcaatggcatcggagccaacacagccgaaagcgacgaagccgaaaaggaaattcgcgccacaattgatcgagacaacacgcagagagagaaggacgggccaggaagggcccgcgactaagccaacggataagactgacatcacaccgggtaccaatcacatttacctgccgaagccgaaacggaaagttgtgccaccacctcggcccagcggcagcattgggggcagcgcgagtcggggactggcacatgcagcacatgcaaatcacgacagcgacgatgagtgctcgtcgcctttcctgagggcactgcgccagcgcggcctaggctcgcaatacaccacccgaaggagcacgcgaaccagttcgtatcaccccgagctcgatactatactgtcatccgaatcgggtaactcgtcagacgagaacgagaacggtgatgggacggcgcctgctctcaatttaggcgccccggctctatccgacacgcgcagcgaccggggcgagaattggagcaccagacgcaacgacttacgcaatcgtagagagtcgtgcgacgaagaatcttcgggttatctgcttgccgtagcggcccgagaggcggaacagcagcgggagttcgagcaggcactgtccgctttccccaatggcatgcgaccccaaggcgttgaacatttcttcgcccgagataactcagaagacgacgtgttaaccggcgatgagcctcctcttcgtcacggcccatcccaactgcttcggcgaaagtcaacggatccaggatgggccgtcaaggagatgcgcgcacacgccgacaaattggccaaaatgcgtgctgacaatagctcaagcgtggatgacgaattggacctggccgagatagcacctccgcctgaagatcctctttggaccaccacaagacgccgccattcgcgcgactcagatttgggagcttccagacattcaccaccattactatccagaagttcaagtagagcatcggtcgctgaagacaagcctgtctcacatgtaccgtctactggtgggctgcgcgctcgtccatttggaatgccctttgccatgcgtgccagtgaagctggtgatcatgctttgagcaaaatccacaagaacgcctcacctccgatgttgggtgccgatataagcttccgtacgtgtcctagtccacagcatactcgcatggaaacggaccagcagtattcccctttcgagcgaccggaagaaaagcaacgagacacaaccggcacgactggtctgtggcgtggttattgctacggcaaaactagccaacaagttgtcctcgaacatagaccgcctctcttacttcaaacccccggtgattcgtcgccgatagacccgttcgcttccgccttcggctcatcccagagcttcagcggtgcacagtcaccgagcatatcagtcgggaaacgagcgggcttacacatgctttctggacttgacgaccggctgaagaaagaaatggaacgcaaagaacgtgaaaaagcactcctagccgagttcgacgatgcttttgtcactcaggtctacaactatatcagtttgggatacccggctacggcgcgtgcatttgacgatgagctgagtaagatcagcggtatttgtgtcgaggagctccgtaaagacgacaccctcaaagttagcaaagggtttatgttgcggatggagatcaatgtgtccgccggtagctctagcagcagtggcacagattctagcggagatgagacaatggtatctcctgagttctcagagaggagagctcgtcataaaccaccccgttggaaggccctcaaattgtatatacgtgaatgggctcgtcagcacccatccctcaatggcggtgacgatacaagtcatcttgcctggggtgtgagagcacgtaggggcagctgggcgatataa

SEQ ID NO: 25949 - protein, 798 aa, Muscodor strobelii
  misc_feature: SGI Peptide ID NO. 568863
  misc_feature (21)..(798): NCBI GI: 156054232 Blast Desc: SS1G_05964 [Sclerotinia sclerotiorum 1980] gi|154703744|gb|EDO03483.1| SS1G_05964 [Sclerotinia sclerotiorum 1980]
  misc_feature (328)..(798): NCBI GI: 39954448 Blast Desc: MGG_08922 [Magnaporthe grisea 70-15] gi|145021133|gb|EDK05262.1| MGG_08922 [Magnaporthe grisea 70-15]
  misc_feature (328)..(798): NCBI GI: 85110663 Blast Desc: NCU08709 [Neurospora crassa OR74A] gi|9453816|emb|CAB99384.1| [Neurospora crassa] gi|28925255|gb|EAA34334.1| [Neurospora crassa OR74A]
  misc_feature (335)..(798): NCBI GI: 46117170 Blast Desc: FG04427.1 [Gibberella zeae PH-1]
  misc_feature (335)..(798): NCBI GI: 256729295 Blast Desc: NECHADRAFT_63110 [Nectria haematococca mpVI 77-13-4]
  misc_feature (335)..(798): NCBI GI: 171677205 Blast Desc: protein product [Podospora anserina] gi|170936670|emb|CAP61329.1| protein product [Podospora anserina]
  misc_feature (335)..(798): NCBI GI: 116205437 Blast Desc: CHGG_10602 [Chaetomium globosum CBS 148.51] gi|88176730|gb|EAQ84198.1| CHGG_10602 [Chaetomium globosum CBS 148.51]
  misc_feature (333)..(798): NCBI GI: 212541464 Blast Desc: conserved [Penicillium marneffei ATCC 18224] gi|210068186|gb|EEA22278.1| conserved [Penicillium marneffei ATCC 18224]
  misc_feature (310)..(798): NCBI GI: 242798550 Blast Desc: conserved [Talaromyces stipitatus ATCC 10500] gi|218716538|gb|EED15959.1| conserved [Talaromyces stipitatus ATCC 10500]
  misc_feature (169)..(798): NCBI GI: 225560135 Blast Desc: conserved [Ajellomyces capsulatus G186AR]
  misc_feature: Useful for introducing or modulating the production of volatile compounds
MGAGDDEPMPDAPAPAPVAKPKRRFAPQLVEHTVKSSGNKKPPVSDNVSTTNHGGDSSGNSNTSTRLNSSSSNTAASDTSRSTRDVSVQVNDIDMPDAPRPPQTKPARRFAPVPIATTFDSYRVGNRNPHGPTAEPTPDPSPTTPQSSFASSSNVSMASEPTQPKATKPKRKFAPQLIETTRRERRTGQEGPATKPTDKTDITPGTNHIYLPKPKRKVVPPPRPSGSIGGSASRGLAHAAHANHDSDDECSSPFLRALRQRGLGSQYTTRRSTRTSSYHPELDTILSSESGNSSDENENGDGTAPALNLGAPALSDTRSDRGENWSTRRNDLRNRRESCDEESSGYLLAVAAREAEQQREFEQALSAFPNGMRPQGVEHFFARDNSEDDVLTGDEPPLRHGPSQLLRRKSTDPGWAVKEMRAHADKLAKMRADNSSSVDDELDLAEIAPPPEDPLWTTTRRRHSRDSDLGASRHSPPLLSRSSSRASVAEDKPVSHVPSTGGLRARPFGMPFAMRASEAGDHALSKIHKNASPPMLGADISFRTCPSPQHTRMETDQQYSPFERPEEKQRDTTGTTGLWRGYCYGKTSQQVVLEHRPPLLLQTPGDSSPIDPFASAFGSSQSFSGAQSPSISVGKRAGLHMLSGLDDRLKKEMERKEREKALLAEFDDAFVTQVYNYISLGYPATARAFDDELSKISGICVEELRKDDTLKVSKGFMLRMEINVSAGSSSSSGTDSSGDETMVSPEFSERRARHKPPRWKALKLYIREWARQHPSLNGGDDTSHLAWGVRARRGSWAI

SEQ ID NO: 25950 - DNA, 2040 bp, Muscodor strobelii
  misc_feature: SGI cDNA ID NO. 568864
  misc_feature: Elevated expression when VOC is produced
  misc_feature: Encodes the peptide sequence at SEQ ID NO 25951
atgagtttattgagaggctttggctttctagcggcagctcttgtgccattggcacgggcccaattcccgccagcgccggaaaatgtgactgtactggagtcgaaatttggtaatggggtgactattagctataaagagaccagcgaaatctgcgagacgacagaaggcgtcaagtcctacgctggctatatccacttgccgaacggttcccttgaggatttaggagaaaaacaagactatcccattaacacattcttctggttcttcgaagctcgcaaagatccagcaaatgcgccgctgtccatatggttaaatggagggcctggaagctcttcaatgcttggcttgttcgctgagaatggaccttgctacatcaatccggattcgaattcgacgaggttgagcgagtggtcttggaataatgaagtcaacatgttgtacctagatcagcctgctcaggttgggtactcatacgatactctcaaaaactacacagtcgatctcgtgtcaggtgagacggtacaactcaatacttcagatactatcccggagcagaacaataccctactcgtcggaacttttcccagcggcgactcaaattcgacagcacgaggtacccgcaatgccgcaattgcaatgtggcacttcgcacaggcatggttccaagagtttccagcttaccatccgaatgactctcgtatcaaccttgcaactgaatcatacggtggacgatatggaccggccttcgccagtttcttcgaagagcaaaatcaaaagatcatgaacggcgcgtggaatgggacagtaggcgaagactttatcatcaacttcgacacgttagttctcatcaatgcgtgcgttgatcgattaatcatgtacccatatcatcctcacattgcctacaacaatacgtacggaatccaagcagtcaacgagactatctatgatgcaatgctcgacgcttgggaccgcgaaggagggtgccgtgatcagatcattgcgtgccgagagcttgcatctctttacgatcctgatgctattggtatcaacgacaccgtcaatgcgaattgtcaagcggctgaggagttttgctccaccgaggttcgcgggccatacctcgaacatcctgctaaccttcttgtaaattactacgattttgcaactcagaatccggacccattcccggatgctttctattacctctatctaaatcagccccatgtacaagcagcgctcggagtcccgctgaacttcacgtcatcgtctaatgctgtttccgatgcattccaagggatcggtgactatgttcgaccaggatggaccgaagacctggctttcctcctggagaatgggattaaagtgcatatgatgtacggtgatcgcgactatgcctgcaattggttgggaggcgaggccgtcagcttggcgatcaattataccggcacggacaaattccatgaagcaggatataccgacatcgtggtaaacgatacatatgttggcggacaagtccggcaatatggcaacttgtccttctcacgtgtgtatcaagctgggcatgagataccgtcctaccagcctgagactgcgtatcaaatgtttgtgcgggctctgtttaacaaagacatcgctactggtactgttgatgttgcggcaaaccagagctatgcgacgaatggcacggcggatacgtgggcgatcaagaatgtgaatccaaacgaccctgtgcattactgctacttgtactctattggagatacttgtaccgaggaccagctggagagtatacagaacggcacggctgtgattgtgagtggcattcttcaagattcgaattcgacaaacttatttcctgaaatcttcaatgggtcatcaacgactccgacgccgtcgcaatctggctcgggtagtcccacggcaactgaatccagcgcaacgccaagtgatacaggatcagcggccagctctcatgttgtgaatgtttggggtacagggctgtgggcagttctcgccgtcttcgggtacacaataattgcttga

SEQ ID NO: 25951 - protein, 679 aa, Muscodor strobelii
  misc_feature: SGI Peptide ID NO. 568864
  misc_feature (46)..(540): Pfam Id: PF00450 Pfam Desc: Serine carboxypeptidase
  misc_feature (21)..(630): NCBI GI: 259495738 Blast Desc: SCPB_NANOT RecName: Full=Carboxypeptidase S1 homolog B; AltName: Full=Serine carboxypeptidase B; Short=SPCB; Flags: Precursor gi|238840344|gb|EEQ30006.1| carboxypeptidase S1 canis
  misc_feature (17)..(672): NCBI GI: 74588400 Blast Desc: SCPB_TRIRU RecName: Full=Carboxypeptidase S1 homolog B; AltName: Full=Serine carboxypeptidase B; Short=SPCB; Flags: Precursor gi|45758826|gb|AAS76666.1| carboxypeptidase S1 rubrum]
  misc_feature (10)..(635): NCBI GI: 225562705 Blast Desc: carboxypeptidase [Ajellomyces capsulatus G186AR]
  misc_feature (17)..(614): NCBI GI: 240109125 Blast Desc: serine carboxypeptidase, [Coccidioides posadasii C735 delta SOWgp]
  misc_feature (10)..(608): NCBI GI: 259487624 Blast Desc: TPA: carboxypeptidase S1, (AFU_orthologue; AFUA_5G07330) [Aspergillus nidulans FGSC A4]
  misc_feature (10)..(608): NCBI GI: 67523563 Blast Desc: AN2237.2 [Aspergillus nidulans FGSC A4] gi|40744766|gb|EAA63922.1| AN2237.2 [Aspergillus nidulans FGSC A4]
  misc_feature (22)..(608): NCBI GI: 255956095 Blast Desc: Pc21g18050 [Penicillium chrysogenum Wisconsin 54-1255] gi|211590511|emb|CAP96702.1| Pc21g18050 [Penicillium chrysogenum Wisconsin 54-1255]
  misc_feature (10)..(504): NCBI GI: 240279514 Blast Desc: carboxypeptidase [Ajellomyces capsulatus H143]
  misc_feature (1)..(614): NCBI GI: 169777249 Blast Desc: [Aspergillus oryzae RIB40] gi|238494378|ref|XP_002378425.1| carboxypeptidase S1, [Aspergillus flavus NRRL3357] gi|83771827|dbj|BAE61957.1| protein
  misc_feature (48)..(614): NCBI GI: 119182012 Blast Desc: CIMG_06060 [Coccidioides immitis RS]
  misc_feature (21)..(620): SWISSPROT Homolog: EC 3.4.16.6 Carboxypeptidase D
  misc_feature: Useful for introducing or modulating the production of volatile compounds
MSLLRGFGFLAAALVPLARAQFPPAPENVTVLESKFGNGVTISYKETSEICETTEGVKSYAGYIHLPNGSLEDLGEKQDYPINTFFWFFEARKDPANAPLSIWLNGGPGSSSMLGLFAENGPCYINPDSNSTRLSEWSWNNEVNMLYLDQPAQVGYSYDTLKNYTVDLVSGETVQLNTSDTIPEQNNTLLVGTFPSGDSNSTARGTRNAAIAMWHFAQAWFQEFPAYHPNDSRINLATESYGGRYGPAFASFFEEQNQKIMNGAWNGTVGEDFIINFDTLVLINACVDRLIMYPYHPHIAYNNTYGIQAVNETIYDAMLDAWDREGGCRDQIIACRELASLYDPDAIGINDTVNANCQAAEEFCSTEVRGPYLEHPANLLVNYYDFATQNPDPFPDAFYYLYLNQPHVQAALGVPLNFTSSSNAVSDAFQGIGDYVRPGWTEDLAFLLENGIKVHMMYGDRDYACNWLGGEAVSLAINYTGTDKFHEAGYTDIVVNDTYVGGQVRQYGNLSFSRVYQAGHEIPSYQPETAYQMFVRALFNKDIATGTVDVAANQSYATNGTADTWAIKNVNPNDPVHYCYLYSIGDTCTEDQLESIQNGTAVIVSGILQDSNSTNLFPEIFNGSSTTPTPSQSGSGSPTATESSATPSDTGSAASSHVVNVWGTGLWAVLAVFGYTIIA

SEQ ID NO: 25952 - DNA, 1570 bp, Muscodor strobelii
  misc_feature: SGI EST ID NO. CUFF.61259.0
  misc_feature: Variant of the nucleotide sequence at SEQ ID NO 25950
aattgatataaatctgggatgataggtagatcgtttggaattgtagctcgcttaagcccgtggacatgtgtgccaagtctcaatcgacgtggagatggagggattctgcatgtagattccatggcgatgcatgtcgtatcactgcggggaagaagctgtaggggagtatatcttgactagaaatgacgatttgatcgaggattttgcgtgcctagctagaaaagtgagagatagccatggtcctgtttatacccgttgaccgggtatatatgtattaggatcccgggcggcatgacaggtgaatctctatgtatgttctcttgaaacggtttgaagttgtggcaacttcaattggtgattttttgtgaccggagtcggtattgaagagcagtatcttagtaactttcatgacaatgagtttattgagaggctttggctttctagcggcagctcttgtgccattggcacgggcccaattcccgccagcgccggaaaatgtgactgtactggagtcgaaatttggtaatggggtgactattagctataaagagaccagcgaaatctgcgagacgacagaaggcgtcaagtcctacgctggctatatccacttgccgaacggttcccttgaggatttaggagaaaaacaagactatcccattaacacattcttctggttcttcgaagctcgcaaagatccagcaaatgcgccgctgtccatatggttaaatggagggcctggaagctcttcaatgcttggcttgttcgctgagaatggaccttgctacatcaatccggattcgaattcgacgaggttgagcgagtggtcttggaataatgaagtcaacatgttgtacctagatcagcctgctcaggttgggtactcatacgatactctcaaaaactacacagtcgatctcgtgtcaggtgagacggtacaactcaatacttcagatactatcccggagcagaacaataccctactcgtcggaacttttcccagcggcgactcaaattcgacagcacgaggtacccgcaatgccgcaattgcaatgtggcacttcgcacaggcatggttccaagagtttccagcttaccatccgaatgactctcgtatcaaccttgcaactgaatcatacggtggacgatatggaccggccttcgccagtttcttcgaagagcaaaatcaaaagatcatgaacggcgcgtggaatgggacagtaggcgaagactttatcatcaacttcgacacgttagttctcatcaatgcgtgcgttgatcgattaatcatgtacccatatcatcctcacattgcctacaacaatacgtacggaatccaagcagtcaacgagactatctatgatgcaatgctcgacgcttgggaccgcgaaggagggtgccgtgatcagatcattgcgtgccgagagcttgcatctctttacgatcctgatgctattggtatcaacgacaccgtcaatgcgaattgtcaagcggctgaggagttttgctccaccgaggttcgcgggccatacctcgagtattcgaataatggcatgtatacagagatcccgcg

SEQ ID NO: 25953 - DNA, 1041 bp, Muscodor strobelii
  misc_feature: SGI cDNA ID NO. 568865
  misc_feature: Encodes the peptide sequence at SEQ ID NO 25954
atggcgaacatcgacccccagcttcaactcctgcggcgccaatgcctgcagcttttcgagccggatttcttggcttggccacacccacagctcctcgcccgcactgatgcccaaacctggttgtccaagtatctattcgacgagggtcgcaatgcccgactaccaccaaagccttacttattgagcattttgaaattacttattacaagaattgagaaagcttctcaaaaatcctcccaagatcgtgtgctacccacgcttagagcccgtctcgaggctctcacagcgcacggtctatcctcagaatatgatgcgatgaaagaacgcgcttatgtgacattcacctgtcttcctaccaatggctatcaagaacaggatggggctggagaacctaccatcacgctgttagaacagcgacaacttgtcgtaggctctcgtataacaggcttccgcacgtgggaaggcgcattacatcttgggacatacctcctaacgagggaagggtcaaatctaatacgaggaaaatcaattctcgaattaggcgctgggactggttttctctcaatactatgcgctaaacaccttggtgcccgtcatgtcgcgacgacagacggtgatgagggcgttgttgaaagtttgagagaaaatctcgcacttaatgatctaaacaatacacagggtagaatcgcgagaaagctgtggtggggcgaggagttgacagggacgtgggttgagcgtgactgcgatgctttcccatatgatgtggtaattggagctgatattacctacgacaagactgctatcttggctctggtgatcacgcttagcaagctgtttcaactgagaccagagctcctagccataatcgggggcgttatacgaaatgctgagacatttcaactcttcttagatgaatgtgcacgtcgatccttcactataaaagaagtgccgttcaccgcgaagtctatgcgtgagcaaaaggctctcttctacgcagccgctatgcctctcaagatattgaagattactggacctatctga

SEQ ID NO: 25954 - protein, 346 aa, Muscodor strobelii
  misc_feature: SGI Peptide ID NO. 568865
  misc_feature (171)..(229): Pfam Id: PF05175 Pfam Desc: Methyltransferase small domain
  misc_feature (4)..(343): NCBI GI: 189209580 Blast Desc: conserved [Pyrenophora tritici-repentis Pt-1C-BFP] gi|187977215|gb|EDU43841.1| conserved [Pyrenophora tritici-repentis Pt-1C-BFP]
  misc_feature (4)..(314): NCBI GI: 169621061 Blast Desc: SNOG_13734 [Phaeosphaeria nodorum SN15] gi|111057638|gb|EAT78758.1| SNOG_13734 [Phaeosphaeria nodorum SN15]
  misc_feature (6)..(343): NCBI GI: 46117270 Blast Desc: FG04477.1 [Gibberella zeae PH-1]
  misc_feature (1)..(343): NCBI GI: 256729330 Blast Desc: NECHADRAFT_95830 [Nectria haematococca mpVI 77-13-4]
  misc_feature (7)..(342): NCBI GI: 28950234 Blast Desc: conserved [Neurospora crassa]
  misc_feature (1)..(343): NCBI GI: 171676525 Blast Desc: protein product [Podospora anserina] gi|170936329|emb|CAP60987.1| protein product [Podospora anserina]
  misc_feature (3)..(306): NCBI GI: 39952327 Blast Desc: MGG_01806 [Magnaporthe grisea 70-15] gi|145020335|gb|EDK04464.1| MGG_01806 [Magnaporthe grisea 70-15]
  misc_feature (7)..(342): NCBI GI: 261353599 Blast Desc: FAM86A [Verticillium albo-atrum VaMs.102]
  misc_feature (4)..(346): NCBI GI: 225562596 Blast Desc: conserved [Ajellomyces capsulatus G186AR]
  misc_feature (8)..(344): NCBI GI: 226280897 Blast Desc: conserved [Paracoccidioides brasiliensis Pb01]
MANIDPQLQLLRRQCLQLFEPDFLAWPHPQLLARTDAQTWLSKYLFDEGRNARLPPKPYLLSILKLLITRIEKASQKSSQDRVLPTLRARLEALTAHGLSSEYDAMKERAYVTFTCLPTNGYQEQDGAGEPTITLLEQRQLVVGSRITGFRTWEGALHLGTYLLTREGSNLIRGKSILELGAGTGFLSILCAKHLGARHVATTDGDEGVVESLRENLALNDLNNTQGRIARKLWWGEELTGTWVERDCDAFPYDVVIGADITYDKTAILALVITLSKLFQLRPELLAIIGGVIRNAETFQLFLDECARRSFTIKEVPFTAKSMREQKALFYAAAMPLKILKITGPI

SEQ ID NO: 25955 - DNA, 1687 bp, Muscodor strobelii
  misc_feature: SGI EST ID NO. CUFF.61263.0
  misc_feature: Variant of the nucleotide sequence at SEQ ID NO 25953
atatgatgcgatgaaagaacgcgcttatgtgacattcacctgtcttcctaccaatggctatcaagaacaggatggggctggagaacctaccatcacgctgttagaacagcgacaacttgtcgtaggctctcgtataacaggcttccgcacgtgggaaggcgcattacatcttgggacatacctcctaacgagggaagggtcaaatctaatacgaggaaaatcaattctcgaattaggcgctgggactggttttctctcaatactatgcgctaaacaccttggtgcccgtcatgtcgcgacgacagacggtgatgagggcgttgttgaaagtttgagagaaaatctcgcacttaatgatctaaacaatacacagggtagaatcgcgagaaagctgtggtggggcgaggagttgacagggacgtgggttgagcgtgactgcgatgctttcccatatgatgtggtaattggagctgatattacctacgacaagactgctatcttggctctggtgatcacgcttagcaagctgtttcaactgagaccagagctcctagccataatcgggggcgttatacgaaatgctgagacatttcaactcttcttagatgaatgtgcacgtcgatccttcactataaaagaagtgccgttcaccgcgaagtctatgcgtgagcaaaaggctctcttctacgcagccgctatgcctctcaagatattgaagattactggacctatctgaaattatcaactatttctcaattatactattgcctctactcctcgacagctgttttaagtccctcaagcaattattgtgtacccgaagacggcgagaactgcccacagccctgtaccccaaacattcacaacatgagagctggccgctgatcctgtatcacttggcgttgcgctggattcagttgccgtgggactacccgagccagattgcgacggcgtcggagtcgttgatgacccattgaagatttcaggaaataagtttgtcgaattcgaatcttgaagaatgccactcacaatcacagccgtgccgttctgtatactctccagctggtcctcggtacaagtatctccaatagagtacaagtagcagtaatgcacagggtcgtttggattcacattcttgatcgcccacgtatccgccgtgccattcgtcgcatagctctggtttgccgcaacatcaacagtaccagtagcgatgtctttgttaaacagagcccgcacaaacatttgatacgcagtctcaggctggtaggacggtatctcatgcccagcttgatacacacgtgagaaggacaagttgccatattgccggacttgtccgccaacatatgtatcgtttaccacgatgtcggtatatcctgcttcatggaatttgtccgtgccggtataattgatcgccaagctgacggcctcgcctcccaaccaattgcaggcatagtcgcgatcaccgtacatcatatgcactttaatcccattctccaggaggaaagccaggtcttcggtccatcctggtcgaacatagtcaccgatcccttggaatgcatcggaaacagcattagacgatgacgtgaagttcagcgggactccgagcgctgcttgtacatggggctgatttagatagaggtaatagaaagcatccgggaatgggtccggattctgagttgcaaaatcg

SEQ ID NO: 25956 - DNA, 1047 bp, Muscodor strobelii
  misc_feature: SGI cDNA ID NO. 568866
  misc_feature: Encodes the peptide sequence at SEQ ID NO 25957
atggcgaacatcgacccccagcttcaactcctgcggcgccaatgcctgcagcttttcgagccggatttcttggcttggccacacccacagctcctcgcccgcactgatgcccaaacctggttgtccaagtatctattcgacgagggtcgcaatgcccgactaccaccaaagccttacttattgagcattttgaaattacttattacaagaattgagaaagcttctcaaaaatcctcccaagatgtacacataacgccctttacaaataaagcccgtctcgaggctctcacagcgcacggtctatcctcagaatatgatgcgatgaaagaacgcgcttatgtgacattcacctgtcttcctaccaatggctatcaagaacaggatggggctggagaacctaccatcacgctgttagaacagcgacaacttgtcgtaggctctcgtataacaggcttccgcacgtgggaaggcgcattacatcttgggacatacctcctaacgagggaagggtcaaatctaatacgaggaaaatcaattctcgaattaggcgctgggactggttttctctcaatactatgcgctaaacaccttggtgcccgtcatgtcgcgacgacagacggtgatgagggcgttgttgaaagtttgagagaaaatctcgcacttaatgatctaaacaatacacagggtagaatcgcgagaaagctgtggtggggcgaggagttgacagggacgtgggttgagcgtgactgcgatgctttcccatatgatgtggtaattggagctgatattacctacgacaagactgctatcttggctctggtgatcacgcttagcaagctgtttcaactgagaccagagctcctagccataatcgggggcgttatacgaaatgctgagacatttcaactcttcttagatgaatgtgcacgtcgatccttcactataaaagaagtgccgttcaccgcgaagtctatgcgtgagcaaaaggctctcttctacgcagccgctatgcctctcaagatattgaagattactggacctatctga

SEQ ID NO: 25957 - protein, 348 aa, Muscodor strobelii
  misc_feature: SGI Peptide ID NO. 568866
  misc_feature (173)..(231): Pfam Id: PF05175 Pfam Desc: Methyltransferase small domain
  misc_feature (4)..(345): NCBI GI: 189209580 Blast Desc: conserved [Pyrenophora tritici-repentis Pt-1C-BFP] gi|187977215|gb|EDU43841.1| conserved [Pyrenophora tritici-repentis Pt-1C-BFP]
  misc_feature (6)..(345): NCBI GI: 46117270 Blast Desc: FG04477.1 [Gibberella zeae PH-1]
  misc_feature (4)..(316): NCBI GI: 169621061 Blast Desc: SNOG_13734 [Phaeosphaeria nodorum SN15] gi|111057638|gb|EAT78758.1| SNOG_13734 [Phaeosphaeria nodorum SN15]
  misc_feature (1)..(345): NCBI GI: 256729330 Blast Desc: NECHADRAFT_95830 [Nectria haematococca mpVI 77-13-4]
  misc_feature (7)..(344): NCBI GI: 28950234 Blast Desc: conserved [Neurospora crassa]
  misc_feature (1)..(345): NCBI GI: 171676525 Blast Desc: protein product [Podospora anserina] gi|170936329|emb|CAP60987.1| protein product [Podospora anserina]
  misc_feature (7)..(344): NCBI GI: 261353599 Blast Desc: FAM86A [Verticillium albo-atrum VaMs.102]
  misc_feature (103)..(343): NCBI GI: 164424344 Blast Desc: NCU07181 [Neurospora crassa OR74A] gi|157070474|gb|EAA28170.2| conserved [Neurospora crassa OR74A]
  misc_feature (3)..(308): NCBI GI: 39952327 Blast Desc: MGG_01806 [Magnaporthe grisea 70-15] gi|145020335|gb|EDK04464.1| MGG_01806 [Magnaporthe grisea 70-15]
  misc_feature (4)..(348): NCBI GI: 225562596 Blast Desc: conserved [Ajellomyces capsulatus G186AR]
MANIDPQLQLLRRQCLQLFEPDFLAWPHPQLLARTDAQTWLSKYLFDEGRNARLPPKPYLLSILKLLITRIEKASQKSSQDVHITPFTNKARLEALTAHGLSSEYDAMKERAYVTFTCLPTNGYQEQDGAGEPTITLLEQRQLVVGSRITGFRTWEGALHLGTYLLTREGSNLIRGKSILELGAGTGFLSILCAKHLGARHVATTDGDEGVVESLRENLALNDLNNTQGRIARKLWWGEELTGTWVERDCDAFPYDVVIGADITYDKTAILALVITLSKLFQLRPELLAIIGGVIRNAETFQLFLDECARRSFTIKEVPFTAKSMREQKALFYAAAMPLKILKITGPI

SEQ ID NO: 25958 - DNA, 1687 bp, Muscodor strobelii; identical to SEQ ID NO: 25955
  misc_feature: SGI EST ID NO. CUFF.61263.0
  misc_feature: Variant of the nucleotide sequence at SEQ ID NO 25956

SEQ ID NO: 25959 - DNA, 2490 bp, Muscodor strobelii
  misc_feature: SGI cDNA ID NO. 568867
  misc_feature: Encodes the peptide sequence at SEQ ID NO 25960
atggctctctctgctctttcaggtacataccagctctacaagcaagacacggattccgttgctacctggctcgcatcaacagccaagtctcttggattctctgacgagcttgacaacaagtcgggtccaagtcaacgaccgaaaggaagggcccgcaccaaaggcaaaaagaaagctgcgaagtcaaaacaagcacagtcttctgcaagcccaaaatatgttattcatattaaggatttcgttccattggccgaatatatcgccagcacgtccaagtctgtgcccgcatctttcaagcatactattgaccgtgtcattgctgcccgatccagctttggtaacaaacttgaaaaacacggccgactagtcactgagctctccgatgctaagcatcagtacttcgtcgaagtattggaaaaggttcgcagcattcttctgccatccatggccgtcgacaccggagagtccgaaccacctactgcagagtggctaagcaatcgattttccgctctcgcggtctttgagccctctcaggaattcttagaggcaccggatattgagcgaccgcagaaagcccaggatgacaacgcaacttatgaggtagaagctcaggattcattcgaagatgctatgttcgcgttagctgttgtgatcaacgatatgaatcgtgtacgtgctcgcattagatggatctgggcgagttataagactggtctcttcgatctcgctgcggcctctattgcgaccaacactgccattgatcttatcagaaactcgatggaagacattctcgccgcaattgacaagcatggagggctctcctatatgcttgagaagttcttcttcgctcaatgcttaatgcgaggcttgaaaaaacacgaaacggtggtagtcggtatccaggataatctcaattacaaccgcacctatgacatcggcgacggcacatatttcatggtctttcggcaagttgaggcattccttaacgtacttcagccaggcgagattcccgtttacgaggagggcatgttcggagactatgaccctctgagcgatcggtcacgcaagtcgggccagcagaagttcgaggacgaccgcgcactgctaatgtccttcttcacccaactgatcacggcaatccgcggtgttcaagattggcccgtgaaggacgagttcacacgcgggatggaagagttagacagaaccaagaaagtaccattctacatggtatttgccgcccaaatcttcctcgatgtcacctatgagctgcaggaagacatcgaaagacctttcaacacattgatcaatcaaacgactacaatgagcaacgacatcaaattgcactttgagttccacgcggagctaaaaatcaagaattggcctgcgcagaacgatcactggcttcaggacctccagcgaaatatccagtggattggtaaggatcctcttcgatctgttcagcgaagaatcatccagcgctcaggtttcgaaataccagacccacaaagccaccgacttttccgaatgtctcctgttataagtggcctttttctgtatcatttccgctctcggtgccatgaagttggtctagcagttgccgacgcttggggttcgatccagtactgtttgcacctgtacactgcattacgccaagaaaggttgcttcaatctggcacatggactgacatggacattgtcacaaccaacctcggaaatgagagtttctacgttggtagtgaagcacccaaaacgcctgaagagtatttcaacaagttttgtatacagatgggcacctcacttgctgccatgactcgagccaaaggtcggcgaaagaacacgtctctcgagtctaaggccgggccccgtagactcaaggatgcgtcaccagtactgtccatgttcagagcacggtatgtcgagaacagtgagcaggtcgacttcactcccgaccacgtcaaccagatcatcaacctgagcctctttgaagaagagatcgacgacaatggaagcttcgtgatgggtcagattgacgatcccgagaagttgaaggagaagaagaagttgcagaactcgaagaagcagaatgcatctaagagtggtaatatgtcgccggagcagctcattagacccctcgttctggcattgcatgcggaatccttagaatttgcttttccttacttgcatatgcaccgctggtgctggcgggttctacgggcagtcaaagatgcctgcgatcccatactaagagagctttacacgccagcgtatctggagaacgagtctcaacttccatgggtcgttggatggattttggtggcggcgagtggtctagaaaatggaatatcggatcgtcgcccgctgcaaaaagcagccgatgcaatgaaagtctttttcgcttccggaagctcaagcttcatcgccaagaatgttcttacagctaagttcggcatgtctctcgaatttgaggctgaggattcgtctgacggttga

SEQ ID NO: 25960 - protein, 829 aa, Muscodor strobelii
  misc_feature: SGI Peptide ID NO. 568867
  misc_feature (1)..(826): NCBI GI: 39968499 Blast Desc: MGG_02342 [Magnaporthe grisea 70-15] gi|145014080|gb|EDJ98721.1| MGG_02342 [Magnaporthe grisea 70-15]
  misc_feature (43)..(791): NCBI GI: 116203265 Blast Desc: CHGG_09517 [Chaetomium globosum CBS 148.51] gi|88178035|gb|EAQ85503.1| CHGG_09517 [Chaetomium globosum CBS 148.51]
  misc_feature (1)..(775): NCBI GI: 238844174 Blast Desc: conserved [Microsporum canis CBS 113480]
  misc_feature (46)..(780): NCBI GI: 256730453 Blast Desc: NECHADRAFT_30210 [Nectria haematococca mpVI 77-13-4]
  misc_feature (12)..(822): NCBI GI: 169624449 Blast Desc: SNOG_15484 [Phaeosphaeria nodorum SN15] gi|160705172|gb|EAT77149.2| SNOG_15484 [Phaeosphaeria nodorum SN15]
  misc_feature (10)..(800): NCBI GI: 85078063 Blast Desc: NCU08753 [Neurospora crassa OR74A] gi|28917149|gb|EAA26866.1| [Neurospora crassa OR74A]
  misc_feature (6)..(535): NCBI GI: 169762544 Blast Desc: [Aspergillus oryzae RIB40] gi|83770200|dbj|BAE60333.1| protein product [Aspergillus oryzae]
  misc_feature (6)..(535): NCBI GI: 238488349 Blast Desc: conserved [Aspergillus flavus NRRL3357] gi|220697800|gb|EED54140.1| conserved [Aspergillus flavus NRRL3357]
  misc_feature (376)..(780): NCBI GI: 256730335 Blast Desc: NECHADRAFT_82715 [Nectria haematococca mpVI 77-13-4]
  misc_feature (6)..(813): NCBI GI: 240111699 Blast Desc: CPC735_011620 [Coccidioides posadasii C735 delta SOWgp]
MALSALSGTYQLYKQDTDSVATWLASTAKSLGFSDELDNKSGPSQRPKGRARTKGKKKAAKSKQAQSSASPKYVIHIKDFVPLAEYIASTSKSVPASFKHTIDRVIAARSSFGNKLEKHGRLVTELSDAKHQYFVEVLEKVRSILLPSMAVDTGESEPPTAEWLSNRFSALAVFEPSQEFLEAPDIERPQKAQDDNATYEVEAQDSFEDAMFALAVVINDMNRVRARIRWIWASYKTGLFDLAAASIATNTAIDLIRNSMEDILAAIDKHGGLSYMLEKFFFAQCLMRGLKKHETVVVGIQDNLNYNRTYDIGDGTYFMVFRQVEAFLNVLQPGEIPVYEEGMFGDYDPLSDRSRKSGQQKFEDDRALLMSFFTQLITAIRGVQDWPVKDEFTRGMEELDRTKKVPFYMVFAAQIFLDVTYELQEDIERPFNTLINQTTTMSNDIKLHFEFHAELKIKNWPAQNDHWLQDLQRNIQWIGKDPLRSVQRRIIQRSGFEIPDPQSHRLFRMSPVISGLFLYHFRSRCHEVGLAVADAWGSIQYCLHLYTALRQERLLQSGTWTDMDIVTTNLGNESFYVGSEAPKTPEEYFNKFCIQMGTSLAAMTRAKGRRKNTSLESKAGPRRLKDASPVLSMFRARYVENSEQVDFTPDHVNQIINLSLFEEEIDDNGSFVMGQIDDPEKLKEKKKLQNSKKQNASKSGNMSPEQLIRPLVLALHAESLEFAFPYLHMHRWCWRVLRAVKDACDPILRELYTPAYLENESQLPWVVGWILVAASGLENGISDRRPLQKAADAMKVFFASGSSSFIAKNVLTAKFGMSLEFEAEDSSDG

SEQ ID NO: 25961 - DNA, 1638 bp, Muscodor strobelii
  misc_feature: SGI cDNA ID NO. 568868
  misc_feature: Encodes the peptide sequence at SEQ ID NO 25962
atgttcagccagaaggatatcaaggatgcttcggagcagctacttcggttcaatcaaaacaatcctcttggcgatattcttgaacgatatgagaagttactcgaggaatacagcaagctgaggagtacacatgaacaggaccaggtccgtcttttgcagctctctcggggtcaggagaatgaccctttcgtcttggtcctcattgatggcgatggctatgtcttcaatgatagtttcatcactgctggtgcagatggtggatctatggcagcgcagaagctgaatgatgcaatcaaacatagcctcaagcgaaagggacttgatttttgcaacgttatgattcgagtatacgcgaatctcagcttcctatcaaagtcactcgcaaagaaatcactgactggtcccgaaaaacgatctctcgcgccattcgtttccgaatttaatcggtcgtatgagctgacagactttgtcgatgccggcgagcttaaggagggtgccgacttcaagctgagggcactcttacggctgtatgctgataacccacagtgcaagcatatttatttcgctgcttgccacgatggcggatatatctcggacttgactaaacacaggaccaaaagggataagttcaccctcataaagactccaggactcctttttcacgatcaattcttaagacttgtgctgaatatcgaggagttacttggaatttttctctctacaccccttgatgagtacggccgaccaaaaacacactcaaactcggaaccatcactacttgatattgacatcactccaccgagagtaggaggcgtcacggataattcgaagatctgttcattctatgcaatcgggaaatgccgttatggcaacatttgcaaaaacaaacacgttgatcccaagtcaccagttacaggatcgcacaagtctcgtgattcgtttcaggccgattcggacacagacttcaagcaaaatctcaactactttaagcctgcaagctcaagatcgagcaccaactggcgggaacagacacctatggcaatacaccagaagattcaacccccgtttaacctgccacagaaagagcagatccctccgggtcatgttgccctcaacagagatggccaacgccttgacccgtatatgtcatccccaactgctgctgctcacgctagattggagcagctttcttccatccgcaaattctgcaacagccaccagctcacccagtcgtgcactaacgaggagtgcaattacgatcatggcccactatctaaagatcttattccggtgctatggtggctcgcacgctcgcttccatgtagcaagaaagataagtgccggaatgcggcttgcgttctcggtcacgtatgccagtacccgaattgcaggcatcgtggtggcaagggaagctgccgattgccgcaccaggcccacgtaattgacttccaatactatgagtccgtatctggatccggaatcagcacaccgccgtcagacaacgattctcctagcacggatgcatatatggctccaggattcggcgatacctggcgagacgaggataacagccaccataacgttctgggcttcaagctggagcccggattagaggataatgtgtgggatcgtctgtga

SEQ ID NO: 25962 - protein, 545 aa, Muscodor strobelii
  misc_feature: SGI Peptide ID NO. 568868
  misc_feature (1)..(502): NCBI GI: 256728142 Blast Desc: NECHADRAFT_54159 [Nectria haematococca mpVI 77-13-4]
  misc_feature (1)..(483): NCBI GI: 46114842 Blast Desc: FG03263.1 [Gibberella zeae PH-1]
  misc_feature (1)..(502): NCBI GI: 39960186 Blast Desc: MGG_09373 [Magnaporthe grisea 70-15] gi|145014329|gb|EDJ98897.1| MGG_09373 [Magnaporthe grisea 70-15]
  misc_feature (1)..(484): NCBI GI: 255954481 Blast Desc: Pc21g09560 [Penicillium chrysogenum Wisconsin 54-1255] gi|211589704|emb|CAP95853.1| Pc21g09560 [Penicillium chrysogenum Wisconsin 54-1255]
  misc_feature (25)..(484): NCBI GI: 145248253 Blast Desc: An13g02370 [Aspergillus niger] gi|134081126|emb|CAK41636.1| protein product [Aspergillus niger]
  misc_feature (1)..(479): NCBI GI: 242772807 Blast Desc: conserved [Talaromyces stipitatus ATCC 10500] gi|218721732|gb|EED21150.1| conserved [Talaromyces stipitatus ATCC 10500]
  misc_feature (1)..(500): NCBI GI: 212531385 Blast Desc: conserved [Penicillium marneffei ATCC 18224] gi|210071213|gb|EEA25302.1| conserved [Penicillium marneffei ATCC 18224]
  misc_feature (5)..(241): NCBI GI: 238506657 Blast Desc: conserved [Aspergillus flavus NRRL3357] gi|220689243|gb|EED45594.1| conserved [Aspergillus flavus NRRL3357]
  misc_feature (23)..(432): NCBI GI: 189191142 Blast Desc: conserved [Pyrenophora tritici-repentis Pt-1C-BFP] gi|187973516|gb|EDU41015.1| conserved [Pyrenophora tritici-repentis Pt-1C-BFP]
  misc_feature (33)..(180): NCBI GI: 256725165 Blast Desc: NECHADRAFT_88437 [Nectria haematococca mpVI 77-13-4]
MFSQKDIKDASEQLLRFNQNNPLGDILERYEKLLEEYSKLRSTHEQDQVRLLQLSRGQENDPFVLVLIDGDGYVFNDSFITAGADGGSMAAQKLNDAIKHSLKRKGLDFCNVMIRVYANLSFLSKSLAKKSLTGPEKRSLAPFVSEFNRSYELTDFVDAGELKEGADFKLRALLRLYADNPQCKHIYFAACHDGGYISDLTKHRTKRDKFTLIKTPGLLFHDQFLRLVLNIEELLGIFLSTPLDEYGRPKTHSNSEPSLLDIDITPPRVGGVTDNSKICSFYAIGKCRYGNICKNKHVDPKSPVTGSHKSRDSFQADSDTDFKQNLNYFKPASSRSSTNWREQTPMAIHQKIQPPFNLPQKEQIPPGHVALNRDGQRLDPYMSSPTAAAHARLEQLSSIRKFCNSHQLTQSCTNEECNYDHGPLSKDLIPVLWWLARSLPCSKKDKCRNAACVLGHVCQYPNCRHRGGKGSCRLPHQAHVIDFQYYESVSGSGISTPPSDNDSPSTDAYMAPGFGDTWRDEDNSHHNVLGFKLEPGLEDNVWDRL

SEQ ID NO: 25963 - DNA, 4419 bp, Muscodor strobelii
  misc_feature: SGI EST ID NO. CUFF.61326.0
  misc_feature: Variant of the nucleotide sequence at SEQ ID NO 25961
cttccaatgaaattcagcaccccgctaaattttatgtgcaaacgagatgcagtgtgattaaagacactgcctccatcccctccctcgcatgcagccattgtgggctcggcctgccttttgtatggtgcggaattctattctctacgttcatcgcgctcgatccatggaggatagttagctgcgaccgagttgacaagcacacaacagcgcacatccattgacgatattctcgtacaacctctatattctcctccccgccgttcacgtcgactgtctgctcttctgctgggtatgtgggcaaacatattcaaagatgttcagccagaaggatatcaaggatgcttcggagcagctacttcggttcaatcaaaacaatcctcttggcgatattcttgaacgatatgagaagttactcgaggaatacagcaagctgaggagtacacatgaacaggaccaggtccgtcttttgcagctctctcggggtcaggagaatgaccctttcgtcttggtcctcattgatggcgatggctatgtcttcaatgatagtttcatcactgctggtgcagatggtggatctatggcagcgcagaagctgaatgatgcaatcaaacatagcctcaagcgaaagggacttgatttttgcaacgttatgattcgagtatacgcgaatctcagcttcctatcaaagtcactcgcaaagaaatcactgactggtcccgaaaaacgatctctcgcgccattcgtttccgaatttaatcggtcgtatgagctgacagactttgtcgatgccggcgagcttaaggagggtgccgacttcaagctgagggcactcttacggctgtatgctgataacccacagtgcaagcatatttatttcgctgcttgccacgatggcggatatatctcggacttgactaaacacaggaccaaaagggataagttcaccctcataaagactccaggactcctttttcacgatcaattcttaagacttgtgctgaatatcgaggagttacttggaatttttctctctacaccccttgatgagtacggccgaccaaaaacacactcaaactcggaaccatcactacttgatattgacatcactccaccgagagtaggaggcgtcacggataattcgaagatctgttcattctatgcaatcgggaaatgccgttatggcaacatttgcaaaaacaaacacgttgatcccaagtcaccagttacaggatcgcacaagtctcgtgattcgtttcaggccgattcggacacagacttcaagcaaaatctcaactactttaagcctgcaagctcaagatcgagcaccaactggcgggaacagacacctatggcaatacaccagaagattcaacccccgtttaacctgccacagaaagagcagatccctccgggtcatgttgccctcaacagagatggccaacgccttgacccgtatatgtcatccccaactgctgctgctcacgctagattggagcagctttcttccatccgcaaattctgcaacagccaccagctcacccagtcgtgcactaacgaggagtgcaattacgatcatggcccactatctaaagatcttattccggtgctatggtggctcgcacgctcgcttccatgtagcaagaaagataagtgccggaatgcggcttgcgttctcggtcacgtatgccagtacccgaattgcaggcatcgtggtggcaagggaagctgccgattgccgcaccaggcccacgtaattgacttccaatactatgagtccgtatctggatccggaatcagcacaccgccgtcagacaacgattctcctagcacggatgcatatatggctccaggattcggcgatacctggcgagacgaggataacagccaccataacgttctgggcttcaagctggagcccggattagaggataatgtgtgggatcgtctgtgaagactttaagggttggtagcaggtaatatggctaatcagatacgctgtctatatgacagctgcaatcgtacctcggatcgtctccgagattcttaaaatggcgagaaaagggacaaaagggaagcaaaaaggcaaagaaacaaggactgcctttttccgccagcggacattagcagatattagaaacggacccttaatgagtagacgaagctatgacgtttctgagaaattggtaaatgaggaacggcatctaaagtaataggaatatttgtgacatttcataagacgatgtggcgatgacctccttcattgcacgttggattctgacaagaaatccagcagaatcaatggaatcaatcactcaagctacgaatatatacgaatgtagtattgagggaaaaccaaacaaatgacgccctcgaatagcctatcaaccataccgaccagggcactgtgcttctgatactagtagcttatctaccgttgctggctcgtgttcaacgttacaaagtacactcgttatagatactctaggtcaatgcgttgtccaaacgcagataacactgcgttggctcccttgcaaacttctgcacagcatcatatccactgagctggggcggcgttgcttgaagcctgaaatgccagagtatcagtgcgaactgaatcttaagcgtctgtagtgcaagtcttttcccgaagcagcccctgggtcctaatccaaaagcaagttgcggaccagatgcgggatcgaagatttcaataccagtagatgcctcagtcttgagccagcgttcaggtcgaaatgccataatgtccttatcatcccatatacctgtcagacttttgccttcgcttcgacgcgctcctgggctccgttttgtgtccggaactttgatattaggctccaagtatcctgcaccgtttgccatcagaaacacgtcggtcccctttggaatatgacatccaagaaccgtagtatcttgtaaagcgacccggactacaaaggcgattgtgtttgcatggcgcaacacctcctctatcacagcatcgaggtagggtatgctcgtctttgaaagctcttggtaagtgggcgctcgcttctcgtccaatgccagaggcaatgcggcacgaagcgattcccgcaatctgtcttgattgttggggttatccgtcagcatcttgaccccccatgccactgtagttgcagaggtgtcatgaccagctagcatgaagccaaagaattcatcagagatgccgcgcttgtgataatcgggttcgcgaccttccttgactgcgacttctttctcgcgcaatagcaccgaatgcagagcactcctaggctcgttgtctccgttatctatcaataccacagattcctctaccttatttcggatgtatttatctttaattgcggttgcccttctcatgtacggaagtttgcggaggatccaagaggtgaaaacaggggctggtgacagttgcgtatcggtgacagaacttgcgagtgtcaggactgcggcgaaaatgtcaggaatactaccgtcaggaaatatcactggctcatcgatactggaggctatctcaggcttgcacttcaatatagcttcgaggcgttggattgtgatgctctccgcttcgggcagaccaaaagatgacgcgaaaatactatctagtgccacatatgtgatatcgttatgagctgaaaagggtcggccttcagccatgtcgcactttgcctgccataccttgatcaaggtacataccgaattgtacacctcgggagcactcactttactgataaaggttggagccataagatggttgatgagattccgattgtttttgaagcgcgaatcggaagagagaaattgaatatgttgttcaggaagtatacccccaatgagctcttcgaaaaacccactgcggtcaaactctttgcgacgaagaaggatatcctgcgcctcgaacgggtctgtcactactacccacggcagtgatccaggttttataaaagcttggataatcacactttgatgtcgcgcggtcaacgatgttaaccagcactaatgccaagaattagtggtcgttatcatttctggacggttgatgaaggctcacaaaaatgcgttttgtacgcatcacgtagctcatcatctccggaacatcgcctaatagttttctcgcggcatctttgttatacggaataccagcaagtggcttgggtaatatgcgtcggtatcccaagtataacactatcgtgagcaagccaagcaagaatttgccgctaggtgacgaaaacacggcacccatttcgaagttcctttagaattctgctttagacgagaactattcttctagcctcagagtgcatccggcagtgactcatttcgctttcattcaagatattaacgtgtcttctgtgagaatgtagtgaggaggtgggccgattatctaaaggcgagattcgc

SEQ ID NO: 25964 - DNA, 1725 bp, Muscodor strobelii
  misc_feature: SGI cDNA ID NO. 568869
  misc_feature: Encodes the peptide sequence at SEQ ID NO 25965
atgggtgccgtgttttcgtcacctagcggcaaattcttgcttggcttgctcacgatagtgttatacttgggataccgacgcatattacccaagccacttgctggtattccgtataacaaagatgccgcgagaaaactattaggcgatgttccggagatgatgagctacgtgatgcgtacaaaacgcattttttgctggttaacatcgttgaccgcgcgacatcaaagtgtgattatccaagcttttataaaacctggatcactgccgtgggtagtagtgacagacccgttcgaggcgcaggatatccttcttcgtcgcaaagagtttgaccgcagtgggtttttcgaagagctcattgggggtatacttcctgaacaacatattcaatttctctcttccgattcgcgcttcaaaaacaatcggaatctcatcaaccatcttatggctccaacctttatcagtaaagtgagtgctcccgaggtgtacaattcggtatgtaccttgatcaaggtatggcaggcaaagtgcgacatggctgaaggccgacccttttcagctcataacgatatcacatatgtggcactagatagtattttcgcgtcatcttttggtctgcccgaagcggagagcatcacaatccaacgcctcgaagctatattgaagtgcaagcctgagatagcctccagtatcgatgagccagtgatatttcctgacggtagtattcctgacattttcgccgcagtcctgacactcgcaagttctgtcaccgatacgcaactgtcaccagcccctgttttcacctcttggatcctccgcaaacttccgtacatgagaagggcaaccgcaattaaagataaatacatccgaaataaggtagaggaatctgtggtattgatagataacggagacaacgagcctaggagtgctctgcattcggtgctattgcgcgagaaagaagtcgcagtcaaggaaggtcgcgaacccgattatcacaagcgcggcatctctgatgaattctttggcttcatgctagctggtcatgacacctctgcaactacagtggcatggggggtcaagatgctgacggataaccccaacaatcaagacagattgcgggaatcgcttcgtgccgcattgcctctggcattggacgagaagcgagcgcccacttaccaagagctttcaaagacgagcataccctacctcgatgctgtgatagaggaggtgttgcgccatgcaaacacaatcgcctttgtagtccgggtcgctttacaagatactacggttcttggatgtcatattccaaaggggaccgacgtgtttctgatggcaaacggtgcaggatacttggagcctaatatcaaagttccggacacaaaacggagcccaggagcgcgtcgaagcgaaggcaaaagtctgacaggtatatgggatgataaggacattatggcatttcgacctgaacgctggctcaagactgaggcatctactggtattgaaatcttcgatcccgcatctggtccgcaacttgcttttggattaggacccaggggctgcttcgggaaaagacttgcactacagacgcttaagattcagttcgcactgatactctggcatttcaggcttcaagcaacgccgccccagctcagtggatatgatgctgtgcagaagtttgcaagggagccaacgcagtgttatctgcgtttggacaacgcattgacctag

SEQ ID NO: 25965 - protein, 574 aa, Muscodor strobelii
  misc_feature: SGI Peptide ID NO. 568869
  misc_feature (58)..(569): Pfam Id: PF00067 Pfam Desc: Cytochrome P450
  misc_feature (277)..(449): Pfam Id: PF00067 Pfam Desc: Cytochrome P450
  misc_feature (485)..(543): Pfam Id: PF00067 Pfam Desc: Cytochrome P450
  misc_feature (14)..(569): NCBI GI: 18026282 Blast Desc: cytochrome P450 [Gibberella zeae]
  misc_feature (14)..(569): NCBI GI: 18026284 Blast Desc: cytochrome P450 [Gibberella zeae]
  misc_feature (6)..(568): NCBI GI: 91771577 Blast Desc: cytochrome P450 monooxygenase [Hypocrea virens]
  misc_feature (14)..(569): NCBI GI: 20475383 Blast Desc: cytochrome p450 monooxygenase [Gibberella zeae]
  misc_feature (7)..(572): NCBI GI: 169610165 Blast Desc: SNOG_08178 [Phaeosphaeria nodorum SN15] gi|111063334|gb|EAT84454.1| SNOG_08178 [Phaeosphaeria nodorum SN15]
  misc_feature (16)..(569): NCBI GI: 115390260 Blast Desc: [Aspergillus terreus NIH2624] gi|114195031|gb|EAU36731.1| [Aspergillus terreus NIH2624]
  misc_feature (5)..(572): NCBI GI: 189191520 Blast Desc: cytochrome P450 monooxygenase [Pyrenophora tritici-repentis Pt-1C-BFP] gi|187973705|gb|EDU41204.1| cytochrome P450 monooxygenase [Pyrenophora tritici-repentis
  misc_feature (14)..(569): NCBI GI: 29126007 Blast Desc: P450 monooxygenase for C-4 hydroxylation of trichothecene [Fusarium sporotrichioides]
  misc_feature (14)..(569): NCBI GI: 269856267 Blast Desc: cytochrome P450 monooxygenase [Fusarium sp. NRRL 13405]
  misc_feature (14)..(569): NCBI GI: 22300021 Blast Desc: AF330109_1 TRI13 [Fusarium sporotrichioides] gi|23957822|gb|AAN40834.1| cytochrome P450 [Fusarium sporotrichioides]
  misc_feature (86)..(543): SWISSPROT Homolog: EC 1.14.14.1 Unspecific monooxygenase
MGAVFSSPSGKFLLGLLTIVLYLGYRRILPKPLAGIPYNKDAARKLLGDVPEMMSYVMRTKRIFCWLTSLTARHQSVIIQAFIKPGSLPWVVVTDPFEAQDILLRRKEFDRSGFFEELIGGILPEQHIQFLSSDSRFKNNRNLINHLMAPTFISKVSAPEVYNSVCTLIKVWQAKCDMAEGRPFSAHNDITYVALDSIFASSFGLPEAESITIQRLEAILKCKPEIASSIDEPVIFPDGSIPDIFAAVLTLASSVTDTQLSPAPVFTSWILRKLPYMRRATAIKDKYIRNKVEESVVLIDNGDNEPRSALHSVLLREKEVAVKEGREPDYHKRGISDEFFGFMLAGHDTSATTVAWGVKMLTDNPNNQDRLRESLRAALPLALDEKRAPTYQELSKTSIPYLDAVIEEVLRHANTIAFVVRVALQDTTVLGCHIPKGTDVFLMANGAGYLEPNIKVPDTKRSPGARRSEGKSLTGIWDDKDIMAFRPERWLKTEASTGIEIFDPASGPQLAFGLGPRGCFGKRLALQTLKIQFALILWHFRLQATPPQLSGYDAVQKFAREPTQCYLRLDNALT

SEQ ID NO: 25966 - DNA, 3686 bp, Muscodor strobelii
  misc_feature: SGI EST ID NO. CUFF.61327.1
  misc_feature: Variant of the nucleotide sequence at SEQ ID NO 25964
agataatcggcccacctcctcactacattctcacagaagacacgttaatatcttgaatgaaagcgaaatgagtcactgccggatgcactctgaggctagaagaatagttctcgtctaaagcagaattctaaaggaacttcgaaatgggtgccgtgttttcgtcacctagcggcaaattcttgcttggcttgctcacgatagtgttatacttgggataccgacgcatattacccaagccacttgctggtattccgtataacaaagatgccgcgagaaaactattaggcgatgttccggagatgatgagctacgtgatgcgtacaaaacgcattttttgctggttaacatcgttgaccgcgcgacatcaaagtgtgattatccaagcttttataaaacctggatcactgccgtgggtagtagtgacagacccgttcgaggcgcaggatatccttcttcgtcgcaaagagtttgaccgcagtgggtttttcgaagagctcattgggggtatacttcctgaacaacatattcaatttctctcttccgattcgcgcttcaaaaacaatcggaatctcatcaaccatcttatggctccaacctttatcagtaaagtgagtgctcccgaggtgtacaattcggtatgtaccttgatcaaggtatggcaggcaaagtgcgacatggctgaaggccgacccttttcagctcataacgatatcacatatgtggcactagatagtattttcgcgtcatcttttggtctgcccgaagcggagagcatcacaatccaacgcctcgaagctatattgaagtgcaagcctgagatagcctccagtatcgatgagccagtgatatttcctgacggtagtattcctgacattttcgccgcagtcctgacactcgcaagttctgtcaccgatacgcaactgtcaccagcccctgttttcacctcttggatcctccgcaaacttccgtacatgagaagggcaaccgcaattaaagataaatacatccgaaataaggtagaggaatctgtggtattgatagataacggagacaacgagcctaggagtgctctgcattcggtgctattgcgcgagaaagaagtcgcagtcaaggaaggtcgcgaacccgattatcacaagcgcggcatctctgatgaattctttggcttcatgctagctggtcatgacacctctgcaactacagtggcatggggggtcaagatgctgacggataaccccaacaatcaagacagattgcgggaatcgcttcgtgccgcattgcctctggcattggacgagaagcgagcgcccacttaccaagagctttcaaagacgagcataccctacctcgatgctgtgatagaggaggtgttgcgccatgcaaacacaatcgcctttgtagtccgggtcgctttacaagatactacggttcttggatgtcatattccaaaggggaccgacgtgtttctgatggcaaacggtgcaggatacttggagcctaatatcaaagttccggacacaaaacggagcccaggagcgcgtcgaagcgaaggcaaaagtctgacaggtatatgggatgataaggacattatggcatttcgacctgaacgctggctcaagactgaggcatctactggtattgaaatcttcgatcccgcatctggtccgcaacttgcttttggattaggacccaggggctgcttcgggaaaagacttgcactacagacgcttaagattcagttcgcactgatactctggcatttcaggcttcaagcaacgccgccccagctcagtggatatgatgctgtgcagaagtttgcaagggagccaacgcagtgttatctgcgtttggacaacgcattgacctagagtatctataacgagtgtactttgtaacgttgaacacgagccagcaacggtagataagctactagtatcagaagcacagtgccctggtcggtatggttgataggctattcgagggcgtcatttgtttggttttccctcaatactacattcgtatatattcgtagcttgagtgattgattccattgattctgctggatttcttgtcagaatccaacgtgcaatgaaggaggtcatcgccacatcgtcttatgaaatgtcacaaatattcctattactttagatgccgttcctcatttaccaatttctcagaaacgtcatagcttcgtctactcattaagggtccgtttctaatatctgctaatgtccgctggcggaaaaaggcagtccttgtttctttgcctttttgcttcccttttgtcccttttctcgccattttaagaatctcggagacgatccgaggtacgattgcagctgtcatatagacagcgtatctgattagccatattacctgctaccaacccttaaagtcttcacagacgatcccacacattatcctctaatccgggctccagcttgaagcccagaacgttatggtggctgttatcctcgtctcgccaggtatcgccgaatcctggagccatatatgcatccgtgctaggagaatcgttgtctgacggcggtgtgctgattccggatccagatacggactcatagtattggaagtcaattacgtgggcctggtgcggcaatcggcagcttcccttgccaccacgatgcctgcaattcgggtactggcatacgtgaccgagaacgcaagccgcattccggcacttatctttcttgctacatggaagcgagcgtgcgagccaccatagcaccggaataagatctttagatagtgggccatgatcgtaattgcactcctcgttagtgcacgactgggtgagctggtggctgttgcagaatttgcggatggaagaaagctgctccaatctagcgtgagcagcagcagttggggatgacatatacgggtcaaggcgttggccatctctgttgagggcaacatgacccggagggatctgctctttctgtggcaggttaaacgggggttgaatcttctggtgtattgccataggtgtctgttcccgccagttggtgctcgatcttgagcttgcaggcttaaagtagttgagattttgcttgaagtctgtgtccgaatcggcctgaaacgaatcacgagacttgtgcgatcctgtaactggtgacttgggatcaacgtgtttgtttttgcaaatgttgccataacggcatttcccgattgcatagaatgaacagatcttcgaattatccgtgacgcctcctactctcggtggagtgatgtcaatatcaagtagtgatggttccgagtttgagtgtgtttttggtcggccgtactcatcaaggggtgtagagagaaaaattccaagtaactcctcgatattcagcacaagtcttaagaattgatcgtgaaaaaggagtcctggagtctttatgagggtgaacttatcccttttggtcctgtgtttagtcaagtccgagatatatccgccatcgtggcaagcagcgaaataaatatgcttgcactgtgggttatcagcatacagccgtaagagtgccctcagcttgaagtcggcaccctccttaagctcgccggcatcgacaaagtctgtcagctcatacgaccgattaaattcggaaacgaatggcgcgagagatcgtttttcgggaccagtcagtgatttctttgcgagtgactttgataggaagctgagattcgcg

SEQ ID NO: 25967 - DNA, 1050 bp, Muscodor strobelii
  misc_feature: SGI cDNA ID NO. 568870
  misc_feature: Encodes the peptide sequence at SEQ ID NO 25968
atgcagttgacaacactaacaatcgcatccgcgctccttatggagctcggcatgagccaaatggttcctatgatgcggttcagttgctcgcagctcgttgtagaccggctcgaccccctcgtgaatccaggctccgtgccttcgcctcatctacaccaaattgtcggaggtaattccttcaatgcgtccatggacccttcatcgcatgacctaccttcgatgtcgacgtgcacaagctgcactttttcagaggacttctcgaattattggacagcagtcttgtactttcgggcacgaaacgggacatacaagagagtaccacagattcccagcgaggggctgaaagcgaatggcggaataaccgtttattatatcccaagtcccgacgcaaaatcaaacgtaacggcattcagaccgggattccgaatgcttgtgggcgacgcagatcttcgctcgccaggcacagcaccaaaggtctgccataggtgcatgcctgcctctggcgacaatagtaatatcaactgtggagctccggatagtcagacactacctactaagttctgcgctggcggaatacgatctgtacttactttcccgacatgttgggatggtaagaacttagacagccctgatcatgagagtcatgtggcgtatccagcttcaggagcgacgccccagtatgttggagctgatggtgtgtgcccatcgagccatccagtcaagatccctcaagttatgtatgaggttatgtgggatactcgaccattcaatgacaagtctttgtggcccgaggacggttcgcaaccatttgtctggagcacgggcgaccagcacgggtattctcaacatggcgactacgtcttcggatggcagggtgatgctcttcaacgggccatggacacgcgagcttgcaatggaagtacctgcactggcaatgtattgaagacccagtctgatgaggatgcgatgaaatgtgttaagtcacgaactgtcgacgaggatatcgatagttggttaacggagcttcctggcatggttatggtaacttag

SEQ ID NO: 25968 - protein, 349 aa, Muscodor strobelii
  misc_feature: SGI Peptide ID NO. 568870
  misc_feature (38)..(290): Pfam Id: PF09362 Pfam Desc: Domain of function (DUF1996)
  misc_feature (8)..(348): NCBI GI: 116191393 Blast Desc: CHGG_05414 [Chaetomium globosum CBS 148.51] gi|88181327|gb|EAQ88795.1| CHGG_05414 [Chaetomium globosum CBS 148.51]
  misc_feature (24)..(348): NCBI GI: 116203171 Blast Desc: CHGG_09470 [Chaetomium globosum CBS 148.51] gi|88177988|gb|EAQ85456.1| CHGG_09470 [Chaetomium globosum CBS 148.51]
  misc_feature (1)..(336): NCBI GI: 171693385 Blast Desc: protein product [Podospora anserina] gi|170946641|emb|CAP73444.1| protein product [Podospora anserina]
  misc_feature (24)..(336): NCBI GI: 171694483 Blast Desc: protein product [Podospora anserina] gi|170947190|emb|CAP73995.1| protein product [Podospora anserina]
  misc_feature (1)..(336): NCBI GI: 171682738 Blast Desc: protein product [Podospora anserina] gi|170941328|emb|CAP66978.1| protein product [Podospora anserina]
  misc_feature (1)..(344): NCBI GI: 39941238 Blast Desc: MGG_05530 [Magnaporthe grisea 70-15] gi|145022203|gb|EDK06223.1| MGG_05530 [Magnaporthe grisea 70-15]
  misc_feature (24)..(344): NCBI GI: 116208376 Blast Desc: CHGG_03481 [Chaetomium globosum CBS 148.51] gi|88184078|gb|EAQ91546.1| CHGG_03481 [Chaetomium globosum CBS 148.51]
  misc_feature (22)..(347): NCBI GI: 164427037 Blast Desc: NCU02341 [Neurospora crassa OR74A] gi|157071579|gb|EAA30531.2| conserved [Neurospora crassa OR74A]
  misc_feature (23)..(276): NCBI GI: 169625738 Blast Desc: SNOG_16145 [Phaeosphaeria nodorum SN15] gi|160705716|gb|EAT76517.2| SNOG_16145 [Phaeosphaeria nodorum SN15]
  misc_feature (22)..(347): NCBI GI: 40804600 Blast Desc: conserved [Neurospora crassa]
MQLTTLTIASALLMELGMSQMVPMMRFSCSQLVVDRLDPLVNPGSVPSPHLHQIVGGNSFNASMDPSSHDLPSMSTCTSCTFSEDFSNYWTAVLYFRARNGTYKRVPQIPSEGLKANGGITVYYIPSPDAKSNVTAFRPGFRMLVGDADLRSPGTAPKVCHRCMPASGDNSNINCGAPDSQTLPTKFCAGGIRSVLTFPTCWDGKNLDSPDHESHVAYPASGATPQYVGADGVCPSSHPVKIPQVMYEVMWDTRPFNDKSLWPEDGSQPFVWSTGDQHGYSQHGDYVFGWQGDALQRAMDTRACNGSTCTGNVLKTQSDEDAMKCVKSRTVDEDIDSWLTELPGMVMVT

SEQ ID NO: 25969 - DNA, 1431 bp, Muscodor strobelii
  misc_feature: SGI cDNA ID NO. 568871
  misc_feature: Elevated expression when VOC is produced
  misc_feature: Encodes the peptide sequence at SEQ ID NO 25970
atgctgatggctctcacgtatgtctggtcctcatttcgtatattgagtattgagttcggcccgggttatttgaagagttggatactaccgtgggccaaagaagtgaacactgccaagacaggtaccggtttacgaatggttgtctttggtggaggagatattgctacacctgatggatcaagcaaagactttggcggtccaaatgcatcgtggaccaagctcggatgcgacacatatatctcgttcgttccggaaacacgtacaagaacaggtgccgtgatgtcaaatacgctgttcgagactgcattcgagcgtattgccctagccactaaaaacggtagcgaaaataacaaaaccaagactcttgactactcatgggttgcccaacaatatcctgtaccaactcatgccgatatttcttcccaaattaactcgttcctttcgagccctaagccgcatatcacccctgcggaaacgctttgggtatttagcttaggaaattgggagatctggcagcttgctgcgatgccacgcaagcttgcgactgaagtactcgattctagtgtacgaagtctttttttctacttggagatgctgtttcgtgcggcgcaagaccgaaattcagtggcctattccaacctctactcgaacactgatatctctgatgaagagcaaaaggcgatgtcactccctgttctgccgtttcgagttttcttgcctcatttgctcgatatcgctttaacgccgggcttcgcaacagcacgtccagcgccaccatttccacattctcgttccgatcaacttaggaatgcgatatttctgatgaggtattgggatacattgatagatgcggcgatggacgattggctagcaacaccagaccctagtacatggtcagctacggatgctgtggatatcaacgttgtcaaagcaatcactgggaaaaggtcgccggtggatgagggaaacggtaccggagcacatcaacaagaaaatcaagcgaagagagatatcggcaagcacaagaatttccacagccgagaagcaggatcctatgacatgtctcgtcatattcgagaactgatggtcgatcgtcagctccgagatctcgacctggcggatcacaacggtctcggtgagcaaccactggaagagagcttccttgatgtctcgaaaccctgcgtatcgcagtcaatgattgaaaaaattctgccagcgaagaagtccagcggtcggaagacacaagtcaaccagtgtggtaaaccggacgaccatctcttctgggatgagttcaccatttctcagcgggcaatcaatgggatcgcttcgcatgccactgcacagatcctcgatcatgtgaaatcagaatcaaattggagggcgcaaaagtactcatctcgacatccaaagaaagcacaaacaaaagagtaa

SEQ ID NO: 25970 - protein, 476 aa, Muscodor strobelii
  misc_feature: SGI Peptide ID NO. 568871
  misc_feature (8)..(440): NCBI GI: 256729176 Blast Desc: NECHADRAFT_39965 [Nectria haematococca mpVI 77-13-4]
  misc_feature (13)..(459): NCBI GI: 39954507 Blast Desc: MGG_08927 [Magnaporthe grisea 70-15] gi|145021128|gb|EDK05257.1| MGG_08927 [Magnaporthe grisea 70-15]
  misc_feature (66)..(449): NCBI GI: 261354400 Blast Desc: conserved [Verticillium albo-atrum VaMs.102]
  misc_feature (1)..(453): NCBI GI: 46138475 Blast Desc: FG10752.1 [Gibberella zeae PH-1]
  misc_feature (31)..(449): NCBI GI: 156030782 Blast Desc: SS1G_14330 [Sclerotinia sclerotiorum 1980] gi|154700721|gb|EDO00460.1| SS1G_14330 [Sclerotinia sclerotiorum 1980]
  misc_feature (1)..(395): NCBI GI: 164424009 Blast Desc: NCU10245 [Neurospora crassa OR74A] gi|28881268|emb|CAD70527.1| conserved [Neurospora crassa] gi|157070330|gb|EAA33948.2| [Neurospora crassa OR74A]
  misc_feature (43)..(291): NCBI GI: 154299575 Blast Desc: BC1G_10750 [Botryotinia fuckeliana B05.10] gi|150857242|gb|EDN32434.1| BC1G_10750 [Botryotinia fuckeliana B05.10]
  misc_feature: Useful for introducing or modulating the production of volatile compounds
MLMALTYVWSSFRILSIEFGPGYLKSWILPWAKEVNTAKTGTGLRMVVFGGGDIATPDGSSKDFGGPNASWTKLGCDTYISFVPETRTRTGAVMSNTLFETAFERIALATKNGSENNKTKTLDYSWVAQQYPVPTHADISSQINSFLSSPKPHITPAETLWVFSLGNWEIWQLAAMPRKLATEVLDSSVRSLFFYLEMLFRAAQDRNSVAYSNLYSNTDISDEEQKAMSLPVLPFRVFLPHLLDIALTPGFATARPAPPFPHSRSDQLRNAIFLMRYWDTLIDAAMDDWLATPDPSTWSATDAVDINVVKAITGKRSPVDEGNGTGAHQQENQAKRDIGKHKNFHSREAGSYDMSRHIRELMVDRQLRDLDLADHNGLGEQPLEESFLDVSKPCVSQSMIEKILPAKKSSGRKTQVNQCGKPDDHLFWDEFTISQRAINGIASHATAQILDHVKSESNWRAQKYSSRHPKKAQTKE

SEQ ID NO: 25971 - DNA, 1233 bp, Muscodor strobelii
  misc_feature: SGI cDNA ID NO. 568872
  misc_feature: Encodes the peptide sequence at SEQ ID NO 25972
atgcgtatagctatcattggaggtggtttagcaggtgttagcgtagcaaatctcctcgttagagatcctcggcttcagattgaagtgtacgagtccaaagagttttccgaacgtggtgctacagttggcctcggccgaagcgccttggcagctctagatcgtattctgccaaaagcgatggatattcttacacagagtgcaggtgcactaccgaccgagtccatcagggtaatagtgcagggatctgggccgtatgcaggagagttcttgttcgagatcccaaattttaagcccaggatttcagtaccacgggcagcactcctcaaagtactcttatctcatctgccgcaggatatactccatgcaaatatgaggttgacccgcatagaccatgatgcgacaggcgcgactctcacattcgaaaatggggtgatgagtcactttgatgctgtgattggcgcagatggcataggcagctttgttcgtaggtacgttgtgagtgaacaagagcatcacagttcaccagctggcttctgggaccacatagcatcagttcctgttgaacacgttcaaggcaaagtcacagatgaaattttagagccagggcgacagtacgcacttgcagctgacggtgcacagttactctatgccttaggtgcaggtggtactatgatccaagctataatatcaagcgttgatgaccaggtagccgtcgatggaagtcggatgcgtgtcctcagtgacgcaatgaaagagaaattacgccgcaaatgggacataggaaatgccttagtggagctcatactatctgcgccgtctgttcatgtgtacaccctacatgaacacagctcgacagagtcatacttcaaaaataacatctgtctaattggcgatgcggcccatgcatccacgccgttccagggggctggggctggccaagcttttgaggattgtatcattctctctactcttcttcgcggcatcaatgattccagcgatatcagtagcgcattcaaagtttttgagtctgtaaggatgccgagatgcaagcaggttattaaatcaagcaaggaagtcggccgtattctcctatgcggccagaaaaactatgaaaatttagaggagtggaggagggctctgggatccaaatgggaccttttgcacgactttgatctcgaggatcaggagcaaaaagcactagcggtcttgaatgggctattgagttattcgtaa

SEQ ID NO: 25972 - protein, 410 aa, Muscodor strobelii
  misc_feature: SGI Peptide ID NO. 568872
  misc_feature (4)..(356): Pfam Id: PF01494 Pfam Desc: FAD binding domain
  misc_feature (2)..(41): Pfam Id: PF01266 Pfam Desc: FAD dependent oxidoreductase
  misc_feature (19)..(404): NCBI GI: 169610297 Blast Desc: SNOG_08247 [Phaeosphaeria nodorum SN15] gi|160702028|gb|EAT84523.2| SNOG_08247 [Phaeosphaeria nodorum SN15]
  misc_feature (1)..(391): NCBI GI: 240274173 Blast Desc: salicylate hydroxylase [Ajellomyces capsulatus H143]
  misc_feature (1)..(391): NCBI GI: 225557710 Blast Desc: salicylate hydroxylase [Ajellomyces capsulatus G186AR]
  misc_feature (1)..(408): NCBI GI: 171682930 Blast Desc: protein product [Podospora anserina] gi|170941424|emb|CAP67075.1| protein product [Podospora anserina]
  misc_feature (10)..(391): NCBI GI: 154288340 Blast Desc: [Ajellomyces capsulatus NAm1] gi|150408606|gb|EDN04147.1| [Ajellomyces capsulatus NAm1]
  misc_feature (1)..(404): NCBI GI: 145251856 Blast Desc: An16g01280 [Aspergillus niger] gi|134082981|emb|CAK42745.1| protein product [Aspergillus niger]
  misc_feature (1)..(405): NCBI GI: 256723415 Blast Desc: NECHADRAFT_42151 [Nectria haematococca mpVI 77-13-4]
  misc_feature (1)..(403): NCBI GI: 46137629 Blast Desc: FG10330.1 [Gibberella zeae PH-1]
  misc_feature (1)..(405): NCBI GI: 256723382 Blast Desc: NECHADRAFT_98246 [Nectria haematococca mpVI 77-13-4]
  misc_feature (13)..(403): NCBI GI: 115399700 Blast Desc: conserved [Aspergillus terreus NIH2624] gi|114191116|gb|EAU32816.1| conserved [Aspergillus terreus NIH2624]
  misc_feature (1)..(362): SWISSPROT Homolog: EC 1.14.13.1 Salicylate 1-monooxygenase
MRIAIIGGGLAGVSVANLLVRDPRLQIEVYESKEFSERGATVGLGRSALAALDRILPKAMDILTQSAGALPTESIRVIVQGSGPYAGEFLFEIPNFKPRISVPRAALLKVLLSHLPQDILHANMRLTRIDHDATGATLTFENGVMSHFDAVIGADGIGSFVRRYVVSEQEHHSSPAGFWDHIASVPVEHVQGKVTDEILEPGRQYALAADGAQLLYALGAGGTMIQAIISSVDDQVAVDGSRMRVLSDAMKEKLRRKWDIGNALVELILSAPSVHVYTLHEHSSTESYFKNNICLIGDAAHASTPFQGAGAGQAFEDCIILSTLLRGINDSSDISSAFKVFESVRMPRCKQVIKSSKEVGRILLCGQKNYENLEEWRRALGSKWDLLHDFDLEDQEQKALAVLNGLLSYS

SEQ ID NO: 25973 - DNA, 1572 bp, Muscodor strobelii
  misc_feature: SGI EST ID NO. CUFF.61289.0
  misc_feature: Variant of the nucleotide sequence at SEQ ID NO 25971
caagatgcttgcattgcttcgacaattgacttgaaagggggtgatactactacagactagtgagacgcattagatcatccataacataatcctcactttggcaaaagcaggcacttacgtgcactcgtagggcgacaacttctaagcactccaacccttggacacatacattaccacggcccaaaacttacacgtgcagccgcaagcgaccacatgatgcgtatagctatcattggaggtggtttagcaggtgttagcgtagcaaatctcctcgttagagatcctcggcttcagattgaagtgtacgagtccaaagagttttccgaacgtggtgctacagttggcctcggccgaagcgccttggcagctctagatcgtattctgccaaaagcgatggatattcttacacagagtgcaggtgcactaccgaccgagtccatcagggtaatagtggtgagttgaatgccttcaagataccttggatgatgccgtgcaaaaaatgcatttttgacccttctagcagggatctgggccgtatgcaggagagttcttgttcgagatcccaaattttaagcccaggatttcagtaccacgggcagcactcctcaaagtactcttatctcatctgccgcaggatatactccatgcaaatatgaggttgacccgcatagaccatgatgcgacaggcgcgactctcacattcgaaaatggggtgatgagtcactttgatgctgtgattggcgcagatggcataggcagctttgttcgtagttactctatgccttaggtgcaggtggtactatgatccaagctataatatcaagcgttgatgaccaggtagccgtcgatggaagtcggatgcgtgtcctcagtgacgcaatgaaagagaaattacgccgcaaatgggacataggaaatgccttagtggagctcatactatctgcgccgtctgttcatgtgtacaccctacatgaacacagctcgacagagtcatacttcaaaaataacatctgtctaattggcgatgcggcccatgcatccacgccgttccagggggctggggctggccaagcttttgaggattgtatcattctctctactcttcttcgcggcatcaatgattccagcgatatcagtagcgcattcaaagtttttgagtctgtaaggatgccgagatgcaagcaggttattaaatcaagcaaggaagtcggccgtattctcctatgcggccagaaaaactatgaaaatttagaggagtggaggagggctctgggatccaaatgggaccttttgcacgactttgatctcgaggatcaggagcaaaaagcactagcggtcttgaatgggctattgagttattcgtaacaatatttcgatttgagagggtaagaagtgatatttgaacgactagacaaatctgcagcatgcccctatagccgaaatgaagtcgaggatcaccagtatatgaaatgtttccttagacactcctgcttatgtagtcaggacatagagatcgaacggatagcattgtatggctagattaagcgacctgctatacagattactgcgaag

SEQ ID NO: 25974 - DNA, 978 bp, Muscodor strobelii
  misc_feature: SGI cDNA ID NO. 568873
  misc_feature: Encodes the peptide sequence at SEQ ID NO 25975
atgtctagtggtctctcaaactccagcggaagggcgaggccgggacgtccccttccacctctaccccaagaggcacaagactctgaagctgggccaagtcagccgacccaatcgactcaacaagctccgcacacacacagatcatggtcgccaggagacgatgagcacatgatgcatggtcctcctcctcctccgcctcatcgtgatctcaatactcaatgctacgaacagtcacaggaatccagggctagccccggccagtcagcacgatcatcccgtcggcctcgtcctgctaggtatcacggacctctggtgtctcaatctccagatgagcctgaagcaggccccagccagccaactctacccgggagatatcgacctcggcctgctcatgtggctccagtgtctcagcattcggatgtgcaagggacaggttctagtcaaccaactcaacagacttcaggagcccaagggtcccagcccaattatgtgccaagactcagagcagcaggtgctagccaccagaatgtacagagtcaattgcctcaagatccaaatgtgccccaggtagactacagccaacatcatcaacagatttcgtctgctgacctaccccctgttcctgaatctcaacggcatggattacaacaaacgcaacctctgccccatggcctcataagtgacaacatcccggaacagctgaacgctccagtgctagtacccctgaaggagcccgtggatactactccatggtcgcctccttttgaagtctctcaccgaatgtcaagaatcggtttcagaagactagaagacgtgttgacgactggcggagaacgctatgacaatgtctacgtgtatgctgcattgcagatgaaaggcctaccatcggatagaccatggcgcatcctgttcgcacagcgcaccccacaagcaggaccggttgatcccgagcgtctagttgaggtccccggaacatag

SEQ ID NO: 25975 - protein, 325 aa, Muscodor strobelii
  misc_feature: SGI Peptide ID NO. 568873
MSSGLSNSSGRARPGRPLPPLPQEAQDSEAGPSQPTQSTQQAPHTHRSWSPGDDEHMMHGPPPPPPHRDLNTQCYEQSQESRASPGQSARSSRRPRPARYHGPLVSQSPDEPEAGPSQPTLPGRYRPRPAHVAPVSQHSDVQGTGSSQPTQQTSGAQGSQPNYVPRLRAAGASHQNVQSQLPQDPNVPQVDYSQHHQQISSADLPPVPESQRHGLQQTQPLPHGLISDNIPEQLNAPVLVPLKEPVDTTPWSPPFEVSHRMSRIGFRRLEDVLTTGGERYDNVYVYAALQMKGLPSDRPWRILFAQRTPQAGPVDPERLVEVPGT

SEQ ID NO: 25976 - DNA, 2745 bp, Muscodor strobelii
  misc_feature: SGI cDNA ID NO. 568874
  misc_feature: Reduced expression when VOC is produced
  misc_feature: Encodes the peptide sequence at SEQ ID NO 25977
atggcaaccgaaacttcgagtacgccactcgagcgtgatgttgctacccctattggtacggagaacaaggaggatgcgcctgccgtgcaacctgtcaacggacatgggagttcagagaaagagtcgggtatatcttcccctggccagtcaccagctgtaaatggcgattccgaaatctcttcgtccgctgccaaagagagcgccaaatcttcccttaatcagcaagccttcagtaccaatagcacattggccaaaacatcgtcaccgaagttgactgatgactctacggctcaggacacggagatggatatcgacggcgacaatgtttcaaaagacgatgatccaaagcccgaggaagaatctccaagcaagaaaggtgcagaggtcgaggctgtagccaatgatgcagtcaatgagaagtcggccgccgagacagagttggtcgccatggatgttgatgcttctatcgagcggcccgatctatcttcaagcgctgagcatgttgacagtacacagaatacttctgccatgagtgatgcaccagtcgagacgccagctgactcgaatcaacctgctgatttgtccaagctcgatattcaggctactcaggaggaggtcgtttcacccacgcaagccgccgacacagatgtgaccatggttgactcttctgcatcccagactaaggttacccgagagcgcgaggatgacaacatggacgaacctgcggcgaagagggctaagaccgacgatgggacggaggaagttgtagcagattcgcttgttgtggccactaacagtgaacccctcacacctgtcgctcaggtgactagtgacgccatgagtaaagcaattccggacgacgcaccgatcacccctttccagaacaagaaagttcgagaggtgcttggaaatgtgaagaagaccaagaacggccacaattttagaaaatctgtggccgagctgtggccggccctttggaatgattacatggccaagattgtcactcccgtcgatatctccgccatggaagccaaactgcgcaacggtgaatatgacacttacggtcagttcaaggccgacctgttgcttctcttccagaacgcagtccagtttaacggagaagagcatgatgtcactcgagccgcagcacatgtacgcgagtatgtcctcagcagactgccggctattctccaagaagcagagccagtcaagccggagaagggaaaagcgcagccaactcgacacaccgagccacgagcggccactcagcagccgcgtcgtcagtctcagtcccaggcaggtgcgtcagtgacaagcccgaagaccaaaactgaaccttccaccttacccacacccacatccgcatcaactgccttcgccatccccccttcaggcattcctcagattcgtcgtgactcgacacgtgatgatagtgatcgacccaaacgacccattcacccgccgaagaatcgtgatcctgactatggcaataaaggtaatcgcaagaagctcgagcctgaacagcagtttatcgaatatgtgcttaatcaggtcaagaagccccagcactattcgttcactcaatggtttctcgctgctgtagacccagttgcattgcagatcccgacctatttcaaggtggtcaagaaaccaatggatcttgatacgatggctaacaagaatctggatggcgagtataagaccgtcaaggacctcgagaaagacatgaaacagatcgtcgcgaactccgagttattcaacggccaggatagtgagataaccggtatggccagacaaacagagactctcttgaaggatctgactgccggaaaagatgaatggatggagaacaaatttggttccaagtcatcgcgtggacccgccgctagtcccgagcggaccgatactgattcggaagatgagagtgagggtgaggaagatgaggatgaatctgaagccattcgcaatcttcagaagcgcctcggggaagaggaggctaaagtcagagctctgatgaagtcaaagaacaccgatatccttaacttggaaatctcgcagaccattattagcactctgcagcgcaagattgtcgaggagcgaaccaagtcgagtggtagtaagaaggccaaatccaagaagaaaggtggcgctaccaagagcaaggcaaagcctaccggatcagccgcgggcggtggcagtaagaagtcgggtcaacagcctggcagtcaggccaagaagcccgccgggggtaccaagaagtctgcggcgcccaagaagcgaactatcggtggccttgagaaagctgttattgccgaaggtatcaacgagcttgatggtcagactctgataaaagcggtggagattatcaagaaggacacaaatcagactgagaacgatgatggcgagatggagttagatatcgactctctttccgaagacgccctcagcaagcttttcgacctgatcaacaaagctcatcctggtgttcgtcagagtgtttcccagagagaggagtatcgtaagtctgcaccagactcttcggaagtggcaaagcccagcaagtccaagaagaataaacccatgaacaagcacgagcaagaacgcaagattcaagagttgcgtgagctcaaggctaaacttcagcgaacaggtagcgctagtcaggagcctgttgctggtgaagccgaggagcctgccggtgacggcggtgatagcagtgaggagagcgactctgaagaagagtag

SEQ ID NO: 25977 - protein, 914 aa, Muscodor strobelii
  misc_feature: SGI Peptide ID NO. 568874
  misc_feature (511)..(599): Pfam Id: PF00439 Pfam Desc: Bromodomain
  misc_feature (298)..(384): Pfam Id: PF00439 Pfam Desc: Bromodomain
  misc_feature (328)..(384): Pfam Id: PF00439 Pfam Desc: Bromodomain
  misc_feature (142)..(891): NCBI GI: 85109989 Blast Desc: NCU08423 [Neurospora crassa OR74A] gi|28924850|gb|EAA33947.1| [Neurospora crassa OR74A]
  misc_feature (208)..(900): NCBI GI: 116205473 Blast Desc: CHGG_10620 [Chaetomium globosum CBS 148.51] gi|88176748|gb|EAQ84216.1| CHGG_10620 [Chaetomium globosum CBS 148.51]
  misc_feature (169)..(914): NCBI GI: 171677235 Blast Desc: protein product [Podospora anserina] gi|170936685|emb|CAP61344.1| protein product [Podospora anserina]
  misc_feature (181)..(890): NCBI GI: 39954483 Blast Desc: MGG_08925 [Magnaporthe grisea 70-15] gi|145021130|gb|EDK05259.1| MGG_08925 [Magnaporthe grisea 70-15]
  misc_feature (32)..(890): NCBI GI: 256729482 Blast Desc: NECHADRAFT_71373 [Nectria haematococca mpVI 77-13-4]
  misc_feature (151)..(890): NCBI GI: 46117162 Blast Desc: FG04423.1 [Gibberella zeae PH-1]
  misc_feature (190)..(914): NCBI GI: 261354385 Blast Desc: bromodomain-containing factor 1 [Verticillium albo-atrum VaMs.102]
  misc_feature (201)..(891): NCBI GI: 154299583 Blast Desc: BC1G_10754 [Botryotinia fuckeliana B05.10] gi|150857246|gb|EDN32438.1| BC1G_10754 [Botryotinia fuckeliana B05.10]
  misc_feature (197)..(891): NCBI GI: 156030778 Blast Desc: SS1G_14328 [Sclerotinia sclerotiorum 1980] gi|154700719|gb|EDO00458.1| SS1G_14328 [Sclerotinia sclerotiorum 1980]
  misc_feature (179)..(895): NCBI GI: 119194171 Blast Desc: CIMG_01460 [Coccidioides immitis RS]
  misc_feature: Useful for introducing or modulating the production of volatile compounds
MATETSSTPLERDVATPIGTENKEDAPAVQPVNGHGSSEKESGISSPGQSPAVNGDSEISSSAAKESAKSSLNQQAFSTNSTLAKTSSPKLTDDSTAQDTEMDIDGDNVSKDDDPKPEEESPSKKGAEVEAVANDAVNEKSAAETELVAMDVDASIERPDLSSSAEHVDSTQNTSAMSDAPVETPADSNQPADLSKLDIQATQEEVVSPTQAADTDVTMVDSSASQTKVTREREDDNMDEPAAKRAKTDDGTEEVVADSLVVATNSEPLTPVAQVTSDAMSKAIPDDAPITPFQNKKVREVLGNVKKTKNGHNFRKSVAELWPALWNDYMAKIVTPVDISAMEAKLRNGEYDTYGQFKADLLLLFQNAVQFNGEEHDVTRAAAHVREYVLSRLPAILQEAEPVKPEKGKAQPTRHTEPRAATQQPRRQSQSQAGASVTSPKTKTEPSTLPTPTSASTAFAIPPSGIPQIRRDSTRDDSDRPKRPIHPPKNRDPDYGNKGNRKKLEPEQQFIEYVLNQVKKPQHYSFTQWFLAAVDPVALQIPTYFKVVKKPMDLDTMANKNLDGEYKTVKDLEKDMKQIVANSELFNGQDSEITGMARQTETLLKDLTAGKDEWMENKFGSKSSRGPAASPERTDTDSEDESEGEEDEDESEAIRNLQKRLGEEEAKVRALMKSKNTDILNLEISQTIISTLQRKIVEERTKSSGSKKAKSKKKGGATKSKAKPTGSAAGGGSKKSGQQPGSQAKKPAGGTKKSAAPKKRTIGGLEKAVIAEGINELDGQTLIKAVEIIKKDTNQTENDDGEMELDIDSLSEDALSKLFDLINKAHPGVRQSVSQREEYRKSAPDSSEVAKPSKSKKNKPMNKHEQERKIQELRELKAKLQRTGSASQEPVAGEAEEPAGDGGDSSEESDSEEE

SEQ ID NO: 25978 - DNA, 5157 bp, Muscodor strobelii
  misc_feature: SGI EST ID NO. CUFF.61989.0
  misc_feature: Variant of the nucleotide sequence at SEQ ID NO 25976
ccagtgcgtcgcagttctgtcttgacacgcgaaaaaagacctctctgaattcccgacgtattttttttcaatccttccctcttatttctccctgctccccccctctacggtcgcaaattccgccgaccaaccaaacaaaaagagttccttcccctctttaagtccgaaaccccccgaaacaacaaaaaaatccattggcaacgggcactataacaacgaaggccacacggtacctttgtacccgcttcattgctcctgccactcattcacacttcctacctgccacttatttgcaacctgttgcagtggcaaccgacttgcggcttaaaagagtttctccttttttaattaatctgattcgaccattctccacctgaactctcctaacaaccccccgcttggaccaccaccttgtccctccctacaaatctcagaactcgtatcgcgaatcttgtcgtcgctaatcgcttttggtgtttttcctcaacaccacaacttaacgagttttcgtaatcactaccaccttgacatcttttcttcccctcagccaggttcatctgtgctgcccaagcattctagtgcaatatcgtctgccttttctgctttattaggtacgtgccttttcattcttgcaaggatttaacctcaagagaggcatcagcatgtgcgcaagcgatcgatcactcttctcccacctttgtcttcattttgccctacttcccatcacgtgtgccagccttcacataccaacaaaaagtgactcgagggcttcagtcctgatcatgccatattgatatcctacttcgtggggacatcggtcttgtcgcattgttgtcaaggctcccgttttctcaatgcgctcgagcccaggcgcaaggcgatgcgactggacagtggcgacgtaaccatcccaattctattgcagcttcccgattcctgatcatcaacaactgttccacacttgcctaccccccacccccttgcgctattcataggaccatctaggtgctttgaatgcgcctcacctcccgcgcacatttgcgcagaccattgcgtttagttgactattgaacaacgtattgttcaatagatctcgcaatccattcattgagaggcactgttgatgggccacagcactatctcggtgtccctcatcaacctgtgtacttccaaccttttcatctcatttgttgcgtcatcgcatctctgaactgtgaacccaactccaacagcaatttaatatatataactgcgcggggatcgcggccttttttctccttccatttcggctcattctttccatccttgattctcgtcgttgctgttgcactttgaacctcactggagcaaccgctaatccggtattgccagtagactgatacgagtgcaaactttgatgttcatccggcatatctaatcccgaaactcggacgctactgcccgtactcgattgcgcctggcgcctcgaggatcaaccatggcaaccgaaacttcgagtacgccactcgagcgtgatgttgctacccctattggtacggagaacaaggaggatgcgcctgccgtgcaacctgtcaacgggtaagtccactgtctttccccatgtcctggtttcgaggttaaccagtgagtttccttgtgcgtagacatgggagttcagagaaagagtcgggtatatcttcccctggccagtcaccagctgtaaatggcgattccgaaatctcttcgtccgctgccaaagagagcgccaaatcttcccttaatcagcaagccttcagtaccaatagcacattggccaaaacatcgtcaccgaagttgactgatgactctacggctcaggacacggagatggatatcgacggcgacaatgtttcaaaagacgatgatccaaagcccgaggaagaatctccaagcaagaaaggtgcagaggtcgaggctgtagccaatgatgcagtcaatgagaagtcggccgccgagacagagttggtcgccatggatgttgatgcttctatcgagcggcccgatctatcttcaagcgctgagcatgttgacagtacacagaatacttctgccatgagtgatgcaccagtcgagacgccagctgactcgaatcaacctgctgatttgtccaagctcgatattcaggctactcaggaggaggtcgtttcacccacgcaagccgccgacacagatgtgaccatggttgactcttctgcatcccagactaaggttacccgagagcgcgaggatgacaacatggacgaacctgcggcgaagagggctaagaccgacgatgggacggaggaagttgtagcagattcgcttgttgtggccactaacagtgaacccctcacacctgtcgctcaggtgactagtgacgccatgagtaaagcaattccggacgacgcaccgatcacccctttccagaacaagaaagttcgagaggtgcttggaaatgtgaagaagaccaagaacggccacaattttagaaaatctgtggccgagctgtggccggccctttggaatgattacatggccaagattgtcactcccgtcgatatctccgccatggaagccaaactgcgcaacggtgaatatgacacttacggtcagttcaaggccgacctgttgcttctcttccagaacgcagtccagtttaacggagaagagcatgatgtcactcgagccgcagcacatgtacgcgagtatgtcctcagcagactgccggctattctccaagaagcagagccagtcaagccggagaagggaaaagcgcagccaactcgacacaccgagccacgagcggccactcagcagccgcgtcgtcagtctcagtcccaggcaggtgcgtcagtgacaagcccgaagaccaaaactgaaccttccaccttacccacacccacatccgcatcaactgccttcgccatccccccttcaggcattcctcagattcgtcgtgactcgacacgtgatgatagtgatcgacccaaacgacccattcacccgccgaagaatcgtgatcctgactatggcaataaaggtaatcgcaagaagctcgagcctgaacagcagtttatcgaatatgtgcttaatcaggtcaagaagccccagcactattcgttcactcaatggtttctcgctgctgtagacccagttgcattgcagatcccgacctatttcaaggtggtcaagaaaccaatggatcttgatacgatggctaacaagaatctggatggcgagtataagaccgtcaaggacctcgagaaagacatgaaacagatcgtcgcgaactccgagttattcaacggccaggatagtgagataaccggtatggccagacaaacagagactctcttgaaggatctgactgccggaaaagatgaatggatggagaacaaatttggttccaagtcatcgcgtggacccgccgctagtcccgagcggaccgatactgattcggaagatgagagtgagggtgaggaagatgaggatgaatctgaagccattcgcaatcttcagaagcgcctcggggaagaggaggctaaagtcagagctctgatgaagtcaaagaacaccgatatccttaacttggaaatctcgcagaccattattagcactctgcagcgcaagattgtcgaggagcgaaccaagtcgagtggtagtaagaaggccaaatccaagaagaaaggtggcgctaccaagagcaaggcaaagcctaccggatcagccgcgggcggtggcagtaagaagtcgggtcaacagcctggcagtcaggccaagaagcccgccgggggtaccaagaagtctgcggcgcccaagaagcgaactatcggtggccttgagaaagctgttattgccgaaggtatcaacgagcttgatggtcagactctgataaaagcggtggagattatcaagaaggacacaaatcagactgagaacgatgatggcgagatggagttagatatcgactctctttccgaagacgccctcagcaagcttttcgacctgatcaacaaagctcatcctggtgttcgtcagagtgtttcccagagagaggagtatcgtaagtctgcaccagactcttcggaagtggcaaagcccagcaagtccaagaagaataaacccatgaacaagcacgagcaagaacgcaagattcaagagttgcgtgagctcaaggctaaacttcagcgaacaggtagcgctagtcaggagcctgttgctggtgaagccgaggagcctgccggtgacggcggtgatagcagtgaggagagcgactctgaagaagagtagtggtcttatatctgaacagtcgatggtcgtcttcataaaatggggcctcatcacacgattttgcggtctgggcatggcgttaaccgtacttctggcatatcgattttctctcgttcgttgcttagaaagcatttggcttgcatcggtggttcaagtcgcaaacaaaaatggtggagcgggaaaccggagttgtatgagtaccaaacatccatgtgtagaatacccttgggatgcggatcccaaatgatgccgtaacggaggacctaatctcctcgatggcggtttgatgagctggacaagaaaccagctgcgatgagtttcagtggatgaggactgaactggatcaaggcctctgcgctgatagctcacttgactgtcaaatgccggctggatggctcaagtgtcgcagcagcaatatcgcctccacagtcacgatgaggtggcaacggccatggccctatcgccacatgcaggtagctttagctagactagccagtggtactaaatgaacaaaaagccgttagtggtatatctgtatgctttgtagggtgaaatgacacttgctttgtgagatgaaatgagacccgtgacgggacgaccaaagcacatcgtcgtccatttcaagttcgaatagacgtattgtaagattttcgaatagatgtcttgtgacattttcgaatagacgtcttgtgagatcttcgaatactcgtaggcaatggatttgtatctggctgttgatgtttttcggcatcatgtaacacttgaatgcttttgtccatgatccagtttgtgccgtggtgaagagtgagctttttgatacattttttaggccggcaatctataatactgaaaggttgacttgaaaatgag

SEQ ID NO: 25979 - DNA, 1176 bp, Muscodor strobelii
  misc_feature: SGI cDNA ID NO. 568875
  misc_feature: Reduced expression when VOC is produced
  misc_feature: Encodes the peptide sequence at SEQ ID NO 25980
atgtcgacgaagcggaaagcacccgcgaagctggcgcagccggtcgcgaggcgaaatgcgaagcagcccctaaaatcacagatcaacgagtctgacgccgctgtgaccgttgcccaagtctcaaaagcagacaactttggcgcttcagaagccataatagagatatctagcgacgcagagagtagcgaatacgaactcgaggatgagccagacaccaggaccggggccgatgggattgacgactctcacaagacaaccgaaccgctctctactaaaacagatagtggtggtgatgcggacgtaacgatggccgagtctaatgcgcccgtcgatgccgactcggatcaagaattagcacagcccacgctcggcgaacttgcccgcgctcacggcacaatcaatgtccctgcctctctcgttccgcaatccaacgccatcacgacaaaacgcactctcgcaaccccgagccactcctccttgggaaccgttctctcacaggctctacgtaccgacgacacagatctactcgagtcatgtcttcacgtcaaggactaccaaacaatcaacaataccgtccagaggctcgagtctccgcttgccgccattcttctatcaaagttggccaccagaatgcacaggcggccagggcgcgctggaagcttaatgagctgggtacaagccaccctggtatgccatggaggcgctttggcggcgcaacccggactcgtcaagagacttagtgagctgcaacgtgtgctggacgagcggtcaagagggctaaactcattgttggctctcaagggaaagctggatctgatgagctcgcagatgaagctgcgacgccaacaacgtaacgcggactctgatgacgaggaagcagacgaggaagatggcatgatttatgttgaaggggaagacagtgacgcagaggcggctaatggactggtggatgacgacgacgaattaccggtcactaacggaattatggatgaggattcagaagacgacgatctgcctagtgatgaggaggaggatgaagaggaattggatggagaggaagagttggatgaggacgaggtagaccacgaggatgtcgagtccgaagacgaggacagcgagcccgaagcggctccacagcggccgtcgaaaagaacgaggacatcgaggggaagataa

SEQ ID NO: 25980 - protein, 391 aa, Muscodor strobelii
  misc_feature: SGI Peptide ID NO. 568875
  misc_feature (188)..(274): Pfam Id: PF08162 Pfam Desc: NUC189 domain
  misc_feature (2)..(388): NCBI GI: 46117164 Blast Desc: FG04424.1 [Gibberella zeae PH-1]
  misc_feature (1)..(366): NCBI GI: 256729292 Blast Desc: NECHADRAFT_101414 [Nectria haematococca mpVI 77-13-4]
  misc_feature (1)..(383): NCBI GI: 154299581 Blast Desc: BC1G_10753 [Botryotinia fuckeliana B05.10] gi|150857245|gb|EDN32437.1| BC1G_10753 [Botryotinia fuckeliana B05.10]
  misc_feature (1)..(383): NCBI GI: 156030780 Blast Desc: SS1G_14329 [Sclerotinia sclerotiorum 1980] gi|154700720|gb|EDO00459.1| SS1G_14329 [Sclerotinia sclerotiorum 1980]
  misc_feature (1)..(328): NCBI GI: 39954471 Blast Desc: MGG_08924 [Magnaporthe grisea 70-15] gi|145021131|gb|EDK05260.1| MGG_08924 [Magnaporthe grisea 70-15]
  misc_feature (1)..(323): NCBI GI: 116205475 Blast Desc: CHGG_10621 [Chaetomium globosum CBS 148.51] gi|88176749|gb|EAQ84217.1| CHGG_10621 [Chaetomium globosum CBS 148.51]
  misc_feature (1)..(326): NCBI GI: 171677233 Blast Desc: protein product [Podospora anserina] gi|170936684|emb|CAP61343.1| protein product [Podospora anserina]
  misc_feature (1)..(320): NCBI GI: 85109985 Blast Desc: NCU08421 [Neurospora crassa OR74A] gi|28924848|gb|EAA33945.1| [Neurospora crassa OR74A]
  misc_feature (142)..(374): NCBI GI: 169624654 Blast Desc: SNOG_15587 [Phaeosphaeria nodorum SN15] gi|160705212|gb|EAT76962.2| SNOG_15587 [Phaeosphaeria nodorum SN15]
  misc_feature (145)..(314): NCBI GI: 189198602 Blast Desc: U3 small nucleolar RNA-associated protein 5 [Pyrenophora tritici-repentis Pt-1C-BFP] gi|187982737|gb|EDU48225.1| U3 small nucleolar RNA-associated 5
  misc_feature: Useful for introducing or modulating the production of volatile compounds
MSTKRKAPAKLAQPVARRNAKQPLKSQINESDAAVTVAQVSKADNFGASEAIIEISSDAESSEYELEDEPDTRTGADGIDDSHKTTEPLSTKTDSGGDADVTMAESNAPVDADSDQELAQPTLGELARAHGTINVPASLVPQSNAITTKRTLATPSHSSLGTVLSQALRTDDTDLLESCLHVKDYQTINNTVQRLESPLAAILLSKLATRMHRRPGRAGSLMSWVQATLVCHGGALAAQPGLVKRLSELQRVLDERSRGLNSLLALKGKLDLMSSQMKLRRQQRNADSDDEEADEEDGMIYVEGEDSDAEAANGLVDDDDELPVTNGIMDEDSEDDDLPSDEEEDEEELDGEEELDEDEVDHEDVESEDEDSEPEAAPQRPSKRTRTSRGR

SEQ ID NO: 25981 - DNA, 1948 bp, Muscodor strobelii
  misc_feature: SGI EST ID NO. CUFF.61314.0
  misc_feature: Variant of the nucleotide sequence at SEQ ID NO 25979
aagatagtagatagtgggtctgcccatgtccagcatgcaaaaaagttgctgccaaatggattgatcaccgagctcacatcgcaatcgacttggtagaagcattctgccattccaccagcgcaactgcactataacacgctatacccggtcgactgcgtaaatcaaactcacacctcatcttgccagccctcaggcgacctgattcgccaccttttgattgagcccgttaccacaactacataattcgccatgtcgacgaagcggaaagcacccgcgaagctggcgcagccggtcgcgaggcgaaatgcgaagcagcccctaaaatcacagatcaacgagtctgacgccgctgtgaccgttgcccaagtctcaaaagcagacaactttggcgcttcagaagccataatagagatatctagcgacgcagagagtagcgaatacgaactcgaggatgagccagacaccaggaccggggccgatgggattgacgactctcacaagacaaccgaaccgctctctactaaaacagatagtggtggtgatgcggacgtaacgatggccgagtctaatgcgcccgtcgatgccgactcggatcaagaattagcacagcccacgctcggcgaacttgcccgcgctcacggcacaatcaatgtccctgcctctctcgttccgcaatccaacgccatcacgacaaaacgcactctcgcaaccccgagccactcctccttgggaaccgttctctcacaggctctacgtaccgacgacacagatctactcgagtcatgtcttcacgtcaaggactaccaaacaatcaacaataccgtccagaggctcgagtctccgcttgccgccattcttctatcaaagttggccaccagaatgcacaggcggccagggcgcgctggaagcttaatgagctgggtacaagccaccctggtatgccatggaggcgctttggcggcgcaacccggactcgtcaagagacttagtgagctgcaacgtgtgctggacgagcggtcaagagggctaaactcattgttggctctcaagggaaagctggatctgatgagctcgcagatgaagctgcgacgccaacaacgtaacgcggactctgatgacgaggaagcagacgaggaagatggcatgatttatgttgaaggggaagacagtgacgcagaggcggctaatggactggtggatgacgacgacgaattaccggtcactaacggaattatggatgaggattcagaagacgacgatctgcctagtgatgaggaggaggatgaagaggaattggatggagaggaagagttggatgaggacgaggtagaccacgaggatgtcgagtccgaagacgaggacagcgagcccgaagcggctccacagcggccgtcgaaaagaacgaggacatcgaggggaagataagatatgttgtcaataaacaatgttcaatacacatgttgctatagacaaacgtggccttggcgcagatctcggaacgctttcccgtttgctgtcgcacaacacaataccttctactgagtgcgagatactaagcgggtgatagatgcacatcgctgaacatctcattattcagcattcatgatacttactatttgaatatgcaaagatcatatcacacagacccaacttcaaatgtggtccttatcaccaagttcttcacgattggacgggcatcgttgtggccttcaagacaaattaaatatagcaattgcatcactaatagttgaaggatagggtcgttcaatgaaggtgtgtcatgcgtgtagatctggcggggcgaaatgtgtttgactgcgacccttagctcactgtccctggctaaggcgcaaggcactttcttctctaaggtacgttctgattcatccgatatccttcatccaacacgcgctggacatgcaaggcatttatagcacgtgaggcgccc

SEQ ID NO: 25982 - DNA, 1722 bp, Muscodor strobelii
  misc_feature: SGI cDNA ID NO. 568876
  misc_feature: Reduced expression when VOC is produced
  misc_feature: Encodes the peptide sequence at SEQ ID NO 25983
atggtggaatgcccaatatgcacgaaagcggtgcagccgtctcggatcaacgaccacattgactcgagctgccagaccttcatcctcgagaatcagcccgcctcgtcgcccagtcctcccatctcgacctccacacagcaacagcaacaaccaccaccgagtagctccattcctgcctcacaaaagcgccctgcctcgactttcttccagacccctgccgcgaagagacaggccacacccaacaggatactggcacctatcgtcaatggcgttgctgggaccgcaaaatctaacaagcgaacctttgacgatggcccaggccatgaatctcccccagatgccaatatagctcctatacaagaagaggacgagcaagctctagtccatagtcccgtcgcaaagaaggcaaagacgaggactgcccgcacagcgccactagcagagcgagtccgaccacacactctcgacgaggtcttcggacaggaactcgttggaccgaacggcgtgctgcggtcactcatagaaacaaaccaagttccatctatgatactatggggcgcatcaggcacaggcaagaccacgatagcacgatgcgtggcgaacatggccggctcgcgcttcatcgagatgaacgccacgagctcaggtgtcgcagagtgcaagaagctcttctcggacgcggccaacgagttattgctgaccgggcgcaaaacaataatattctgcgacgaaatccaccgcttctccaaatcacaacaagacgtcttcctaaagccggtagaagccggcaccatcacgttgataggcgcaacgaccgagaacccaagtttcaaagtagtcaacgctctcctgtcacgatgccgaacattcaccctttctaaactcacaacggaggatgtccaacagattctcgctcgtgcactcaaagcagaacttccctcagctaccgaaacaccgcccccgcccctcgacgaagaattccttgcctatttagcgaacttcgcagatggggacgcgcgaacagcgctaaatctcctcgaactcgctgtttcgctggcagggagaggtgaaattacgaaagaggatatgaaggccgcgctcacgaagacgttggtatatgatcgtgccggtgaccaacactacgacacgatttccgcattccataaatccgtccgtggatccgacgctgatgcagcgctgtactatcttgcgcgcatgctacaatctggcgaagatcccctcttcatcgcacgacgtatggtagtcatcgcgtcagaagatgtaggactggcagataataccatgttaagtctcgcaacatcgacattcaccgctacgcaacagatcggaatgcccgaggcgcgtatcccactagcgcattgtgcggtagccctttctcatgcgccaaagagtacgagagcgtaccggggactcaacaatgcgttcgcggcactaagagaaccgggtgttgcgggtcttccggtgccgattcatttaaggaacgcgccaacgagattgatgagggatttggggtatgggaaggagtacaagtacaatcctaattataaggatggcaaagtgaagcaggattacctacctgatgatatactcggcaggacgtttcttgaggatagagatttggggactgagattgatccggatgttgagatggtggatcaggggatggagagtgatgggattacggtgccgatacttaattga

SEQ ID NO: 25983 - protein, 573 aa, Muscodor strobelii
  misc_feature: SGI Peptide ID NO. 568876
  misc_feature (181)..(355): Pfam Id: PF00004 Pfam Desc: ATPase family associated with various cellular activities (AAA)
  misc_feature (181)..(254): Pfam Id: PF00004 Pfam Desc: ATPase family associated with various cellular activities (AAA)
  misc_feature (1)..(566): NCBI GI: 116205431 Blast Desc: CHGG_10599 [Chaetomium globosum CBS 148.51] gi|88176727|gb|EAQ84195.1| CHGG_10599 [Chaetomium globosum CBS 148.51]
  misc_feature (2)..(557): NCBI GI: 256729460 Blast Desc: NECHADRAFT_95752 [Nectria haematococca mpVI 77-13-4]
  misc_feature (1)..(557): NCBI GI: 171677199 Blast Desc: protein product [Podospora anserina] gi|170936667|emb|CAP61326.1| protein product [Podospora anserina]
  misc_feature (2)..(557): NCBI GI: 46117090 Blast Desc: FG04387.1 [Gibberella zeae PH-1]
  misc_feature (1)..(553): NCBI GI: 154301803 Blast Desc: BC1G_10053 [Botryotinia fuckeliana B05.10] gi|150855715|gb|EDN30907.1| BC1G_10053 [Botryotinia fuckeliana B05.10]
  misc_feature (1)..(555): NCBI GI: 145258000 Blast Desc: An04g05500 [Aspergillus niger] gi|134074518|emb|CAK38812.1| protein product [Aspergillus niger]
  misc_feature (2)..(557): NCBI GI: 85110657 Blast Desc: NCU08706 [Neurospora crassa OR74A] gi|9453819|emb|CAB99387.1| conserved [Neurospora crassa] gi|28925252|gb|EAA34331.1| NCU08706 [Neurospora crassa OR74A]
  misc_feature (1)..(556): NCBI GI: 67538894 Blast Desc: AN5617.2 [Aspergillus nidulans FGSC A4] gi|40743520|gb|EAA62710.1| AN5617.2 [Aspergillus nidulans FGSC A4] gi|259484914|tpe|CBF81541.1| TPA: DNA replication ATPase FGSC
  misc_feature (1)..(555): NCBI GI: 225559886 Blast Desc: DNA replication ATPase [Ajellomyces capsulatus G186AR] gi|225559936|gb|EEH08218.1| DNA replication ATPase [Ajellomyces capsulatus G186AR]
  misc_feature (1)..(563): NCBI GI: 121707934 Blast Desc: AAA family ATPase, [Aspergillus clavatus NRRL 1] gi|119400129|gb|EAW10555.1| AAA family ATPase, [Aspergillus clavatus NRRL 1]
  misc_feature: Useful for introducing or modulating the production of volatile compounds
MVECPICTKAVQPSRINDHIDSSCQTFILENQPASSPSPPISTSTQQQQQPPPSSSIPASQKRPASTFFQTPAAKRQATPNRILAPIVNGVAGTAKSNKRTFDDGPGHESPPDANIAPIQEEDEQALVHSPVAKKAKTRTARTAPLAERVRPHTLDEVFGQELVGPNGVLRSLIETNQVPSMILWGASGTGKTTIARCVANMAGSRFIEMNATSSGVAECKKLFSDAANELLLTGRKTIIFCDEIHRFSKSQQDVFLKPVEAGTITLIGATTENPSFKVVNALLSRCRTFTLSKLTTEDVQQILARALKAELPSATETPPPPLDEEFLAYLANFADGDARTALNLLELAVSLAGRGEITKEDMKAALTKTLVYDRAGDQHYDTISAFHKSVRGSDADAALYYLARMLQSGEDPLFIARRMVVIASEDVGLADNTMLSLATSTFTATQQIGMPEARIPLAHCAVALSHAPKSTRAYRGLNNAFAALREPGVAGLPVPIHLRNAPTRLMRDLGYGKEYKYNPNYKDGKVKQDYLPDDILGRTFLEDRDLGTEIDPDVEMVDQGMESDGITVPILN

SEQ ID NO: 25984 - DNA, 2173 bp, Muscodor strobelii
  misc_feature: SGI EST ID NO. CUFF.61317.0
  misc_feature: Variant of the nucleotide sequence at SEQ ID NO 25982
cagccccacagcgccagtgtgccgggtcgacgggagttaagcaggcgaggcaggggttcggcgccaccaaagtgacctagaccctcgcagcgcgtcatgctccgtctcaaccagaaaacatctggtacagagtacctaagtagctgttcttcgcgtcaagtccagtcgccatcagtattactcgacaaccccttctttgtcacttgagctcgccatttttggatagtcttagttgataaacattctggtgctacgagaagctgacaacggccacaatggtggaatgcccaatatgcacgaaagcggtgcagccgtctcggatcaacgaccacattgactcgagctgccagaccttcatcctcgagaatcagcccgcctcgtcgcccagtcctcccatctcgacctccacacagcaacagcaacaaccaccaccgagtagctccattcctgcctcacaaaagcgccctgcctcgactttcttccagacccctgccgcgaagagacaggccacacccaacaggatactggcacctatcgtcaatggcgttgctgggaccgcaaaatctaacaagcgaacctttgacgatggcccaggccatgaatctcccccagatgccaatatagctcctatacaagaagaggacgagcaagctctagtccatagtcccgtcgcaaagaaggcaaagacgaggactgcccgcacagcgccactagcagagcgagtccgaccacacactctcgacgaggtcttcggacaggaactcgttggaccgaacggcgtgctgcggtcactcatagaaacaaaccaagttccatctatgatactatggggcgcatcaggcacaggcaagaccacgatagcacgatgcgtggcgaacatggccggctcgcgcttcatcgagatgaacgccacgagctcaggtgtcgcagagtgcaagaagctcttctcggacgcggccaacgagttattgctgaccgggcgcaaaacaataatattctgcgacgaaatccaccgcttctccaaatcacaacaagacgtcttcctaaagccggtagaagccggcaccatcacgttgataggcgcaacgaccgagaacccaagtttcaaagtagtcaacgctctcctgtcacgatgccgaacattcaccctttctaaactcacaacggaggatgtccaacagattctcgctcgtgcactcaaagcagaacttccctcagctaccgaaacaccgcccccgcccctcgacgaagaattccttgcctatttagcgaacttcgcagatggggacgcgcgaacagcgctaaatctcctcgaactcgctgtttcgctggcagggagaggtgaaattacgaaagaggatatgaaggccgcgctcacgaagacgttggtatatgatcgtgccggtgaccaacactacgacacgatttccgcattccataaatccgtccgtggatccgacgctgatgcagcgctgtactatcttgcgcgcatgctacaatctggcgaagatcccctcttcatcgcacgacgtatggtagtcatcgcgtcagaagatgtaggactggcagataataccatgttaagtctcgcaacatcgacattcaccgctacgcaacagatcggaatgcccgaggcgcgtatcccactagcgcattgtgcggtagccctttctcatgcgccaaagagtacgagagcgtaccggggactcaacaatgcgttcgcggcactaagagaaccgggtgttgcgggtcttccggtgccgattcatttaaggaacgcgccaacgagattgatgagggatttggggtatgggaaggagtacaagtacaatcctaattataaggatggcaaagtgaagcaggattacctacctgatgatatactcggcaggacgtttcttgaggatagagatttggggactgagattgatccggatgttgagatggtggatcaggggatggagagtgatgggattacggtgccgatacttaattgagcttggatatactgaattcgaggatatgggtttggttaggtatggtgcttggaaaatggccataggtttgaggagaccgtggtacctgtggattgatcgtgtatagatgttgataatacccccgtgagcaatcaagatacttttatacgaagagtagttggtcaatacaatggtga

SEQ ID NO: 25985 - DNA, 348 bp, Muscodor strobelii
  misc_feature: SGI cDNA ID NO. 568877
  misc_feature: Encodes the peptide sequence at SEQ ID NO 25986
atgaaggccatcatcgtcctcctcgctctagcaatggcctacctcaccaccgccatccctcctcctaacccccatctcgccaacacaaacacaactccatcctcaatccacccaaacgaagtcctcccactaacaccaccccctaaacccagctcccagaagtattccaccacgcacacctcagagaatgtgtggactgtctctactacacgtacacaaactgcatccatctccccgtcgagctctcgtcctgcatccggaaccattgtcgcggtgagcgatgcgcagacgaccggcatcaccgtcgccatcgccaccaacgccaacgccaacgccaccgaagaatga

SEQ ID NO: 25986 - protein, 115 aa, Muscodor strobelii
  misc_feature: SGI Peptide ID NO. 568877
MKAIIVLLALAMAYLTTAIPPPNPHLANTNTTPSSIHPNEVLPLTPPPKPSSQKYSTTHTSENVWTVSTTRTQTASISPSSSRPASGTIVAVSDAQTTGITVAIATNANANATEE

SEQ ID NO: 25987 - DNA, 735 bp, Muscodor strobelii
  misc_feature: SGI cDNA ID NO. 568878
  misc_feature: Reduced expression when VOC is produced
  misc_feature: Encodes the peptide sequence at SEQ ID NO 25988
atgaacacacctagagccgccctccaacgggcgccaacaaccctcctcacctgcataacgtccaccaccagatcctctagtagatcatgtctacatgtaacgcgtcgattctcccaaactcaatcatgggcggcatcatcagagaagctttcggctacctccgctttccagtcatacccgctgcccacgagaataccatcttcgccacgcaatgatcccatatccgagacttcaatagcgggccccgaaccggtccccaaagtccacgaaacgcggcctcctgcgcaatctcagagtcctgctgcggcagcatcacagccagaaaaagctacaatcacgccaccaaagaagatctcagaagctgaggcgcaaacacccaaacccgctccgaagcgcaaactacgaccgcgcaaagctgccatgaaactcacgcccaccgctgtcgagcaactgcgctcactcctagaccaacccgagccgaagctcatcaaagtcggagtgcggaaccgaggatgtagcggattggcataccatctagaatatgtcgacaaacccggcgctttcgacgagacagtcgaacaagatggtgtacaggtactgattgacagcaaggcgctgttcagtatcattgggagtgagatggactgggttgaggataaactgaaccagcgcttcgtgttcaggaatcccaatataaaggaggaatgcgggtgtggcgaatcattcatggtatga

SEQ ID NO: 25988 - protein, 244 aa, Muscodor strobelii
  misc_feature: SGI Peptide ID NO. 568878
  misc_feature (141)..(230): Pfam Id: PF01521 Pfam Desc: Iron-sulphur cluster biosynthesis
  misc_feature (35)..(244): NCBI GI: 46138745 Blast Desc: FG10887.1 [Gibberella zeae PH-1]
  misc_feature (23)..(244): NCBI GI: 256728900 Blast Desc: NECHADRAFT_104323 [Nectria haematococca mpVI 77-13-4]
  misc_feature (29)..(244): NCBI GI: 171677201 Blast Desc: protein product [Podospora anserina] gi|170936668|emb|CAP61327.1| protein product [Podospora anserina]
  misc_feature (1)..(244): NCBI GI: 145258180 Blast Desc: An04g06020 [Aspergillus niger] gi|134074570|emb|CAK38863.1| protein product [Aspergillus niger]
  misc_feature (14)..(244): NCBI GI: 115391347 Blast Desc: iron sulfur assembly protein 1 [Aspergillus terreus NIH2624] gi|114194102|gb|EAU35802.1| iron sulfur assembly protein 1 [Aspergillus terreus NIH2624]
  misc_feature (15)..(244): NCBI GI: 159125322 Blast Desc: iron-sulfur cluster assembly accessory protein Isa1, [Aspergillus fumigatus A1163]
  misc_feature (15)..(244): NCBI GI: 70993822 Blast Desc: iron-sulfur cluster assembly accessory protein Isa1 [Aspergillus fumigatus Af293] gi|66849392|gb|EAL89720.1| iron-sulfur cluster assembly accessory protein Isa1, [Aspergillus
  misc_feature (26)..(244): NCBI GI: 242769736 Blast Desc: iron-sulfur cluster assembly accessory protein Isa1, [Talaromyces stipitatus ATCC 10500] gi|218725028|gb|EED24445.1| iron-sulfur cluster assembly accessory protein Isa1, [Talaromyces
  misc_feature (22)..(244): NCBI GI: 212542107 Blast Desc: iron-sulfur cluster assembly accessory protein Isa1, [Penicillium marneffei ATCC 18224] gi|210066115|gb|EEA20208.1| iron-sulfur cluster assembly accessory protein Isa1, [Penicillium
  misc_feature (88)..(244): NCBI GI: 259487334 Blast Desc: TPA: iron-sulfur cluster assembly accessory protein Isa1, (AFU_orthologue; AFUA_4G10690) [Aspergillus nidulans FGSC A4]
  misc_feature: Useful for introducing or modulating the production of volatile compounds
MNTPRAALQRAPTTLLTCITSTTRSSSRSCLHVTRRFSQTQSWAASSEKLSATSAFQSYPLPTRIPSSPRNDPISETSIAGPEPVPKVHETRPPAQSQSPAAAASQPEKATITPPKKISEAEAQTPKPAPKRKLRPRKAAMKLTPTAVEQLRSLLDQPEPKLIKVGVRNRGCSGLAYHLEYVDKPGAFDETVEQDGVQVLIDSKALFSIIGSEMDWVEDKLNQRFVFRNPNIKEECGCGESFMV

SEQ ID NO: 25989 - DNA, 1270 bp, Muscodor strobelii
  misc_feature: SGI EST ID NO. CUFF.61324.0
  misc_feature: Variant of the nucleotide sequence at SEQ ID NO 25987
aacaccaacaattccgacacgacctaccattgtgcactttgcctactaccctcgttcgcttaatctcactgcggaacttctacaacttaacaaatccaggaccggcacatatgaacctcatataacaatcctatgagttaaaaactccgcgcaaaacagctgtttctccctcatccaccaacctcggatagcctccgaaaccatgaacacacctagagccgccctccaacgggcgccaacaaccctcctcacctgcataacgtccaccaccagatcctctagtagatcatgtctacatgtaacgcgtcgattctcccaaactcaatcatgggcggcatcatcagagaagctttcggctacctccgctttccagtcatacccgctgcccacgagaataccatcttcgccacgcaatgatcccatatccgagacttcaatagcgggccccgaaccggtccccaaagtccacgaaacgcggcctcctgcgcaatctcagagtcctgctgcggcagcatcacagccagaaaaagctacaatcacgccaccaaagaagatctcagaagctgaggcgcaaacacccaaacccgctccgaagcgcaaactacgaccgcgcaaagctgccatgaaactcacgcccaccgctgtcgagcaactgcgctcactcctagaccaacccgagccgaagctcatcaaagtcggagtgcggaaccgaggatgtagcggattggcataccatctagaatatgtcgacaaacccggcgctttcgacgagacagtcgaacaagatggtgtacaggtactgattgacagcaaggcgctgttcagtatcattgggagtgagatggactgggttgaggataaactgaaccagcgcttcgtgttcaggaatcccaatataaaggaggaatgcgggtgtggcgaatcattcatggtatgatatcagcaccgcggtgagatgatgctggcatgtgtagtgtacgaaacggaagataaacttgcatggaacggcgtttctcgcatcgcattttagattgcgatcacactagcattttcgagagaaaggattggacatcatcgacaagattagcattctcatgaaacccggcagagttagatgcagcttggtcgtgtcgtctggcgtgcatagacccgattgctaggagtactagcatagcttatctaataacagaatacccagatacaacacgcaccaattcttatcataagatggtatctcatggaagtaatcatgttgatgataatactaccg

SEQ ID NO: 25990 - DNA, 1878 bp, Muscodor strobelii
  misc_feature: SGI cDNA ID NO. 568879
  misc_feature: Encodes the peptide sequence at SEQ ID NO 25991
atggaagcctctcccttgacccaacaggcccggcctgagatcttccagcagaagatagtcaaactatacgaagccctgttcaaggatgacgacgaagccgacacggaaaagtcagaaggcttctggcgcgagttcttccttttgaagcccgatcgtgctacgttgctcaagatagtcggcgatctcagtccagacgatctgatcaacctccaaggccgaacgagacagctctgcctccgtgccgtcgcggtcctcaggaatgggagtggtgctgccgatctgcacgcactcgagactttgacgaccttcttctccgctatattgaccaagaagtacacgaatccgagctcagatatcattgccgtcttggctggactcgaccaggtggatcacgtgtttaccgatttcgttggcgccttggacggcatcatccgcaatggcaaatcacttgagattcgagaacgagccgtcgaggtcgttctatcgatcacgtccggtgcttaccagaccagtcttttgacgtattttattcatcgagacctctttcctgccatcatgaagttcattcaagactccgattctccagatagggtgttggaaccattcactcttcttgggcttctagccaattacaataagtttgagtttcaaaatccgtaccagctcagactcaatgactttgtcaatgaagctgctatacagaaaattgtacgctgcgtcggtcaggcatgccgagtgctcaggacccaatacctcgagatccttgatgatctcccggaagggtggtcaataacccatgcatttagtgtaatgggcctaggcaaatttgctcccggcagcaaagcaaatcaaaagccaaactacgatccagaagtcgccaaacaaatgttcgccaagttgcctggtgaagaagcagctgtgcttcttggcacttatgatttcagccatgcgaacaaactcttctgttttaaccttgtgacgttagcggccgagaaaggcgaagagcagccaattgctagcctgttgtctttgacatcttacttgcttcagcatgctttcctttccaatagagctaccaactatgctcatctgagcctcatggttttccgacttcttatcgaagatcagattctttgcaaacgcatttgcagcgatgagagcaagattgctgtgcgcttatgccggcagaggcaaccatacctccctgttgtcaaaggagatcgggttctagcaacgagcgtgctagacaccatggtagatggtattaatcacaacctccgccgcagactagacgtgagtttgtacacactatgtgtcggcatcatgctacggatcatctcatatttatcgcgctcgaggacacgactagaatatcactggtctgagttatttcgctctcttcttgccctggttcgcttcctcacgacatacgcgtcagatctcaaggacttaccacacttcgagaccttgctggatctagtggtaaatctccttgccctctcgctatcttcaggagaggcgtttctaccgactcccgctgcgtacgacgacttattttacaaggttgtagaaagtggggaagtgctagagaagttccgggagacgtacaaactatcaaagcgcccgtcaaattctatagatacgctcgtcaatgtgagcacacactacaagacgattttggaagcaggcggaacgaagaagaatcttacgagtatagaagtgacagaagtcattaagcagggctacgagtccttaagtattcagacgaaagaaggcttggatgggtgggaaagatatcgcgaagccgatgataggaccttactgaagaagatggcgagagccactgttacggatgtcaagattatggttcaagtttaa

SEQ ID NO: 25991 - protein, 625 aa, Muscodor strobelii
  misc_feature: SGI Peptide ID NO. 568879
  misc_feature (402)..(623): Pfam Id: PF08427 Pfam Desc: Domain of function (DUF1741)
  misc_feature (1)..(624): NCBI GI: 46138751 Blast Desc: FG10890.1 [Gibberella zeae PH-1]
  misc_feature (1)..(623): NCBI GI: 171677203 Blast Desc: protein product [Podospora anserina] gi|170936669|emb|CAP61328.1| protein product [Podospora anserina]
  misc_feature (1)..(623): NCBI GI: 164423383 Blast Desc: NCU08708 [Neurospora crassa OR74A] gi|16944682|emb|CAB99385.2| conserved [Neurospora crassa] gi|157070069|gb|EAA34333.2| conserved [Neurospora crassa OR74A]
  misc_feature (1)..(623): NCBI GI: 156030724 Blast Desc: SS1G_14301 [Sclerotinia sclerotiorum 1980] gi|154700692|gb|EDO00431.1| SS1G_14301 [Sclerotinia sclerotiorum 1980]
  misc_feature (1)..(623): NCBI GI: 116205435 Blast Desc: CHGG_10601 [Chaetomium globosum CBS 148.51] gi|88176729|gb|EAQ84197.1| CHGG_10601 [Chaetomium globosum CBS 148.51]
  misc_feature (1)..(623): NCBI GI: 169624770 Blast Desc: SNOG_15646 [Phaeosphaeria nodorum SN15] gi|160705234|gb|EAT77021.2| SNOG_15646 [Phaeosphaeria nodorum SN15]
  misc_feature (4)..(623): NCBI GI: 119500386 Blast Desc: NFIA_105410 [Neosartorya fischeri NRRL 181] gi|119415115|gb|EAW25053.1| conserved [Neosartorya fischeri NRRL 181]
  misc_feature (4)..(623): NCBI GI: 115391349 Blast Desc: conserved [Aspergillus terreus NIH2624] gi|114194103|gb|EAU35803.1| conserved [Aspergillus terreus NIH2624]
  misc_feature (4)..(623): NCBI GI: 169771541 Blast Desc: [Aspergillus oryzae RIB40] gi|83768099|dbj|BAE58238.1| protein product [Aspergillus oryzae]
  misc_feature (4)..(623): NCBI GI: 121707784 Blast Desc: conserved [Aspergillus clavatus NRRL 1] gi|119400088|gb|EAW10514.1| conserved [Aspergillus clavatus NRRL 1]
MEASPLTQQARPEIFQQKIVKLYEALFKDDDEADTEKSEGFWREFFLLKPDRATLLKIVGDLSPDDLINLQGRTRQLCLRAVAVLRNGSGAADLHALETLTTFFSAILTKKYTNPSSDIIAVLAGLDQVDHVFTDFVGALDGIIRNGKSLEIRERAVEVVLSITSGAYQTSLLTYFIHRDLFPAIMKFIQDSDSPDRVLEPFTLLGLLANYNKFEFQNPYQLRLNDFVNEAAIQKIVRCVGQACRVLRTQYLEILDDLPEGWSITHAFSVMGLGKFAPGSKANQKPNYDPEVAKQMFAKLPGEEAAVLLGTYDFSHANKLFCFNLVTLAAEKGEEQPIASLLSLTSYLLQHAFLSNRATNYAHLSLMVFRLLIEDQILCKRICSDESKIAVRLCRQRQPYLPVVKGDRVLATSVLDTMVDGINHNLRRRLDVSLYTLCVGIMLRIISYLSRSRTRLEYHWSELFRSLLALVRFLTTYASDLKDLPHFETLLDLVVNLLALSLSSGEAFLPTPAAYDDLFYKVVESGEVLEKFRETYKLSKRPSNSIDTLVNVSTHYKTILEAGGTKKNLTSIEVTEVIKQGYESLSIQTKEGLDGWERYREADDRTLLKKMARATVTDVKIMVQV

SEQ ID NO: 25992 - DNA, 3884 bp, Muscodor strobelii
  misc_feature: SGI EST ID NO. CUFF.61456.0
  misc_feature: Variant of the nucleotide sequence at SEQ ID NO 25990
aggacatccgggtatgctgtatcgggtcgcttgtcttccctggcccatcttcgacgttcactgctccgtcagaagcaaatggaaaaaagtgaatttcctctaccgtatgaactgcgtttgtagactgtaaaatagactgtatttaagtgcctgcccgttcgcgctgttgtcgcaggccgattcactgttcagccacgttgaagatgttgatcaatggctgaagctatctagattgcagattaatcggggttttgcatgtttcaacacggttctcctacaaacaggcacaaatcgtcacgcagaggacaggttgtcagtacgactcccggcatcaccaattgcaacaggctatcgtcagcacatgcaattatctactcaccggttgcatcgccgtgccatgatcaaatcgacagcaccgcccgacccatgcttttcccgccgtcaccatggaagcctctcccttgacccaacaggcccggcctgagatcttccagcagaagatagtcaaactatacgaagccctgttcaaggatgacgacgaagccgacacggaaaagtcagaaggcttctggcgcgagttcttccttttgaagcccgatcgtgctacgttgctcaagatagtcggcgatctcagtccagacgatctgatcaacctccaaggccgaacgagacagctctgcctccgtgccgtcgcggtcctcaggaatgggagtggtgctgccgatctgcacgcactcgaggtgggattccacacagcttgcgacaactcgaaaatttcctgcgcctaacacgtagtacacagactttgacgaccttcttctccgctatattgaccaagaagtacacgaatccgagctcagatatcattgccgtcttggctggactcgaccaggtggatcacgtgtttaccgatttcgttggcgccttggacggcatcatccgcaatggcaaatcacttgagattcgagaacgagccgtcgaggtcgttctatcgatcacgtccggtgcttaccagaccagtcttttgacgtattttattcatcgagacctctttcctgccatcatgaagttcattcaagactccgattctccagatagggtgttggaaccattcactcttcttgggcttctagccaattacaataagtttgagtttcaaaatccgtaccagctcagactcaatgactttgtcaatgaagctgctatacagaaaattgtacgctgcgtcggtcaggcatgccgagtgctcaggacccaatacctcgagatccttgatgatctcccggaagggtggtcaataacccatgcatttagtgtaatgggcctaggcaaatttgctcccggcagcaaagcaaatcaaaagccaaactacgatccagaagtcgccaaacaaatgttcgccaagttgcctggtgaagaagcagctgtgcttcttggcacttatgatttcagccatgcgaacaaactcttctgttttaaccttgtgacgttagcggccgagaaaggcgaagagcagccaattgctagcctgttgtctttgacatcttacttgcttcagcatgctttcctttccaatagagctaccaactatgctcatctgagcctcatggttttccgacttcttatcgaagatcagattctttgcaaacgcatttgcagcgatgagagcaagattgctgtgcgcttatgccggcagaggcaaccatacctccctgttgtcaaaggagatcgggttctagcaacgagcgtgctagacaccatggtagatggtattaatcacaacctccgccgcagactagacgtgagtttgtacacactatgtgtcggcatcatgctacggatcatctcatatttatcgcgctcgaggacacgactagaatatcactggtctgagttatttcgctctcttcttgccctggttcgcttcctcacgacatacgcgtcagatctcaaggacttaccacacttcgagaccttgctggatctagtggtaaatctccttgccctctcgctatcttcaggagaggcgtttctaccgactcccgctgcgtacgacgacttattttacaaggttgtagaaagtggggaagtgctagagaagttccgggagacgtacaaactatcaaagcgcccgtcaaattctatagatacgctcgtcaatgtgagcacacactacaagacgattttggaagcaggcggaacgaagaagaatcttacgagtatagaagtgacagaagtcattaagcagggctacgagtccttaagtattcagacgaaagaaggcttggatgggtgggaaagatatcgcgaagccgatgataggaccttactgaagaagatggcgagagccactgttacggatgtcaagattatggttcaagtttaagacaggtcatgatctgcaataacagagagcatcgctcacaagctgaatcctcaacgcaaagagcctccgaaatcttgaaccttgtaagcactcataaggccaccacgccatgccgaaatgtcacctaactcaacgaacgggaaatattatcgccgaatatttcccctcgtaccattgaaatcttggttcgccgtatcgcaaacctgcatgagcatagccggcaaaaatccaatgacctctggtggcccggaagtagaatctccggctaaacaccagaaccacatgtgtaaacaacgcgcctcagcatcattgtgtctgaaatgatgtaaacgtgttcaaatctgtggtcgcgatttattttgttcgacttcggtatcacgtctgttgacgcgaaaccgtttcctttcagatccaagacacaactcgggagtgcgtgaacctataccctatcgacacaatggcacgccgtgtaatccgcccgccacggccttcgactgtgttgaaactcgtgtgtctcgcgtttctagcaccgtggctctatagctacatcgtccctcatctatcaccacatctgccttctttcctccgtcgctcaacaactggtgttgtgtccgatataccggcctacgaatgcaaaccccacgcctacagtaccgagctagtgtcgttagatccgctcttaatctacatcgagaatttccttcggccctcagaagtcacggaattacttgaggctgcagaaggaagcggcgggtttaatccctcgcaagtatttaaaaatgggcgtttgacaggaacgcaagataggacttcgtcttccgcggcattatcacgcgataatcctaccgtaacgtgcgtactcgaccgcgcgcagcagttcttaggttccatgttcgacagcaacaaagatgacatgggaccaccgcaactcgttcggtactccgagggtcaacaattcagcaatcacgtagattggtacgatacacctcaaccgcgaacccggggctcgaggggtaagggtaggagttggaatagaatggcgagtctgtttgcgtggttggaggatgaatgtgaggggggtgagacttggtttaagtttattgaacctacgcatagtttgaggagcgatactggacatctttggagaccgcatcctgatgggggattagcgtttagaccgattgctaggaatgcgctgttttgggttaatttacatgggaatgggacgggtgatgagagggttagacatgctgggttgaaggtcgttagtggcgggaagacggcgatgaatatttggcctaggaagttctatgattaggggcagagggaagataggaggattgagacattgtgttgggtttgattgttgcgtgttttgctatgtgcgtagatgacaagcggtaatttctgtcgttaatatgatgtctttttggagtgttgaaagagtggtgaaatattggtattgtgttcatatagagattttagggatcacggtggg

SEQ ID NO: 25993 - DNA, 861 bp, Muscodor strobelii
  misc_feature: SGI cDNA ID NO. 568880
  misc_feature: Reduced expression when VOC is produced
  misc_feature: Encodes the peptide sequence at SEQ ID NO 25994
atggcacgccgtgtaatccgcccgccacggccttcgactgtgttgaaactcgtgtgtctcgcgtttctagcaccgtggctctatagctacatcgtccctcatctatcaccacatctgccttctttcctccgtcgctcaacaactggtgttgtgtccgatataccggcctacgaatgcaaaccccacgcctacagtaccgagctagtgtcgttagatccgctcttaatctacatcgagaatttccttcggccctcagaagtcacggaattacttgaggctgcagaaggaagcggcgggtttaatccctcgcaagtatttaaaaatgggcgtttgacaggaacgcaagataggacttcgtcttccgcggcattatcacgcgataatcctaccgtaacgtgcgtactcgaccgcgcgcagcagttcttaggttccatgttcgacagcaacaaagatgacatgggaccaccgcaactcgttcggtactccgagggtcaacaattcagcaatcacgtagattggtacgatacacctcaaccgcgaacccggggctcgaggggtaagggtaggagttggaatagaatggcgagtctgtttgcgtggttggaggatgaatgtgaggggggtgagacttggtttaagtttattgaacctacgcatagtttgaggagcgatactggacatctttggagaccgcatcctgatgggggattagcgtttagaccgattgctaggaatgcgctgttttgggttaatttacatgggaatgggacgggtgatgagagggttagacatgctgggttgaaggtcgttagtggcgggaagacggcgatgaatatttggcctaggaagttctatgattag

SEQ ID NO: 25994 - protein, 286 aa, Muscodor strobelii
  misc_feature: SGI Peptide ID NO. 568880
  misc_feature (25)..(285): NCBI GI: 171695652 Blast Desc: protein product [Podospora anserina] gi|170948068|emb|CAP60232.1| protein product [Podospora anserina]
  misc_feature (74)..(285): NCBI GI: 116181314 Blast Desc: CHGG_01285 [Chaetomium globosum CBS 148.51] gi|88185582|gb|EAQ93050.1| CHGG_01285 [Chaetomium globosum CBS 148.51]
  misc_feature (21)..(285): NCBI GI: 171689818 Blast Desc: protein product [Podospora anserina] gi|170944871|emb|CAP70983.1| protein product [Podospora anserina]
  misc_feature (59)..(283): NCBI GI: 169604152 Blast Desc: SNOG_05086 [Phaeosphaeria nodorum SN15] gi|111066357|gb|EAT87477.1| SNOG_05086 [Phaeosphaeria nodorum SN15]
  misc_feature (100)..(283): NCBI GI: 154301350 Blast Desc: BC1G_10345 [Botryotinia fuckeliana B05.10] gi|150856246|gb|EDN31438.1| BC1G_10345 [Botryotinia fuckeliana B05.10]
  misc_feature (58)..(283): NCBI GI: 121712353 Blast Desc: 2OG-Fe(II) oxygenase family oxidoreductase, [Aspergillus clavatus NRRL 1] gi|119401940|gb|EAW12362.1| 2OG-Fe(II) oxygenase family oxidoreductase, [Aspergillus clavatus
  misc_feature (57)..(283): NCBI GI: 145614094 Blast Desc: MGG_11286 [Magnaporthe grisea 70-15] gi|145021068|gb|EDK05197.1| MGG_11286 [Magnaporthe grisea 70-15]
  misc_feature (117)..(285): NCBI GI: 242797049 Blast Desc: prolyl 4-hydroxylase alpha subunit, [Talaromyces stipitatus ATCC 10500] gi|218719520|gb|EED18940.1| prolyl 4-hydroxylase alpha subunit, [Talaromyces stipitatus ATCC 10500]
  misc_feature (59)..(280): NCBI GI: 145233095 Blast Desc: An02g07870 [Aspergillus niger] gi|134056845|emb|CAK37750.1| protein product [Aspergillus niger]
  misc_feature (17)..(280): NCBI GI: 156048362 Blast Desc: SS1G_08912 [Sclerotinia sclerotiorum 1980] gi|154693309|gb|EDN93047.1| SS1G_08912 [Sclerotinia sclerotiorum 1980]
  misc_feature (31)..(280): SWISSPROT Homolog: EC 1.14.11.2 Procollagen-proline dioxygenase
  misc_feature: Useful for introducing or modulating the production of volatile compounds
MARRVIRPPRPSTVLKLVCLAFLAPWLYSYIVPHLSPHLPSFLRRSTTGVVSDIPAYECKPHAYSTELVSLDPLLIYIENFLRPSEVTELLEAAEGSGGFNPSQVFKNGRLTGTQDRTSSSAALSRDNPTVTCVLDRAQQFLGSMFDSNKDDMGPPQLVRYSEGQQFSNHVDWYDTPQPRTRGSRGKGRSWNRMASLFAWLEDECEGGETWFKFIEPTHSLRSDTGHLWRPHPDGGLAFRPIARNALFWVNLHGNGTGDERVRHAGLKVVSGGKTAMNIWPRKFYD

SEQ ID NO: 25995 - DNA, 3884 bp, Muscodor strobelii; identical to SEQ ID NO: 25992
  misc_feature: SGI EST ID NO. CUFF.61456.0
  misc_feature: Variant of the nucleotide sequence at SEQ ID NO 25993

SEQ ID NO: 25996 - DNA, 4044 bp, Muscodor strobelii
  misc_feature: SGI cDNA ID NO. 568881
  misc_feature: Encodes the peptide sequence at SEQ ID NO 25997
atgcagtctacagaggaaagcgctgtacttttgtccaataaacaccctctcgacgagatttacgttgtgcaaaatgagttgaaacgaaccaagctggagctcgagcctcgcgatggaggtcaaagtcggacggttctcaaggtcgaagactatactgttggctgggtttgcgctctccctattgagatggcagccgcgaagtgtatgctagacgttgtccacgatgagctgaagaggatccctggtgacatcaacacctatacacttggcagtattcatcaccacaatattgccatggcatgtctccccggagatggatacggcactaataatgcagctgtggtggcgagcaacatgcaccgctcgttcccctcggtacagatgttcttgttagtagggattggcggtggcgccccaggcaaattagatattagactcggcgatgttgcggttggcatgagagtagttcagtatgatttgggcaaaacagtccaggagggccgcttcttacccacgggtattgcgcgccaaccacattttgcgcttagaacggccatttccagactacgagcgcaacacgaaacaggagactcgagaataccgatcattctagcaaaaatgcgtgaacgatatccttgtacggcagagtacacttatcgcgagcagcttccagacatattgtttgaaagtgcatacgatcaccctgactcgaatgcaacgtgcaatgactgcgatagatcgaagagcgtgtaccgattgccccgaaacaccaatagcccgatggttcactatggaactattgcctccggaaaccgagtcatcaaaaacggtcgagagagggactcgttagcgcaaaattttgacgccatatgttttgagatggaagcggctggtttaatggaaagtctccaatgcctcgtcatccgtggaattagcgactactgtgattcccataagagaaaggagtggcagaggtatgcatctggtaccgcggcagcatacgcaaaggagtttctttctgcgatacccccgactaaaacccacgaagcatgcaatggtatatttccccctttaccattgattaattccgctcacatatcaacagtcggagcgacgcaagatcgaaggaaacgacttatggactctttatggtttgagaagattgatgctcgatactcgaatattaagtcggcttatggtaagacctgcgcatggttactgagtcacactgcctatatgaggtggttggaccccatagaattctccgatcatcacgggctcctgtggatacgtggaaagcctggcgctggcaagtcaacaataatgaagtatcttattgcacgcgcattagagaaccaggatattacgatctcattcttcctcaatgctcgaggagacgagttggagagatcaacggaagggatgtaccgctcattactctttcaactattcaacagactaccgatgcttgatttggattgtgactttgatcgaattcgtggagttgacggctcttggaagatcgatgatcttcagatacttttttccgcggcgatgtctagactcggaagcggacgagtgatgtgcttcgtggacgccttggacgaatgtagcgaatctcaaatccgcaacatggtcgagcacttcgaagagctcggaaattcagttttggaagccaacaggaatttctacatctgtttgtcaagccgtcattatccgcacatctacgtacaacacagtcgatcattaatattagaggatcaagtcggacacggccaagatttggaaaagtacgttcaaagtaagcttcgagcgggaaaaggaaaagatgtcgaatccgtcaagggcactctcctcgaaaaggcgagtggagtctttatgtgggtagttcttgttgtgaatatcctcaaccaggaataccagacaggtcgtatcttcgcagtcaagaaaaggctccaagagactcccgccgagctaagcgcactttttagagatatcctgaagcgggacaataaaaacatggccgaccttctcctttgtattcaatggatcctctacgcaaaacggccactgaaaccagaggaattctattacgcaatggtcgcaggattggaaccagagcccgagaacctcggcgaatgggatccccagaacatctcgagagatgacatgaacaactttgtctcgaattcgtctaaagggctcgctgaagtcacgaaatcaaagactaggaccgttcagttcatccatgaatccgtgcgagactttcttttaaaggatggaggtatttgcgacttgtctcccgaactggaagaaaaatttcctagccgaagtcataatcagttacgtgattgttgttacacctacatcaaaacagtcatactttgcagcttgccctctagttatcctcgctcaagcgactttaaacatggaacatccaagttcacaatgtccccttccaaccttcccatggcaactatcgccaaagcaaaagtcctgcgacaacgaatgtcggagaaattcccctttctggactacgctattcatcaggtgctttaccatgctgatgcggctgcagatgattctccgcaacaagaatttttgaaaagtttcgacctttacgcatggctttacctcaccaacttgtatgaggaggtcgaaatccattggtacacaccgtctgcaagtttgccatatatccttgccgacaaaaactttgcaaaacttataactagctttctgcgctacgacttgaaggtgcatattcagggagagcgatatgagtatcccctatttgctgctgttgtacattgcaacctcgaggcggctcgagctcttttagagagaccatacggagattgtaatgaagatagtagacttgcagatccttatttcgcagtaaactgcaaagattctaaaggacgaacaccactgtccttagcaatcgaaaaaggaaacactgagatgatacagttactacttgataaagctgctgatgttcacgcgagagatagaattggcagagggtcactgcgactggccgtgaacaaacaaatcgcaaaaacagtagagctactgctcgaaaaagccgccgcatttgacatgagactactcgtaagagcggccatggacagaaacgaaaggatagtacaactgctactcgataaagccaattttgacatcagatatgatgatgtgaagacaatgctatctatggcaacgacgagagggcataaagaaatcgtaaagcaactgcaggaaaaaattactcacattgagcaggctgaattcaattcaacgctatcgtggcctgcaaaagacgagacgagagcagagatcgcacaattactcgtgaataatcaagcgaatggcggattgggccagatgttaggattggccactaaggaggggaacataggaggcgtagagctatttctcgacaaaggtgctaacatcgaatcaaacaattataaaggcctaacaccactgttgcatgccattcaagagggtcacacggaggttgtgcagctacttcttgacaggggtgctgataccgacaccaaacattacaatggtgagacgccattgatctgtgctactgagaatggaaatacagagattgtggagctgcttattgggaaaggggcaaacattgcaagtaaagatgatgctggccggacgccattgttgggagctactatgaatgggcatgtcgagattgtgcgtttgcttctccatcaaggcgccgacatcgaggccagagatcttttttttggccaaacaccattgtcctgcgctgcccgaaacggagatcaagaaatgacacagttgcttcttgagtacggcgcccatctcgagtctcgaagcatatttggccaaacgccattatcaagggctgctgaatctgggcataaagacatcgcgcaactacttcttgagtgtggcgccgatatagggtccaaagacgcctacgaccagacgccactattatgggctgttaaaatggggcacaaagaagttcaacagctactattatcacaatag

SEQ ID NO: 25997 - protein, 1347 aa, Muscodor strobelii
  misc_feature: SGI Peptide ID NO. 568881
  misc_feature (1191)..(1223): Pfam Id: PF00023 Pfam Desc: Ankyrin repeat
  misc_feature (973)..(1005): Pfam Id: PF00023 Pfam Desc: Ankyrin repeat
  misc_feature (1291)..(1323): Pfam Id: PF00023 Pfam Desc: Ankyrin repeat
  misc_feature (1224)..(1256): Pfam Id: PF00023 Pfam Desc: Ankyrin repeat
  misc_feature (1158)..(1190): Pfam Id: PF00023 Pfam Desc: Ankyrin repeat
  misc_feature (1258)..(1290): Pfam Id: PF00023 Pfam Desc: Ankyrin repeat
  misc_feature (47)..(1311): NCBI GI: 238496907 Blast Desc: Pfs, NACHT and Ankyrin domain protein [Aspergillus flavus NRRL3357] gi|220694569|gb|EED50913.1| Pfs, NACHT and Ankyrin domain protein [Aspergillus flavus NRRL3357]
  misc_feature (47)..(1283): NCBI GI: 169774533 Blast Desc: [Aspergillus oryzae RIB40] gi|83769597|dbj|BAE59732.1| protein product [Aspergillus oryzae]
  misc_feature (21)..(1311): NCBI GI: 145254107 Blast Desc: An18g00540 [Aspergillus niger] gi|134084101|emb|CAK43130.1| protein product [Aspergillus niger]
  misc_feature (49)..(1004): NCBI GI: 115390334 Blast Desc: conserved [Aspergillus terreus NIH2624] gi|114195068|gb|EAU36768.1| conserved [Aspergillus terreus NIH2624]
  misc_feature (63)..(1241): NCBI GI: 46116276 Blast Desc: FG03980.1 [Gibberella zeae PH-1]
  misc_feature (38)..(1088): NCBI GI: 212545444 Blast Desc: Pfs, NACHT and Ankyrin domain protein [Penicillium marneffei ATCC 18224] gi|210065845|gb|EEA19939.1| Pfs, NACHT and Ankyrin domain protein [Penicillium marneffei ATCC 18224]
  misc_feature (61)..(1027): NCBI GI: 159124773 Blast Desc: Pfs, NB-ARC and Ankyrin domain protein [Aspergillus fumigatus A1163]
  misc_feature (61)..(1027): NCBI GI: 70983830 Blast Desc: Pfs, NB-ARC and Ankyrin domain protein [Aspergillus fumigatus Af293] gi|66845067|gb|EAL85403.1| Pfs, NB-ARC and Ankyrin domain protein [Aspergillus fumigatus Af293]
  misc_feature (51)..(1086): NCBI GI: 256721218 Blast Desc: NECHADRAFT_10992 [Nectria haematococca mpVI 77-13-4]
  misc_feature (49)..(1183): NCBI GI: 116202685 Blast Desc: CHGG_09227 [Chaetomium globosum CBS 148.51] gi|88177745|gb|EAQ85213.1| CHGG_09227 [Chaetomium globosum CBS 148.51]
MQSTEESAVLLSNKHPLDEIYVVQNELKRTKLELEPRDGGQSRTVLKVEDYTVGWVCALPIEMAAAKCMLDVVHDELKRIPGDINTYTLGSIHHHNIAMACLPGDGYGTNNAAVVASNMHRSFPSVQMFLLVGIGGGAPGKLDIRLGDVAVGMRVVQYDLGKTVQEGRFLPTGIARQPHFALRTAISRLRAQHETGDSRIPIILAKMRERYPCTAEYTYREQLPDILFESAYDHPDSNATCNDCDRSKSVYRLPRNTNSPMVHYGTIASGNRVIKNGRERDSLAQNFDAICFEMEAAGLMESLQCLVIRGISDYCDSHKRKEWQRYASGTAAAYAKEFLSAIPPTKTHEACNGIFPPLPLINSAHISTVGATQDRRKRLMDSLWFEKIDARYSNIKSAYGKTCAWLLSHTAYMRWLDPIEFSDHHGLLWIRGKPGAGKSTIMKYLIARALENQDITISFFLNARGDELERSTEGMYRSLLFQLFNRLPMLDLDCDFDRIRGVDGSWKIDDLQILFSAAMSRLGSGRVMCFVDALDECSESQIRNMVEHFEELGNSVLEANRNFYICLSSRHYPHIYVQHSRSLILEDQVGHGQDLEKYVQSKLRAGKGKDVESVKGTLLEKASGVFMWVVLVVNILNQEYQTGRIFAVKKRLQETPAELSALFRDILKRDNKNMADLLLCIQWILYAKRPLKPEEFYYAMVAGLEPEPENLGEWDPQNISRDDMNNFVSNSSKGLAEVTKSKTRTVQFIHESVRDFLLKDGGICDLSPELEEKFPSRSHNQLRDCCYTYIKTVILCSLPSSYPRSSDFKHGTSKFTMSPSNLPMATIAKAKVLRQRMSEKFPFLDYAIHQVLYHADAAADDSPQQEFLKSFDLYAWLYLTNLYEEVEIHWYTPSASLPYILADKNFAKLITSFLRYDLKVHIQGERYEYPLFAAVVHCNLEAARALLERPYGDCNEDSRLADPYFAVNCKDSKGRTPLSLAIEKGNTEMIQLLLDKAADVHARDRIGRGSLRLAVNKQIAKTVELLLEKAAAFDMRLLVRAAMDRNERIVQLLLDKANFDIRYDDVKTMLSMATTRGHKEIVKQLQEKITHIEQAEFNSTLSWPAKDETRAEIAQLLVNNQANGGLGQMLGLATKEGNIGGVELFLDKGANIESNNYKGLTPLLHAIQEGHTEVVQLLLDRGADTDTKHYNGETPLICATENGNTEIVELLIGKGANIASKDDAGRTPLLGATMNGHVEIVRLLLHQGADIEARDLFFGQTPLSCAARNGDQEMTQLLLEYGAHLESRSIFGQTPLSRAAESGHKDIAQLLLECGADIGSKDAYDQTPLLWAVKMGHKEVQQLLLSQ

SEQ ID NO: 25998 - DNA, 2248 bp, Muscodor strobelii
  misc_feature: SGI EST ID NO. CUFF.61336.0
  misc_feature: Variant of the nucleotide sequence at SEQ ID NO 25996
gtcgaatccgtcaagggcactctcctcgaaaaggcgagtggagtctttatgtgggtagttcttgttgtgaatatcctcaaccaggaataccagacaggtcgtatcttcgcagtcaagaaaaggctccaagagactcccgccgagctaagcgcactttttagagatatcctgaagcgggacaataaaaacatggccgaccttctcctttgtattcaatggatcctctacgcaaaacggccactgaaaccagaggaattctattacgcaatggtcgcaggattggaaccagagcccgagaacctcggcgaatgggatccccagaacatctcgagagatgacatgaacaactttgtctcgaattcgtctaaagggctcgctgaagtcacgaaatcaaagactaggaccgttcagttcatccatgaatccgtgcgagactttcttttaaaggatggaggtatttgcgacttgtctcccgaactggaagaaaaatttcctagccgaagtcataatcagttacgtgattgttgttacacctacatcaaaacagtcatactttgcagcttgccctctagttatcctcgctcaagcgactttaaacatggaacatccaagttcacaatgtccccttccaaccttcccatggcaactatcgccaaagcaaaagtcctgcgacaacgaatgtcggagaaattcccctttctggactacgctattcatcaggtgctttaccatgctgatgcggctgcagatgattctccgcaacaagaatttttgaaaagtttcgacctttacgcatggctttacctcaccaacttgtatgaggaggtcgaaatccattggtacacaccgtctgcaagtttgccatatatccttgccgacaaaaactttgcaaaacttataactagctttctgcgctacgacttgaaggtgcatattcagggagagcgatatgagtatcccctatttgctgctgttgtacattgcaacctcgaggcggctcgagctcttttagagagaccatacggagattgtaatgaagatagtagacttgcagatccttatttcgcagtaaactgcaaagattctaaaggacgaacaccactgtccttagcaatcgaaaaaggaaacactgagatgatacagttactacttgataaagctgctgatgttcacgcgagagatagaattggcagagggtcactgcgactggccgtgaacaaacaaatcgcaaaaacagtagagctactgctcgaaaaagccgccgcatttgacatgagactactcgtaagagcggccatggacagaaacgaaaggatagtacaactgctactcgataaagccaattttgacatcagatatgatgatgtgaagacaatgctatctatggcaacgacgagagggcataaagaaatcgtaaagcaactgcaggaaaaaattactcacattgagcaggctgaattcaattcaacgctatcgtggcctgcaaaagacgagacgagagcagagatcgcacaattactcgtgaataatcaagcgaatggcggattgggccagatgttaggattggccactaaggaggggaacataggaggcgtagagctatttctcgacaaaggtgctaacatcgaatcaaacaattataaaggcctaacaccactgttgcatgccattcaagagggtcacacggaggttgtgcagctacttcttgacaggggtgctgataccgacaccaaacattacaatggtgagacgccattgatctgtgctactgagaatggaaatacagagattgtggagctgcttattgggaaaggggcaaacattgcaagtaaagatgatgctggccggacgccattgttgggagctactatgaatgggcatgtcgagattgtgcgtttgcttctccatcaaggcgccgacatcgaggccagagatcttttttttggccaaacaccattgtcctgcgctgcccgaaacggagatcaagaaatgacacagttgcttcttgagtacggcgcccatctcgagtctcgaagcatatttggccaaacgccattatcaagggctgctgaatctgggcataaagacatcgcgcaactacttcttgagtgtggcgccgatatagggtccaaagacgcctacgaccagacgccactattatgggctgttaaaatggggcacaaagaagttcaacagctactattatcacaataggtttgagagtggtgctgaatctactactgcttcc

SEQ ID NO: 25999 - DNA, 969 bp, Muscodor strobelii
  misc_feature: SGI cDNA ID NO. 568882
  misc_feature: Elevated expression when VOC is produced
  misc_feature: Encodes the peptide sequence at SEQ ID NO 26000
atgcagcacactcgtctcgactctgctgttccgaacgctggttatattgtgcctgactcaggtgaaagcttcgtcttcgatgcaagcatattgtcgtatcttcctaaaggaacgaaggtgatcgacgctgccattctgggcgcatccgcatggacgaagactgtaaaagtcaggacgcgattgacagacgggaccatcaaggactactttctcaagtgcgccactgagaacggtacggtaatgatggagggcgagttcgcctcgcttgaagccattcgcaacattccacctccatttacacctaagcctcacggctggggcaagtttgaaacatcggatacctacttcttgatcatggattttgtcaatctaggatcatcacttgtagatcccatccaattcttgaaaaagctatcagaacttcatcaaaagagcgtctctcccaccggaatgttcggattctatcttctaacatgccacggcaaaaacatccagcccaatacatggacccctagctggagcaaatgcttcatcgagttaatcacatccttctataacgaagacgttcgtgtcaatggtcaatgggctgagtttgacaaggcctttgagacacttatagaccagacgataccccgcctcctcgagccactgcaagctgaaggtagaatcctcaagccatgtctagtacatggcgacttatgggagggcaatacaggcgtggatactctaagtggagagccaatcgtgttcgacgcttctgtcttctatgctcacaatgaatacgagattgggatgtggcgacgtgacatcgtcaaattcgacgagacgtatattcgagaatatctcgaacactgtcctgcaagcgagcctgcggatcaattggatgatcggaatcgtttgtactcgatcaaattcaatttcggtcattctatcagttttcctggagatcaaaagcttagagaggagtga

SEQ ID NO: 26000 - protein, 322 aa, Muscodor strobelii
  misc_feature: SGI Peptide ID NO. 568882
  misc_feature (35)..(321): Pfam Id: PF03881 Pfam Desc: Fructosamine kinase
  misc_feature (19)..(315): NCBI GI: 261356147 Blast Desc: conserved [Verticillium albo-atrum VaMs.102]
  misc_feature (17)..(315): NCBI GI: 258563734 Blast Desc: [Uncinocarpus reesii 1704] gi|237908119|gb|EEP82520.1| [Uncinocarpus reesii 1704]
  misc_feature (10)..(315): NCBI GI: 240110347 Blast Desc: CPC735_063790 [Coccidioides posadasii C735 delta SOWgp]
  misc_feature (10)..(315): NCBI GI: 119180471 Blast Desc: CIMG_08864 [Coccidioides immitis RS]
  misc_feature (10)..(312): NCBI GI: 145228563 Blast Desc: An01g01490 [Aspergillus niger] gi|134054681|emb|CAK43522.1| protein product [Aspergillus niger]
  misc_feature (26)..(315): NCBI GI: 116206070 Blast Desc: CHGG_02328 [Chaetomium globosum CBS 148.51] gi|88182925|gb|EAQ90393.1| CHGG_02328 [Chaetomium globosum CBS 148.51]
  misc_feature (25)..(315): NCBI GI: 116214451 Blast Desc: CHGG_11066 [Chaetomium globosum CBS 148.51] gi|88175421|gb|EAQ82890.1| CHGG_11066 [Chaetomium globosum CBS 148.51]
  misc_feature (6)..(290): NCBI GI: 258565153 Blast Desc: [Uncinocarpus reesii 1704] gi|237907022|gb|EEP81423.1| [Uncinocarpus reesii 1704]
  misc_feature (12)..(322): NCBI GI: 169765035 Blast Desc: [Aspergillus oryzae RIB40] gi|83764843|dbj|BAE54987.1| protein product [Aspergillus oryzae]
  misc_feature (34)..(322): NCBI GI: 238503680 Blast Desc: conserved [Aspergillus flavus NRRL3357] gi|220690543|gb|EED46892.1| conserved [Aspergillus flavus NRRL3357]
  misc_feature: Useful for introducing or modulating the production of volatile compounds
MQHTRLDSAVPNAGYIVPDSGESFVFDASILSYLPKGTKVIDAAILGASAWTKTVKVRTRLTDGTIKDYFLKCATENGTVMMEGEFASLEAIRNIPPPFTPKPHGWGKFETSDTYFLIMDFVNLGSSLVDPIQFLKKLSELHQKSVSPTGMFGFYLLTCHGKNIQPNTWTPSWSKCFIELITSFYNEDVRVNGQWAEFDKAFETLIDQTIPRLLEPLQAEGRILKPCLVHGDLWEGNTGVDTLSGEPIVFDASVFYAHNEYEIGMWRRDIVKFDETYIREYLEHCPASEPADQLDDRNRLYSIKFNFGHSISFPGDQKLREE

SEQ ID NO: 26001 - DNA, 1832 bp, Muscodor strobelii
  misc_feature: SGI EST ID NO. CUFF.61576.0
  misc_feature: Variant of the nucleotide sequence at SEQ ID NO 25999
cacgtacttatttacattctctcaaaaattatgcagcacactcgtctcgactctgctgttccgaacgctggttatattgtgcctgactcaggtgaaagcttcgtcttcgatgcaagcatattgtcgtatcttcctaaaggaacgaaggtgatcgacgctgccattctgggcgcatccgcatggacgaagactgtaaaagtcaggacgcgattgacagacgggaccatcaaggactactttctcaagtgcgccactgagaacggtacggtaatgatggagggcgagttcgcctcgcttgaagccattcgcaacattccacctccatttacacctaagcctcacggctggggcaagtttgaaacatcggatacctacttcttgatcatggattttggtgagacagtcccacgccctattctacttgacatggtcgcctgtttgtatacgcgatcgaacgctgataccatatatattagtcaatctaggatcatcacttgtagatcccatccaattcttgaaaaagctatcagaacttcatcaaaagagcgtctctcccaccggaatgttcggattctatcttctaacatgccacggcaaaaacatccagcccaatacatggacccctagctggagcaaatgcttcatcgagttaatcacatccttctataacgaagacgttcgtgtcaatggtcaatgggctgagtttgacaaggcctttgagacacttatagaccagacgataccccgcctcctcgagccactgcaagctgaaggtagaatcctcaagccatgtctagtacatggcgacttatgggagggcaatacaggcgtggatactctaagtggagagccaatcgtgttcgacgcttctgtcttctatgctcacaatgaatacgagattgggatgtggcgacgtgacatcgtcaaattcgacgagacgtatattcgagaatatctcgaacactgtcctgcaagcgagcctgcggatcaattggatgatcggaatcgtttgtactcgatcaaattcaatttcggtcattctatcagttttcctggagatcaaaagcttagagaggagatgtataacgatatgtgttttctgaacgagaaatatgcataaatgcactggctcttacgccttcctctgttcaacaaacgaggtcgagcgatcactgaatgtgtggccaatgggtttcattctcgcttgtatttgtcgaagggttgccgaaaactcttgcatagtaatggcatcagaattcactatatttgccataggagacacaatatcgaggtaatgtactttggctctgggagtcattgcacagtgaagcggcctactacccaaaggccagtgaccaagtctcaccgcatcgaattttcctcagcgtctcaatccttgccctcagtgacgcacaatgccatggcactatagccaagcccataccaattatcgcccttgccagcctcctcaacgaatttcttcacagcagtcaaagccttctcggaaagcatatcctctccatcatccagcgtgacacccagatctatgggtccttttcggcatccctcaagctggtacagacgacccgtcttgcttgacttcgtgaatgtcatgtacgcatgatgaggctcaacggtcgggtcaggatcaggcaccgtgtcaccacgcgaggcgacggaggcatgtgctgcttcgagttcatcatcagactcgaggactgcgatgcgatcctcgcgcttcaagggtgcgcagcgtgatatgagttgatcgatgtggctatcgggctctgtaagtgttattagtatagttcatcatttccgcagaaccgcag

SEQ ID NO: 26002 - DNA, 747 bp, Muscodor strobelii
  misc_feature: SGI cDNA ID NO. 568883
  misc_feature: Encodes the peptide sequence at SEQ ID NO 26003
atgaagcatttcatcccactagagtccaacccagagctcttcacagagctaatccaccgcctcggcgtgtcgaagaacctcgctttcttcgacctccttacgttatctgcctctgacactgatcttctgtccttcatcccacgaccggcacatgcattggtcctagtcattcccgcgcctgatggatatgcaaaggagctagatgaggtggtggagagagacattccgctccacgacaagtgtggcgatgaggaggacgccgtattctacagacagacgattgggaatgcatgtggattgtatgctattttgcatgcggtgagcaatggcgatacgaggaagtgtgttgagcccgatagccacatcgatcaactcatatcacgctgcgcacccttgaagcgcgaggatcgcatcgcagtcctcgagtctgatgatgaactcgaagcagcacatgcctccgtcgcctcgcgtggtgacacggtgcctgatcctgacccgaccgttgagcctcatcatgcgtacatgacattcacgaagtcaagcaagacgggtcgtctgtaccagcttgagggatgccgaaaaggacccatagatctgggtgtcacgctggatgatggagaggatatgctttccgagaaggctttgactgctgtgaagaaattcgttgaggaggctggcaagggcgataattggtatgggcttggctatagtgccatggcattgtgcgtcactgagggcaaggattga

SEQ ID NO: 26003 - protein, 248 aa, Muscodor strobelii
  misc_feature: SGI Peptide ID NO. 568883
  misc_feature (3)..(225): Pfam Id: PF01088 Pfam Desc: Ubiquitin carboxyl-terminal hydrolase, family 1
  misc_feature (2)..(224): NCBI GI: 145608854 Blast Desc: MGG_06319 [Magnaporthe grisea 70-15] gi|145016284|gb|EDK00774.1| MGG_06319 [Magnaporthe grisea 70-15]
  misc_feature (2)..(228): NCBI GI: 258574085 Blast Desc: conserved [Uncinocarpus reesii 1704] gi|237901490|gb|EEP75891.1| conserved [Uncinocarpus reesii 1704]
  misc_feature (2)..(234): NCBI GI: 240105969 Blast Desc: Ubiquitin carboxyl-terminal hydrolase, [Coccidioides posadasii C735 delta SOWgp]
  misc_feature (2)..(234): NCBI GI: 119192770 Blast Desc: CIMG_00762 [Coccidioides immitis RS]
  misc_feature (2)..(234): NCBI GI: 154286282 Blast Desc: conserved [Ajellomyces capsulatus NAm1] gi|150407577|gb|EDN03118.1| conserved [Ajellomyces capsulatus NAm1]
  misc_feature (2)..(242): NCBI GI: 154301584 Blast Desc: BC1G_10119 [Botryotinia fuckeliana B05.10] gi|150855781|gb|EDN30973.1| BC1G_10119 [Botryotinia fuckeliana B05.10]
  misc_feature (2)..(244): NCBI GI: 169847301 Blast Desc: CC1G_01998 [Coprinopsis cinerea okayama7#130] gi|116508614|gb|EAU91509.1| CC1G_01998 [Coprinopsis cinerea okayama7#130]
  misc_feature (2)..(241): NCBI GI: 258570723 Blast Desc: conserved [Uncinocarpus reesii 1704] gi|237904435|gb|EEP78836.1| conserved [Uncinocarpus reesii 1704]
  misc_feature (2)..(230): NCBI GI: 115400671 Blast Desc: conserved [Aspergillus terreus NIH2624] gi|114191590|gb|EAU33290.1| conserved [Aspergillus terreus NIH2624]
  misc_feature (4)..(242): NCBI GI: 256727890 Blast Desc: NECHADRAFT_70875 [Nectria haematococca mpVI 77-13-4]
  misc_feature (2)..(222): SWISSPROT Homolog: EC 3.4.19.12 Ubiquitinyl hydrolase 1
MKHFIPLESNPELFTELIHRLGVSKNLAFFDLLTLSASDTDLLSFIPRPAHALVLVIPAPDGYAKELDEVVERDIPLHDKCGDEEDAVFYRQTIGNACGLYAILHAVSNGDTRKCVEPDSHIDQLISRCAPLKREDRIAVLESDDELEAAHASVASRGDTVPDPDPTVEPHHAYMTFTKSSKTGRLYQLEGCRKGPIDLGVTLDDGEDMLSEKALTAVKKFVEEAGKGDNWYGLGYSAMALCVTEGKD

SEQ ID NO: 26004 - DNA, 2766 bp, Muscodor strobelii
  misc_feature: SGI EST ID NO. CUFF.61577.1
  misc_feature: Variant of the nucleotide sequence at SEQ ID NO 26002
cttccgtatcttacgattcacggcctacagacttttgctttttctctgtttgtctttctagtttctcaatttttttcttgatcattacactgcgaagaagagccgacaaacatgtcgaaacgaccgctaaacctggtcaattcgttgcgatcgcgtttgtcgcaacgcccacgttctctccgacgcccattcacgtctcgcacaaatcctacgaattcaagacaattgaacagtcgcataatagctagtgtcggcctggtagctatagcagcaacaggctacacaattgtatgtctttactactcatgggtcaagctctaagctactcaattgaccgaattcttccatttctaggtcatacagaaccccaccaaattcgacgcccgctcagtggcagacctcgatgaacggacaaagcgcgaagatggcataacagagcaatctcccatgcgactgcgcatggaacaattcatacgcgagcagcagaaagagatcgtagctgctctcgagcaagtcgacggcatgcggttccgcgaggatacctgggctcggcccaacggtggtggtggtctctcgtgtgtgttgcaagagggcaatgtcttcgaaaaggctggtgtcaatatcagcgttgtatatggaacattgcccaaagccgcggtggccaagatgagggaaaaccacaagagtgtggctgctgagggcgacaagctagacttctatgctctgggtctaagtcttgtcctccacccgcgcaacccaatggctcctacagtccacctcaactaccggtacttcgagaccatgaaggccgacggcacatcacaagcttggtggttcggcggcggaagcgatctgacaccaagctacctcttcgacgaagacgctgtccactttcacaagaccctaaaggacgcgtgtgacaagcatgataaagactactacccacggttcaagaagtggtgtgacgaatatttctccaacaagcaccgtggagaatcacgtggtgtgggcggtatcttctttgacgacctagacgatacggttgcggattcggcaaacacattctcatttatccaagactgtctaaagagctttctaccttcatacctccctatcatagaaaaacggaaagacatgccctttaccgagaaggagaaggagtggcagcaggtccgcagaggtcgctatgttgagttcaacctagtgcatgaccgtggcacagctttcggcttgaacgtgcccggctcgcgagttgagagtatattgatgagtctgccactgtcagcctcatggcggtacatgtatgagccagaacctcggagccgcgagcagcgtctcctagatgtgttgaagaaccccaaagaatgggtttgaaacagtcactggaattttataggcgcattcaagtagcgaaagcccagaaactaatcggatttgtacaaaatgtataaacttacctagataccacataaattagcaaatgaaatagacgcaatggcgcctcgccgtgtcacatacttcattgaatgatggtaatgcaagcgggagtgtgccacacacagttacacacagtgctagactctcagtgactgcaggcagcaggtgcaccacgcaacacccaccctcttacctaacaactccagcaaacatcacacaactccattagactcatacacagatacttcgtatgagctgatcggtacccagcaatccagcaagatgaagcatttcatcccactagagtccaacccagagctcttcacagagctaatccaccgcctcggcgtgtcgaagaacctcgctttcttcgacctccttacgttatctgcctctgacactgatcttctgtccttcatcccacgaccggcacatgcattggtcctagtcattcccgcgcctgatggatatgcaaaggagctagatgaggtggtggagagagacattccgctccacgacaagtgtggcgatgaggaggacgccgtattctacagacagacgattgggaatgcatgtggattgtatgctattttgcatgcggtgagcaatggcgatacgaggaagtgtgttgagcccgatagccacatcgatcaactcatatcacgctgcgcacccttgaagcgcgaggatcgcatcgcagtcctcgagtctgatgatgaactcgaagcagcacatgcctccgtcgcctcgcgtggtgacacggtgcctgatcctgacccgaccgttgagcctcatcatgcgtacatgacattcacgaagtcaagcaagacgggtcgtctgtaccagcttgagggatgccgaaaaggacccatagatctgggtgtcacgctggatgatggagaggatatgctttccgagaaggctttgactgctgtgaagaaattcgttgaggaggctggcaagggcgataattggtatgggcttggctatagtgccatggcattgtgcgtcactgagggcaaggattgagacgctgaggaaaattcgatgcggtgagacttggtcactggcctttgggtagtaggccgcttcactgtgcaatgactcccagagccaaagtacattacctcgatattgtgtctcctatggcaaatatagtgaattctgatgccattactatgcaagagttttcggcaacccttcgacaaatacaagcgagaatgaaacccattggccacacattcagtgatcgctcgacctcgtttgttgaacagaggaaggcgtaagagccagtgcatttatgcatatttctcgttcagaaaacacata

SEQ ID NO: 26005 - DNA, 1197 bp, Muscodor strobelii
  misc_feature: SGI cDNA ID NO. 568884
  misc_feature: Reduced expression when VOC is produced
  misc_feature: Encodes the peptide sequence at SEQ ID NO 26006
atgtcgaaacgaccgctaaacctggtcaattcgttgcgatcgcgtttgtcgcaacgcccacgttctctccgacgcccattcacgtctcgcacaaatcctacgaattcaagacaattgaacagtcgcataatagctagtgtcggcctggtagctatagcagcaacaggctacacaattgtcatacagaaccccaccaaattcgacgcccgctcagtggcagacctcgatgaacggacaaagcgcgaagatggcataacagagcaatctcccatgcgactgcgcatggaacaattcatacgcgagcagcagaaagagatcgtagctgctctcgagcaagtcgacggcatgcggttccgcgaggatacctgggctcggcccaacggtggtggtggtctctcgtgtgtgttgcaagagggcaatgtcttcgaaaaggctggtgtcaatatcagcgttgtatatggaacattgcccaaagccgcggtggccaagatgagggaaaaccacaagagtgtggctgctgagggcgacaagctagacttctatgctctgggtctaagtcttgtcctccacccgcgcaacccaatggctcctacagtccacctcaactaccggtacttcgagaccatgaaggccgacggcacatcacaagcttggtggttcggcggcggaagcgatctgacaccaagctacctcttcgacgaagacgctgtccactttcacaagaccctaaaggacgcgtgtgacaagcatgataaagactactacccacggttcaagaagtggtgtgacgaatatttctccaacaagcaccgtggagaatcacgtggtgtgggcggtatcttctttgacgacctagacgatacggttgcggattcggcaaacacattctcatttatccaagactgtctaaagagctttctaccttcatacctccctatcatagaaaaacggaaagacatgccctttaccgagaaggagaaggagtggcagcaggtccgcagaggtcgctatgttgagttcaacctagtgcatgaccgtggcacagctttcggcttgaacgtgcccggctcgcgagttgagagtatattgatgagtctgccactgtcagcctcatggcggtacatgtatgagccagaacctcggagccgcgagcagcgtctcctagatgtgttgaagaaccccaaagaatgggtttga

SEQ ID NO: 26006 - protein, 398 aa, Muscodor strobelii
  misc_feature: SGI Peptide ID NO. 568884
  misc_feature (88)..(398): Pfam Id: PF01218 Pfam Desc: Coproporphyrinogen III oxidase
  misc_feature (22)..(398): NCBI GI: 46138449 Blast Desc: FG10739.1 [Gibberella zeae PH-1]
  misc_feature (46)..(398): NCBI GI: 156062974 Blast Desc: SS1G_01603 [Sclerotinia sclerotiorum 1980] gi|154696939|gb|EDN96677.1| SS1G_01603 [Sclerotinia sclerotiorum 1980]
  misc_feature (40)..(398): NCBI GI: 261355461 Blast Desc: coproporphyrinogen III oxidase [Verticillium albo-atrum VaMs.102]
  misc_feature (59)..(398): NCBI GI: 154319029 Blast Desc: coproporphyrinogen III oxidase [Botryotinia fuckeliana B05.10] gi|150856897|gb|EDN32089.1| coproporphyrinogen III oxidase [Botryotinia fuckeliana B05.10]
  misc_feature (22)..(398): NCBI GI: 164428005 Blast Desc: coproporphyrinogen III oxidase [Neurospora crassa OR74A] gi|18376156|emb|CAD21231.1| coproporphyrinogen oxidase precursor [Neurospora crassa] gi|157071970|gb|EAA27013.2| III
  misc_feature (44)..(398): NCBI GI: 171688758 Blast Desc: protein product [Podospora anserina] gi|170944341|emb|CAP70451.1| protein product [Podospora anserina]
  misc_feature (44)..(398): NCBI GI: 256728976 Blast Desc: [Nectria haematococca mpVI 77-13-4]
  misc_feature (59)..(398): NCBI GI: 116199677 Blast Desc: conserved [Chaetomium globosum CBS 148.51] gi|88179273|gb|EAQ86741.1| conserved [Chaetomium globosum CBS 148.51]
  misc_feature (53)..(398): NCBI GI: 171905882 Blast Desc: coproporphyrinogen III oxidase [Trichoderma aureoviride]
  misc_feature (59)..(398): NCBI GI: 145610607 Blast Desc: MGG_01061 [Magnaporthe grisea 70-15] gi|145017982|gb|EDK02261.1| MGG_01061 [Magnaporthe grisea 70-15]
  misc_feature (60)..(398): SWISSPROT Homolog: EC 1.3.3.3 Coproporphyrinogen oxidase
  misc_feature: Useful for introducing or modulating the production of volatile compounds
MSKRPLNLVNSLRSRLSQRPRSLRRPFTSRTNPTNSRQLNSRIIASVGLVAIAATGYTIVIQNPTKFDARSVADLDERTKREDGITEQSPMRLRMEQFIREQQKEIVAALEQVDGMRFREDTWARPNGGGGLSCVLQEGNVFEKAGVNISVVYGTLPKAAVAKMRENHKSVAAEGDKLDFYALGLSLVLHPRNPMAPTVHLNYRYFETMKADGTSQAWWFGGGSDLTPSYLFDEDAVHFHKTLKDACDKHDKDYYPRFKKWCDEYFSNKHRGESRGVGGIFFDDLDDTVADSANTFSFIQDCLKSFLPSYLPIIEKRKDMPFTEKEKEWQQVRRGRYVEFNLVHDRGTAFGLNVPGSRVESILMSLPLSASWRYMYEPEPRSREQRLLDVLKNPKEWV

SEQ ID NO: 26007 - DNA, 2700 bp, Muscodor strobelii
  misc_feature: SGI EST ID NO. CUFF.61577.2
  misc_feature: Variant of the nucleotide sequence at SEQ ID NO 26005
cttccgtatcttacgattcacggcctacagacttttgctttttctctgtttgtctttctagtttctcaatttttttcttgatcattacactgcgaagaagagccgacaaacatgtcgaaacgaccgctaaacctggtcaattcgttgcgatcgcgtttgtcgcaacgcccacgttctctccgacgcccattcacgtctcgcacaaatcctacgaattcaagacaattgaacagtcgcataatagctagtgtcggcctggtagctatagcagcaacaggctacacaattgtcatacagaaccccaccaaattcgacgcccgctcagtggcagacctcgatgaacggacaaagcgcgaagatggcataacagagcaatctcccatgcgactgcgcatggaacaattcatacgcgagcagcagaaagagatcgtagctgctctcgagcaagtcgacggcatgcggttccgcgaggatacctgggctcggcccaacggtggtggtggtctctcgtgtgtgttgcaagagggcaatgtcttcgaaaaggctggtgtcaatatcagcgttgtatatggaacattgcccaaagccgcggtggccaagatgagggaaaaccacaagagtgtggctgctgagggcgacaagctagacttctatgctctgggtctaagtcttgtcctccacccgcgcaacccaatggctcctacagtccacctcaactaccggtacttcgagaccatgaaggccgacggcacatcacaagcttggtggttcggcggcggaagcgatctgacaccaagctacctcttcgacgaagacgctgtccactttcacaagaccctaaaggacgcgtgtgacaagcatgataaagactactacccacggttcaagaagtggtgtgacgaatatttctccaacaagcaccgtggagaatcacgtggtgtgggcggtatcttctttgacgacctagacgatacggttgcggattcggcaaacacattctcatttatccaagactgtctaaagagctttctaccttcatacctccctatcatagaaaaacggaaagacatgccctttaccgagaaggagaaggagtggcagcaggtccgcagaggtcgctatgttgagttcaacctagtgcatgaccgtggcacagctttcggcttgaacgtgcccggctcgcgagttgagagtatattgatgagtctgccactgtcagcctcatggcggtacatgtatgagccagaacctcggagccgcgagcagcgtctcctagatgtgttgaagaaccccaaagaatgggtttgaaacagtcactggaattttataggcgcattcaagtagcgaaagcccagaaactaatcggatttgtacaaaatgtataaacttacctagataccacataaattagcaaatgaaatagacgcaatggcgcctcgccgtgtcacatacttcattgaatgatggtaatgcaagcgggagtgtgccacacacagttacacacagtgctagactctcagtgactgcaggcagcaggtgcaccacgcaacacccaccctcttacctaacaactccagcaaacatcacacaactccattagactcatacacagatacttcgtatgagctgatcggtacccagcaatccagcaagatgaagcatttcatcccactagagtccaacccagagctcttcacagagctaatccaccgcctcggcgtgtcgaagaacctcgctttcttcgacctccttacgttatctgcctctgacactgatcttctgtccttcatcccacgaccggcacatgcattggtcctagtcattcccgcgcctgatggatatgcaaaggagctagatgaggtggtggagagagacattccgctccacgacaagtgtggcgatgaggaggacgccgtattctacagacagacgattgggaatgcatgtggattgtatgctattttgcatgcggtgagcaatggcgatacgaggaagtgtgttgagcccgatagccacatcgatcaactcatatcacgctgcgcacccttgaagcgcgaggatcgcatcgcagtcctcgagtctgatgatgaactcgaagcagcacatgcctccgtcgcctcgcgtggtgacacggtgcctgatcctgacccgaccgttgagcctcatcatgcgtacatgacattcacgaagtcaagcaagacgggtcgtctgtaccagcttgagggatgccgaaaaggacccatagatctgggtgtcacgctggatgatggagaggatatgctttccgagaaggctttgactgctgtgaagaaattcgttgaggaggctggcaagggcgataattggtatgggcttggctatagtgccatggcattgtgcgtcactgagggcaaggattgagacgctgaggaaaattcgatgcggtgagacttggtcactggcctttgggtagtaggccgcttcactgtgcaatgactcccagagccaaagtacattacctcgatattgtgtctcctatggcaaatatagtgaattctgatgccattactatgcaagagttttcggcaacccttcgacaaatacaagcgagaatgaaacccattggccacacattcagtgatcgctcgacctcgtttgttgaacagaggaaggcgtaagagccagtgcatttatgcatatttctcgttcagaaaacacata

SEQ ID NO: 26008 - DNA, 795 bp, Muscodor strobelii
  misc_feature: SGI cDNA ID NO. 568885
  misc_feature: Encodes the peptide sequence at SEQ ID NO 26009
atgggtcatcacaatcggcacttcgctggcgatccccacgcgttaagcggagcttggagtcccccaacaagcagcgcaaatttctgcgaagaagattatgccgtgtcgcggtattttgccgagttcattaatacctggacaaaccttctctatgtcttctttgctctacagtacatgtacggaccaggtagccgtggtatcttgcgacccaaaatagactttatgtcagttgcactcttcgttctcggcattgcatcgttcctgttccacgcatctctacgacatgccatgcaatttggcgatgagcttgccatgctcggtcttgtttggaccatccttcagggacttcttaccgttcggcgctcatctggttacgataagttcatcaccataagcctcgcaaccgtatttcctctctttggggtcttctacgtctggacgggtaagatcatctaccactacgtcgggttcagtttggcggtctactcgatcgtcttacgcggcatctacctcttctattggcgtgagcctggttttccagcctcaaaagtcgcacagtggaggatccgaggccgcatagctctcattttaatgatagttgcttttgttatttggaacattgacctggaattttgcgcagagctgagaaagctccgacaacaaatcggactaccaggagcctggcttttagaactccacgggtggtggcacatactcacggcaatgagtgcggctcgtttcacagatatcgtcagagaggttcaagacgagttgaagcaggaaaagaaagattaa

SEQ ID NO: 26009 - protein, 264 aa, Muscodor strobelii
  misc_feature: SGI Peptide ID NO. 568885
  misc_feature (16)..(264): Pfam Id: PF05875 Pfam Desc: Alkaline phytoceramidase (aPHC)
  misc_feature (16)..(242): Pfam Id: PF05875 Pfam Desc: Alkaline phytoceramidase (aPHC)
  misc_feature (1)..(260): NCBI GI: 171695672 Blast Desc: protein product [Podospora anserina] gi|170948078|emb|CAP60242.1| protein product [Podospora anserina]
  misc_feature (1)..(264): NCBI GI: 46116490 Blast Desc: FG04087.1 [Gibberella zeae PH-1]
  misc_feature (1)..(264): NCBI GI: 256721952 Blast Desc: NECHADRAFT_100775 [Nectria haematococca mpVI 77-13-4]
  misc_feature (1)..(229): NCBI GI: 116205359 Blast Desc: CHGG_10563 [Chaetomium globosum CBS 148.51] gi|88176691|gb|EAQ84159.1| CHGG_10563 [Chaetomium globosum CBS 148.51]
  misc_feature (19)..(262): NCBI GI: 255955659 Blast Desc: Pc21g15720 [Penicillium chrysogenum Wisconsin 54-1255] gi|211590293|emb|CAP96469.1| Pc21g15720 [Penicillium chrysogenum Wisconsin 54-1255]
  misc_feature (17)..(244): NCBI GI: 189188988 Blast Desc: alkaline ceramidase family protein [Pyrenophora tritici-repentis Pt-1C-BFP] gi|187972439|gb|EDU39938.1| alkaline ceramidase family protein [Pyrenophora tritici-repentis
  misc_feature (12)..(244): NCBI GI: 225679710 Blast Desc: dihydroceramidase [Paracoccidioides brasiliensis Pb03]
  misc_feature (19)..(251): NCBI GI: 121703325 Blast Desc: alkaline ceramidase family protein [Aspergillus clavatus NRRL 1] gi|119398070|gb|EAW08501.1| alkaline ceramidase family protein [Aspergillus clavatus NRRL 1]
  misc_feature (16)..(244): NCBI GI: 164427589 Blast Desc: NCU02969 [Neurospora crassa OR74A] gi|16945385|emb|CAD11799.1| conserved [Neurospora crassa] gi|157071806|gb|EAA36120.2| NCU02969 [Neurospora crassa OR74A]
  misc_feature (13)..(244): NCBI GI: 67523755 Blast Desc: AN2333.2 [Aspergillus nidulans FGSC A4] gi|40745288|gb|EAA64444.1| AN2333.2 [Aspergillus nidulans FGSC A4] gi|259487729|tpe|CBF86626.1| TPA: conserved similar to FGSC
  misc_feature (21)..(262): SWISSPROT Homolog: EC 3.5.1.23 Ceramidase
MGHHNRHFAGDPHALSGAWSPPTSSANFCEEDYAVSRYFAEFINTWTNLLYVFFALQYMYGPGSRGILRPKIDFMSVALFVLGIASFLFHASLRHAMQFGDELAMLGLVWTILQGLLTVRRSSGYDKFITISLATVFPLFGVFYVWTGKIIYHYVGFSLAVYSIVLRGIYLFYWREPGFPASKVAQWRIRGRIALILMIVAFVIWNIDLEFCAELRKLRQQIGLPGAWLLELHGWWHILTAMSAARFTDIVREVQDELKQEKKD

SEQ ID NO: 26010 - DNA, 1183 bp, Muscodor strobelii
  misc_feature: SGI EST ID NO. CUFF.61460.2
  misc_feature: Variant of the nucleotide sequence at SEQ ID NO 26008
attttccgcgacggtcccctaacacctcataatgagctgttgcaacccgtagtctacaacaagagactaattatatttgtatatgagagatgtttttcgcgttcataacaacctaagaaacttctaccgagtatcgagaacacagcccccatcatgggtcatcacaatcggcacttcgctggcgatccccacgcgttaagcggagcttggagtcccccaacaagcagcgcaaatttctgcgaagaagattatgccgtgtcgcggtattttgccgagttcattaatacctggacaaaccttctctatgtcttctttgctctacagtacatgtacggaccaggtagccgtggtatcttgcgacccaaaatagactttatgtcagttgcactcttcgttctcggcattgcatcgttcctgttccacgcatctctacgacatgccatgcaatttggcgatgagcttgccatgctcggtcttgtttggaccatccttcagggacttcttaccgttcggcgctcatctggttacgataagttcatcaccataagcctcgcaaccgtatttcctctctttggggtcttctacgtctggacgggtaagatcatctaccactacgtcgggttcagtttggcggtctactcgatcgtcttacgcggcatctacctcttctattggcgtgagcctggttttccagcctcaaaagtcgcacagtggaggatccgaggccgcatagctctcattttaatgatagttgcttttgttatttggaacattgacctggaattttgcgcagagctgagaaagctccgacaacaaatcggactaccaggagcctggcttttagaactccacgggtggtggcacatactcacggcaatgagtgcggctcgtttcacagatatcgtcagagaggttcaagacgagttgaagcaggaaaagaaagattaatccccacttggattttcagcatggcgagcgagttttgctttcagatgtttcctcaattcttccaacagtctggagtaatcagaaattcgacaagttgcaattgttaactctgacacggtcctggacaagaccaaagctgaacaagagagcagatagacttattaaacctaattatagactagacataatggaatccacactcgaattcagttgcaatacctccatctgacaacca

SEQ ID NO: 26011 - DNA, 1599 bp, Muscodor strobelii
  misc_feature: SGI cDNA ID NO. 568886
  misc_feature: Encodes the peptide sequence at SEQ ID NO 26012
atgaagatgcgcagcaatggagacttgcatgataatgcctttgaagttagggccgaaagattagtcagttcatttggaagtgcacaaactctatgcttcttcatatgtgttgtcattctctactactattactacatcaagatcgagagtcggaagaagatggaagctgccattgcaggaaagaataattgcgaacccgtgcttccgtttttaccatataaatggcctctcgctctagatctcgtgaaaaagcaatacgacatcttcttcagcgatcatacatttgaaggtttaacacctttcctggatctagcagatactggtcgcattcatcttttcggagcaactggctattttacgactgaccctgcaaacgtggaaacaatactgtcaactcgatttgaagattactctcttggtagtcgaactattgcttcctcgccccttattggacaaggaatctttgcacaggatggtccagcatggaagcattctagagagattatacggcgccagttcgtgcgtgtacagaagcaaactcctcaggctttcatgcccctagttgagagactggtcgacgaaatttctgaagcggccgtcgacggccaggttgatctaaagccattgatgctcgaatatactcttgcaactaccactatgcttctcttcggtgagcctcacagcattatgtccaagtcagatcgcgaagcggtccgagataacttcgactatgcagcttttggctgtggaatacgtgtccggcttgctgatgcagggtggttatataatcctgctaagttcaggaaagcttgcaaacacgtacgcgactgggctacgttctttgcttcgagagcatttgaatatcgggatcagcatggagaagaggccgcagctgagaaatatgcattcataatggacctttggaaagacacccagaacttcgatcttgtacgcgaccagctcttacatgtcctcgttgctggaagagattcgacggcgagcctgatatcgtggacattcttccatcttgttcggaaccccgacatgcttaagcggttgcaggatgagatctcgcatcttgccgtatatggagacatatctcgacaagaaatccaggagctctctttcttaaggtgttgtctcaacgagacgcttcgtctttacccatccctgcccatgaacattcgcttcgccaacaagacaaccgttctaccccgaggtggaggatcggatggcacgtctccagtaatgttacctgctggcacaggcattgcatactccgtatatcatcttcatcgaaaagaatcgatttatgggccagactcgagagtatatcgtccacaaaggtgggaagacggcgagctgattagaaaagcccgacctggtgctggctttatagacttccacggcggtccgaggcaatgtctgggtaaagatttcgcgttgatggaagcaagctacgcgataatcagagttctccagagataccccaaaatcagacttgcctcaggttgtccgaacgagcccgtaggagccgaaaagcagacatataccattggaataattccaaaagatggcgtgcatgtagtaatttcataa

SEQ ID NO: 26012 - protein, 532 aa, Muscodor strobelii
  misc_feature: SGI Peptide ID NO. 568886
  misc_feature (69)..(523): Pfam Id: PF00067 Pfam Desc: Cytochrome P450
  misc_feature (320)..(496): Pfam Id: PF00067 Pfam Desc: Cytochrome P450
  misc_feature (33)..(531): NCBI GI: 116200125 Blast Desc: CHGG_08218 [Chaetomium globosum CBS 148.51] gi|88179497|gb|EAQ86965.1| CHGG_08218 [Chaetomium globosum CBS 148.51]
  misc_feature (40)..(532): NCBI GI: 255943119 Blast Desc: Pc18g04990 [Penicillium chrysogenum Wisconsin 54-1255] gi|211587061|emb|CAP94723.1| Pc18g04990 [Penicillium chrysogenum Wisconsin 54-1255]
  misc_feature (53)..(531): NCBI GI: 119488606 Blast Desc: n-alkane-inducible cytochrome P450 [Neosartorya fischeri NRRL 181] gi|119410911|gb|EAW20856.1| n-alkane-inducible cytochrome P450 [Neosartorya fischeri NRRL 181]
  misc_feature (34)..(529): NCBI GI: 238843824 Blast Desc: n-alkane-inducible cytochrome P450 [Microsporum canis CBS 113480]
  misc_feature (55)..(531): NCBI GI: 159122944 Blast Desc: cytochrome P450 alkane hydroxylase, [Aspergillus fumigatus A1163]
  misc_feature (33)..(526): NCBI GI: 258574491 Blast Desc: UREG_00942 [Uncinocarpus reesii 1704] gi|237901693|gb|EEP76094.1| UREG_00942 [Uncinocarpus reesii 1704]
  misc_feature (55)..(531): NCBI GI: 70982576 Blast Desc: cytochrome P450 alkane hydroxylase [Aspergillus fumigatus Af293] gi|66844440|gb|EAL84778.1| cytochrome P450 alkane hydroxylase, [Aspergillus fumigatus Af293]
  misc_feature (61)..(532): NCBI GI: 126134585 Blast Desc: Cytochrome P450 52A13 (Alkane hydroxylase 2) (Alkane-inducible p450alk 2) (DH-ALK2) [Pichia stipitis CBS 6054] gi|126095966|gb|ABN65788.1| Cytochrome P450 52A13 (Alkane 2) 2)
  misc_feature (110)..(532): NCBI GI: 18203639 Blast Desc: CP52M_DEBHA RecName: Full=Cytochrome P450 52A13; AltName: Full=Alkane hydroxylase 2; AltName: Full=Alkane-inducible p450alk 2; AltName: Full=DH-ALK2 cytochrome
  misc_feature (76)..(532): NCBI GI: 199432970 Blast Desc: DEHA2E18634p [Debaryomyces hansenii]
  misc_feature (109)..(499): SWISSPROT Homolog: EC 1.6.2.4 NADPH--hemoprotein reductase
  misc_feature (109)..(499): SWISSPROT Homolog: EC 1.14.14.1 Unspecific monooxygenase
MKMRSNGDLHDNAFEVRAERLVSSFGSAQTLCFFICVVILYYYYYIKIESRKKMEAAIAGKNNCEPVLPFLPYKWPLALDLVKKQYDIFFSDHTFEGLTPFLDLADTGRIHLFGATGYFTTDPANVETILSTRFEDYSLGSRTIASSPLIGQGIFAQDGPAWKHSREIIRRQFVRVQKQTPQAFMPLVERLVDEISEAAVDGQVDLKPLMLEYTLATTTMLLFGEPHSIMSKSDREAVRDNFDYAAFGCGIRVRLADAGWLYNPAKFRKACKHVRDWATFFASRAFEYRDQHGEEAAAEKYAFIMDLWKDTQNFDLVRDQLLHVLVAGRDSTASLISWTFFHLVRNPDMLKRLQDEISHLAVYGDISRQEIQELSFLRCCLNETLRLYPSLPMNIRFANKTTVLPRGGGSDGTSPVMLPAGTGIAYSVYHLHRKESIYGPDSRVYRPQRWEDGELIRKARPGAGFIDFHGGPRQCLGKDFALMEASYAIIRVLQRYPKIRLASGCPNEPVGAEKQTYTIGIIPKDGVHVVIS

SEQ ID NO: 26013 - DNA, 570 bp, Muscodor strobelii
  misc_feature: SGI EST ID NO. CUFF.61369.0
  misc_feature: Variant of the nucleotide sequence at SEQ ID NO 26011
gcaaactcctcaggctttcatgcccctagttgagagactggtcgacgaaatttctgaagcggccgtcgacggccaggttgatctaaagccattgatgctcgaatatactcttgcaactaccactatgcttctcttcggtgagcctcacagcattatgtccaagtcagatcgcgaagcggtccgagataacttcgactatgcagcttttggctgtggaatacgtgtccggcttgctgatgcagggtggttatataatcctgctaagttcaggaaagcttgcaaacacgtacgcgactgggctacgttctttgcttcgagagcatttgaatatcgggatcagcatggagaagaggccgcagctgagaaatatgcattcataatggacctttggaaagacacccagaacttcgatcttgtacgcgaccagctcttacatgtcctcgttgctggaagagattcgacggcgagcctgatatcgtggacattcttccatcttgttcggaaccccgacatgcttaagcggttgcaggatgagatctcgcatcttgccgtatatggagacatatctcg

SEQ ID NO: 26014 - DNA, 987 bp, Muscodor strobelii
  misc_feature: SGI cDNA ID NO. 568887
  misc_feature: Elevated expression when VOC is produced
  misc_feature: Encodes the peptide sequence at SEQ ID NO 26015
atgagctatcacgaactagatctcaagatattggacgctttacctcagggtagtaaggtagtttccgtcatgcaacatggaagaacaaggtggtccgttggattgatggttgacgttgagatcggagatgagaaagccggcttctttctcaagatcatagagcgcagagattggacgtcaatggctcatgccgaattcgaggcacaaatcgccctagctgctatcatacccgacaatgttgttgttcccgtggcgtggggaatgtttgaaaacgatgtgaaggcctttctactaacgccgttccgtcgtttaaaggccacccctccgtcacctctagagctcgtgaaaatcatgaaaagattgcatcagggttccgtttcgccaactagcatgttcggatttcataccacaacatattggggacctcctgcgatgagaaacgattggactgatagctgggaacattacttcgctcgccaattcagatctgacgtcgcgtatactcagatggttcacggggaggacgctgaactgcagcaactgacagagagactagttgaaacagtggtcgttagactcctgagacctctccagacagatggtcggaacattaagccctctctttgccatggagacctctgggaccaaaacgtgcagtatgacgaggaaacaaaccaacttatcctctttgattcatgtgccttctacggacacaatgagattgatcttcaatccattggagattcacaatacgtactgggcatggattttgtagaaatgtacaaaaccgaagttggggcttcagagccgcaagaggacttctatgatcgtcacgatctgtacggcatccggaacgatcttgtggttgcttccatttgcccagaaaaatctgagctcatagctaaagctaaaggaactatgacccgcctcttgaagaagtttccaagtgggtatgaaggcttctttgatgatcgaggggcagtatag

SEQ ID NO: 26015 - protein, 328 aa, Muscodor strobelii
  misc_feature: SGI Peptide ID NO. 568887
  misc_feature (14)..(299): NCBI GI: 238503680 Blast Desc: conserved [Aspergillus flavus NRRL3357] gi|220690543|gb|EED46892.1| conserved [Aspergillus flavus NRRL3357]
  misc_feature (50)..(324): NCBI GI: 116182814 Blast Desc: CHGG_02035 [Chaetomium globosum CBS 148.51] gi|88186332|gb|EAQ93800.1| CHGG_02035 [Chaetomium globosum CBS 148.51]
  misc_feature (6)..(283): NCBI GI: 255946231 Blast Desc: Pc20g14050 [Penicillium chrysogenum Wisconsin 54-1255] gi|211588618|emb|CAP86734.1| Pc20g14050 [Penicillium chrysogenum Wisconsin 54-1255]
  misc_feature (5)..(314): NCBI GI: 240110347 Blast Desc: CPC735_063790 [Coccidioides posadasii C735 delta SOWgp]
  misc_feature (11)..(283): NCBI GI: 115385086 Blast Desc: conserved [Aspergillus terreus NIH2624] gi|114196782|gb|EAU38482.1| conserved [Aspergillus terreus NIH2624]
  misc_feature (6)..(283): NCBI GI: 145256231 Blast Desc: An10g00710 [Aspergillus niger CBS 513.88] gi|134078637|emb|CAK40510.1| protein product [Aspergillus niger]
  misc_feature (6)..(294): NCBI GI: 258563734 Blast Desc: [Uncinocarpus reesii 1704] gi|237908119|gb|EEP82520.1| [Uncinocarpus reesii 1704]
  misc_feature (5)..(314): NCBI GI: 119180471 Blast Desc: CIMG_08864 [Coccidioides immitis RS]
  misc_feature (61)..(321): NCBI GI: 119176150 Blast Desc: CIMG_09820 [Coccidioides immitis RS]
  misc_feature (6)..(247): NCBI GI: 46135869 Blast Desc: FG09450.1 [Gibberella zeae PH-1]
  misc_feature: Useful for introducing or modulating the production of volatile compounds
MSYHELDLKILDALPQGSKVVSVMQHGRTRWSVGLMVDVEIGDEKAGFFLKIIERRDWTSMAHAEFEAQIALAAIIPDNVVVPVAWGMFENDVKAFLLTPFRRLKATPPSPLELVKIMKRLHQGSVSPTSMFGFHTTTYWGPPAMRNDWTDSWEHYFARQFRSDVAYTQMVHGEDAELQQLTERLVETVVVRLLRPLQTDGRNIKPSLCHGDLWDQNVQYDEETNQLILFDSCAFYGHNEIDLQSIGDSQYVLGMDFVEMYKTEVGASEPQEDFYDRHDLYGIRNDLVVASICPEKSELIAKAKGTMTRLLKKFPSGYEGFFDDRGAV

SEQ ID NO: 26016 - DNA, 2059 bp, Muscodor strobelii
  misc_feature: SGI EST ID NO. CUFF.61375.0
  misc_feature: Variant of the nucleotide sequence at SEQ ID NO 26014
cgaacacgaagctgtaccggagtatttaaattgcaaggcgcttagccaatgcaaagggcgaaccaacgtgcattgtgatacattatcacactgccatatatgctctgagcgatacaaatgggaataataactcagatccgcccgagtctcttttcgacccaatccgactacattgacttcacgtggctccttgccagatcgccctctctgcactctctcttgttcgcacgtcttccagtctatgcatttctagatgttaatgttaataagcggaacagatttctaccctctcaatttgtgtcgctcgccaatatttcgaagttagagtatcagcatatagcggatcgatcggtgaacatatatctcttgctatcgagtgctcagcgcgtgtagaaatcccttgccgccgtactcgattgccactgttgttgagctcgacaaaccctacaagacaacaattagctgcgcacgttggcgagtatcgccgttcaattcattacctctcgagcaaacatgagctatcacgaactagatctcaagatattggacgctttacctcagggtagtaaggtagtttccgtcatgcaacatggaagaacaaggtggtccgttggattgatggttgacgttgagatcggagatgagaaagccggcttctttctcaagatcatagagcgcagagattggacgtcaatggctcatgccgaattcgaggcacaaatcgccctagctgctatcatacccgacaatgttgttgttcccgtggcgtggggaatgtttgaaaacgatgtgaaggcctttctactaacgccgttccgtcgtttaaaggccacccctccgtcacctctagagctcgtgaaaatcatgaaaagattgcatcagggttccgtttcgccaactagcatgttcggatttcataccacaacatattggggacctcctgcgatgagaaacgattggactgatagctgggaacattacttcgctcgccaattcagatctgacgtcgcgtatactcagatggttcacggggaggacgctgaactgcagcaactgacagagagactagttgaaacagtggtcgttagactcctgagacctctccagacagatggtcggaacattaagccctctctttgccatggagacctctgggaccaaaacgtgcagtatgacgaggaaacaaaccaacttatcctctttgattcatgtgccttctacggacacaatgagattgatcttcaatccattggagattcacaatacgtactgggcatggattttgtagaaatgtacaaaaccgaagttggggcttcagagccgcaagaggacttctatgatcgtcacgatctgtacggcatccggaacgatcttgtggttgcttccatttgcccagaaaaatctgagctcatagctaaagctaaaggaactatgacccgcctcttgaagaagtttccaagtgggtatgaaggcttctttgatgatcgaggggcagtatagttttgaagtcgttgtttgtatacctatagtcggcccttttcgctccataggctatgcacatcggcattctaaataacagacaattctaagttgtctgggactttggcttggctttttacaggagtttcggtagaactggtcggcgacattttcatcggaaaatcaactctgacggatttcaggcctcagaattaatgaaattgtttgtcgcaactacgctgggccctcttatatccatatttaagcctacctcagggtcagagcttgtatactatcatgatgtctgaagtgcgaagtcctaactagtaggatatcatattggaggacagcttggaaattttggattgtataagttcttatagagagtccaaggtcacagaaaggggttgcaaaaaattgcaaaagggcaatgcctcggttcgaaccggtgttctctgcactcagactctacctgaaacgtagtcgaaccgcgtttcaacctgactaacttgaccagaattgttggtggcctcggtggtcaccggcccatctgggaacgtcgaggggtagctagttattg

SEQ ID NO: 26017 - DNA, 1284 bp, Muscodor strobelii
  misc_feature: SGI cDNA ID NO. 568888
  misc_feature: Encodes the peptide sequence at SEQ ID NO 26018
atgacagtcgaaaagtacaagccggacgttgatggcgaggtgttccgtccgtcgtttccggatgcgagcccgtccgagcgtccgtatacaatgatctcctacggtctgccattcgaacaagcatgtaggaaacatgtcgatggattccttaaggcaaagcgggtctatatacttgcatccaaaggtcttgcagcaagttcgtcgtgccttgagagactggagagtgccctgggtgattcacacgttggcacatggaagggaattccacaacattcgccctacgacagtctcataccgatcctggatgaaatcaaagcccataatgtcgactgtattgtaacacttggaggcggcagtctcgccgatggcgcaaagctcctcgtttatgcagccgagaatggcgtcaccaatgttgacgacctgatcgcaatggagtcacacttcaaggacgaaatcacagacacagcgatggcaggtataggaaacgcccctaaaatctcactgattttcatgccgacgacactgtcaggtggtgagtactccaaattcgctggatgtacgaacccgcgcacccatatgaaggtccaattcacgcacccaggaatgtatgcgcgcctagtcgtcctcgatccagctttgagccgtaccacgcctgccttggtgtggctaagctccggtgttcgggctattgatcactgcgtcgagaatatttgtatacgcaacgcgagtccggagtctgatgctgtatgcgagaaaggccttaatcacctcgtgcccgcgctactgcagtgtgcaagggatcccgacaacctcgctccgcgtctcgaagcccaaatcggatgtaatcactcaatggccggcattgtggtgtgggggctgacggcaggcgcctctcatggcatcggacataatttagggccgcttggtgttggtcatgggcagacttcttgtgtcttgcttccggcggtgatgaaatataacgcgcgtgtgaacgacgagaagcaggatataatcaagaagatactctggtcggaggtagaagctgtgaaggtggtggagagacatggcttatccagggccgaaagtgatgttggcgatgcgttgcgagctatattcgatgagctgggcatgccgcgaagtctgattgatgtgggtgtcggtagggacagttgggatcaactggcagagaacagcctccctgatttttgcctgaagtcgaatccgatctcaatcacgaccaaggagcaagttgtggatatcttgaatatgtgttcgggcgactag

SEQ ID NO: 26018 - protein, 427 aa, Muscodor strobelii
  misc_feature: SGI Peptide ID NO. 568888
  misc_feature (37)..(416): Pfam Id: PF00465 Pfam Desc: Iron-containing alcohol dehydrogenase
  misc_feature (13)..(423): NCBI GI: 67538128 Blast Desc: AN5234.2 [Aspergillus nidulans FGSC A4] gi|40743225|gb|EAA62415.1| AN5234.2 [Aspergillus nidulans FGSC A4] gi|259484695|tpe|CBF81137.1| TPA: Fe-containing alcohol FGSC
  misc_feature (13)..(426): NCBI GI: 156059400 Blast Desc: SS1G_03712 [Sclerotinia sclerotiorum 1980] gi|154701499|gb|EDO01238.1| SS1G_03712 [Sclerotinia sclerotiorum 1980]
  misc_feature (13)..(426): NCBI GI: 154310260 Blast Desc: BC1G_07050 [Botryotinia fuckeliana B05.10] gi|150851611|gb|EDN26804.1| BC1G_07050 [Botryotinia fuckeliana B05.10]
  misc_feature (13)..(423): NCBI GI: 169769054 Blast Desc: [Aspergillus oryzae RIB40] gi|238501484|ref|XP_002381976.1| Fe-containing alcohol dehydrogenase, [Aspergillus flavus NRRL3357] protein product
  misc_feature (14)..(423): NCBI GI: 242766777 Blast Desc: Fe-containing alcohol dehydrogenase, [Talaromyces stipitatus ATCC 10500] gi|218724434|gb|EED23851.1| Fe-containing alcohol dehydrogenase, [Talaromyces stipitatus ATCC 10500]
  misc_feature (13)..(426): NCBI GI: 212528306 Blast Desc: Fe-containing alcohol dehydrogenase, [Penicillium marneffei ATCC 18224] gi|210073708|gb|EEA27795.1| Fe-containing alcohol dehydrogenase, [Penicillium marneffei ATCC 18224]
  misc_feature (10)..(423): NCBI GI: 255935173 Blast Desc: Pc13g01680 [Penicillium chrysogenum Wisconsin 54-1255] gi|211583233|emb|CAP91237.1| Pc13g01680 [Penicillium chrysogenum Wisconsin 54-1255]
  misc_feature (13)..(423): NCBI GI: 121702427 Blast Desc: Fe-containing alcohol dehydrogenase, [Aspergillus clavatus NRRL 1] gi|119397621|gb|EAW08052.1| Fe-containing alcohol dehydrogenase, [Aspergillus clavatus NRRL 1]
  misc_feature (13)..(423): NCBI GI: 119496423 Blast Desc: Fe-containing alcohol dehydrogenase, [Neosartorya fischeri NRRL 181] gi|119413147|gb|EAW23088.1| Fe-containing alcohol dehydrogenase, [Neosartorya fischeri NRRL 181]
  misc_feature (13)..(423): NCBI GI: 159130903 Blast Desc: Fe-containing alcohol dehydrogenase, [Aspergillus fumigatus A1163]
  misc_feature (53)..(421): SWISSPROT Homolog: EC 1.1.1.1 Alcohol dehydrogenase
MTVEKYKPDVDGEVFRPSFPDASPSERPYTMISYGLPFEQACRKHVDGFLKAKRVYILASKGLAASSSCLERLESALGDSHVGTWKGIPQHSPYDSLIPILDEIKAHNVDCIVTLGGGSLADGAKLLVYAAENGVTNVDDLIAMESHFKDEITDTAMAGIGNAPKISLIFMPTTLSGGEYSKFAGCTNPRTHMKVQFTHPGMYARLVVLDPALSRTTPALVWLSSGVRAIDHCVENICIRNASPESDAVCEKGLNHLVPALLQCARDPDNLAPRLEAQIGCNHSMAGIVVWGLTAGASHGIGHNLGPLGVGHGQTSCVLLPAVMKYNARVNDEKQDIIKKILWSEVEAVKVVERHGLSRAESDVGDALRAIFDELGMPRSLIDVGVGRDSWDQLAENSLPDFCLKSNPISITTKEQVVDILNMCSGD

SEQ ID NO: 26019 - DNA, 912 bp, Muscodor strobelii
  misc_feature: SGI cDNA ID NO. 568889
  misc_feature: Encodes the peptide sequence at SEQ ID NO 26020
atggcggtcatcaaagatctaccctgcgagttgatcgtaatgatcctgcttatgcttgacaacatcaagtcacttctccctgcaattcttgccagccgacatttctatgaagcatacaaggcatgtcctagcttggccttcaacattctgcagcgacaagttggctcggatttactaccctattcgattggaatatcgaaagcaagttgttgctcgatgcccacaagatacagaagctacatgattgtcgacggcctgcttgatgcagtcttcaacaaatccgaagccttgacgtgtgctgcacgcgaataccctttgggacgtatgatcaagatgggacatatgcatgacctgatcaagaatttcgcacgaagattctcatccgatgcttggtctctcgtacatcggggccgagcagacgatgtggtactctctgccgcagagcaacatcgtttctacaagactttttaccgcgttgagctattcctagaaatccgccggcggacagatgcattatgttggaattacgaagaacaggtcgaggcattcttctccagatttccgccttgggtgaatgaacaactcgcctgcgtttgcgattactacgagagaaggctttccgagtcgtgccgtgacgttcttgatctactagacggtgacgtggagctcatgaaaatatctaaggatatctttggcgactatgcaacagaagatgatgcgccgatgcaagcctggagtaaaattcttgagggcgttggagtctctaggcaggcactgaagcatttgcgcgtcccggcaaaatggttcaacaagctcagtacagatacagaataccagagcggtactgatggcggaagtgaggcgaatatgatcggcgctgaaagggatgatcaactgtttggggtttcataa

SEQ ID NO: 26020 - protein, 303 aa, Muscodor strobelii
  misc_feature: SGI Peptide ID NO. 568889
  misc_feature (7)..(206): NCBI GI: 240109431 Blast Desc: CPC735_029360 [Coccidioides posadasii C735 delta SOWgp]
  misc_feature (7)..(229): NCBI GI: 119182895 Blast Desc: [Coccidioides immitis RS]
  misc_feature (4)..(209): NCBI GI: 258571307 Blast Desc: [Uncinocarpus reesii 1704] gi|237904727|gb|EEP79128.1| [Uncinocarpus reesii 1704]
  misc_feature (78)..(208): NCBI GI: 238841616 Blast Desc: conserved [Microsporum canis CBS 113480]
  misc_feature (7)..(223): NCBI GI: 159123500 Blast Desc: AFUB_080550 [Aspergillus fumigatus A1163]
  misc_feature (7)..(223): NCBI GI: 70983990 Blast Desc: AFUA_8G07220 [Aspergillus fumigatus Af293] gi|66845146|gb|EAL85482.1| AFUA_8G07220 [Aspergillus fumigatus Af293]
  misc_feature (7)..(201): NCBI GI: 238845280 Blast Desc: conserved [Microsporum canis CBS 113480]
  misc_feature (7)..(220): NCBI GI: 258567816 Blast Desc: [Uncinocarpus reesii 1704] gi|237906098|gb|EEP80499.1| [Uncinocarpus reesii 1704]
  misc_feature (7)..(223): NCBI GI: 119485841 Blast Desc: NFIA_100030 [Neosartorya fischeri NRRL 181] gi|119410419|gb|EAW20366.1| conserved [Neosartorya fischeri NRRL 181]
  misc_feature (7)..(207): NCBI GI: 115442874 Blast Desc: [Aspergillus terreus NIH2624] gi|114188113|gb|EAU29813.1| [Aspergillus terreus NIH2624]
MAVIKDLPCELIVMILLMLDNIKSLLPAILASRHFYEAYKACPSLAFNILQRQVGSDLLPYSIGISKASCCSMPTRYRSYMIVDGLLDAVFNKSEALTCAAREYPLGRMIKMGHMHDLIKNFARRFSSDAWSLVHRGRADDVVLSAAEQHRFYKTFYRVELFLEIRRRTDALCWNYEEQVEAFFSRFPPWVNEQLACVCDYYERRLSESCRDVLDLLDGDVELMKISKDIFGDYATEDDAPMQAWSKILEGVGVSRQALKHLRVPAKWFNKLSTDTEYQSGTDGGSEANMIGAERDDQLFGVS

SEQ ID NO: 26021 - DNA, 1053 bp, Muscodor strobelii
  misc_feature: SGI cDNA ID NO. 568890
  misc_feature: Encodes the peptide sequence at SEQ ID NO 26022
atggctgaacctgcgaccgcacctgcgtctccgccggagtcagggtccgcatctgctacttggcgggactcatcaaattggcgaacccgtgaagccggctctgccccagcgcaaagagcgcctaggttcaacactggtcgatattccaactcaggcaattcaggcaattcaggcaactcatggcgggatcgcgaaaagagggacacggagaatggtgagagcgctgacggtagtggtactcgtcgtgttgaatcctcagatttcgtctccaaaagccggccatatgaccggtcaaggacaaacagaccggctcagaaagatgaggagggtgccgcgaaggccatcgaagagggacgacgcatttatattggcaatttacgatattctgccaagccagacgacatagaagatctgctcaaagctaatgatcttggtcacttcaacaacattcacatttccatcgatccgttcactggccgcaaccccagctactgtttcgtggagtttcccgatgccgaatcggccaaaacagcaatgggaatactagaaggcaaggatcttctgggaagagaagtgaaatgtcgcccatgccagccgaaaggtagcgggagcggtgggaagccaggcgatgccccaactcgctggggtcagtgggagaaagaagatggcaatggccaaggaaggcaacattctgcgtcgttcgaccggtatcgacaagactttacaggaaagcgtctctacgtagggggtctgcctagaatgcacgaccaagctaccaactttgccgaaattacggagttgttcaaagacttcaagctcgaggcaatcagcaagcgcatctctgcacacgaaagcattcgcgagaaatcgggcaaccatgacttctgtttcgtcgactttgcaaccacggaggacgcaaagaccgcactagaaacgatgaacggcacaatgttccaaggcgaacccttgaaggttagtaccgcgaagggtcgatctaacaagtggcaggaaagggatgatcttaacaataagcaaggcgttaatcaggactga

SEQ ID NO: 26022 - protein, 350 aa, Muscodor strobelii
  misc_feature: SGI Peptide ID NO. 568890
  misc_feature (121)..(194): Pfam Id: PF00076 Pfam Desc: RNA recognition motif. (a.k.a. RRM, RBD, or RNP domain)
  misc_feature (246)..(325): Pfam Id: PF00076 Pfam Desc: RNA recognition motif. (a.k.a. RRM, RBD, or RNP domain)
  misc_feature (287)..(325): Pfam Id: PF00076 Pfam Desc: RNA recognition motif. (a.k.a. RRM, RBD, or RNP domain)
  misc_feature (113)..(329): NCBI GI: 46107754 Blast Desc: FG00760.1 [Gibberella zeae PH-1]
  misc_feature (33)..(339): NCBI GI: 240111461 Blast Desc: RNA recognition motif containing protein [Coccidioides posadasii C735 delta SOWgp]
  misc_feature (111)..(345): NCBI GI: 261196924 Blast Desc: ribonucleoprotein [Ajellomyces dermatitidis SLH14081] gi|239596110|gb|EEQ78691.1| ribonucleoprotein [Ajellomyces dermatitidis SLH14081] gi|239609696|gb|EEQ86683.1| [Ajellomyces
  misc_feature (5)..(345): NCBI GI: 225562656 Blast Desc: conserved [Ajellomyces capsulatus G186AR]
  misc_feature (113)..(339): NCBI GI: 225680495 Blast Desc: conserved [Paracoccidioides brasiliensis Pb03]
  misc_feature (114)..(332): NCBI GI: 85113551 Blast Desc: NCU00707 [Neurospora crassa OR74A] gi|28926327|gb|EAA35305.1| [Neurospora crassa OR74A]
  misc_feature (11)..(345): NCBI GI: 154279630 Blast Desc: [Ajellomyces capsulatus NAm1] gi|150412571|gb|EDN07958.1| [Ajellomyces capsulatus NAm1]
  misc_feature (113)..(339): NCBI GI: 226280835 Blast Desc: conserved [Paracoccidioides brasiliensis Pb01]
  misc_feature (114)..(345): NCBI GI: 240279464 Blast Desc: ribonucleoprotein [Ajellomyces capsulatus H143]
  misc_feature (84)..(333): NCBI GI: 115399880 Blast Desc: [Aspergillus terreus NIH2624] gi|114191195|gb|EAU32895.1| [Aspergillus terreus NIH2624]
MAEPATAPASPPESGSASATWRDSSNWRTREAGSAPAQRAPRFNTGRYSNSGNSGNSGNSWRDREKRDTENGESADGSGTRRVESSDFVSKSRPYDRSRTNRPAQKDEEGAAKAIEEGRRIYIGNLRYSAKPDDIEDLLKANDLGHFNNIHISIDPFTGRNPSYCFVEFPDAESAKTAMGILEGKDLLGREVKCRPCQPKGSGSGGKPGDAPTRWGQWEKEDGNGQGRQHSASFDRYRQDFTGKRLYVGGLPRMHDQATNFAEITELFKDFKLEAISKRISAHESIREKSGNHDFCFVDFATTEDAKTALETMNGTMFQGEPLKVSTAKGRSNKWQERDDLNNKQGVNQD

SEQ ID NO: 26023 - DNA, 1224 bp, Muscodor strobelii
  misc_feature: SGI EST ID NO. CUFF.61394.0
  misc_feature: Variant of the nucleotide sequence at SEQ ID NO 26021
cgccgacctgtagattcaaaatggctgaacctgcgaccgcacctgcgtctccgccggagtcagggtccgcatctgctacttggcgggactcatcaaattggcgaacccgtgaagccggctctgccccagcgcaaagagcgcctaggttcaacactggtcgatattccaactcaggcaattcaggcaattcaggcaactcatggcgggatcgcgaaaagagggacacggagaatggtgagagcgctgacggtagtggtactcgtcgtgttgaatcctcagatttcgtctccaaaagccggccatatgaccggtcaaggacaaacagaccggctcagaaagatgaggagggtgccgcgaaggccatcgaagagggacgacgcatttatattggcaatttacgatattctgccaagccagacgacatagaagatctgctcaaagctaatgatcttggtcacttcaacaacattcacatttccatcgatccgttcactggccgcaaccccagctactgtttcgtggagtttcccgatgccgaatcggccaaaacagcaatgggaatactagaaggcaaggatcttctgggaagagaagtgaaatgtcgcccatgccagccgaaaggtagcgggagcggtgggaagccaggcgatgccccaactcgctggggtcagtgggagaaagaagatggcaatggccaaggaaggcaacattctgcgtcgttcgaccggtatcgacaagactttacaggaaagcgtctctacgtagggggtctgcctagaatgcacgaccaagctaccaactttgccgaaattacggagttgttcaaagacttcaagctcgaggcaatcagcaagcgcatctctgcacacgaaagcattcgcgagaaatcgggcaaccatgacttctgtttcgtcgactttgcaaccacggaggacgcaaagaccgcactagaaacgatgaacggcacaatgttccaaggcgaacccttgaaggttagtaccgcgaagggtcgatctaacaagtggcaggaaagggatgatcttaacaataagcaaggcgttaatcaggactgaagtgaaggctgatgagaatccgcgtcacatggctttcaagggaggcaaatatctgtgtacaattgacgctcagtttacaggccgtgatagcatgaaaacttaggtacgttagatacaggcatccatttattacacaaaaagcaaaaacggt

SEQ ID NO: 26024 - DNA, 1275 bp, Muscodor strobelii
  misc_feature: SGI cDNA ID NO. 568891
  misc_feature: Encodes the peptide sequence at SEQ ID NO 26025
atggcttcccgtgacctgcacaacgtcagagaggtcacacggtctcccacgccagacccttcgagcatagccaatctgacctttgtcaccgtccctgagaatctcatgagtggttctacgtctcaagggcagtcttcacgccgaccattgcgtgcagaggagccttccagatcaacatccactgctgttgatgacgacatggagatacagccggttgtagaccgtcgtccaaagacaccccaacagggagatcagcctgtgcttggagcacagcaaacctttgcccgatcacaggaacaagcacagcagcagcaggctgaggcgcactccagcaattggagccgtttcaaggaatatgttcgaaatattcgtggatcgggcctcccgccttggccattccccttcacgaaggtaccatatgtatttctcctcctatcattccgtttcgtgatggtttattttgcaagcgtcgccgtggcgtggtcggccaagttgatggcacaccagcggattggcaaccctccctgggccaccagtaccatcatgtatctcagcattgtcactattgtctacagcctcttgcactgggtttttgttgcgacgcaatggaagcagcgagtcttccatgtcttctatggtcctctcgaccttgcggcttgtgtgttatacactggtacttccgtgttatacagcgcatcacttaataatcacaggggctggagatgccagtcaacagcgccacactatgtcgagtcgaggctcagagataaatatctgaacggtggatgcaatcccgtcaatgtcaatgccacactcgacagctgctcgacagcagtggatctgcagggtgaagatttgacacctgagcgttgtgagttagcggaggtactcatgtgggttactgttggattggctgcggctacattcattattagcacggtctcgatatatttctggactatagactacgacaaggcaagggatgaatgcattaggcttgccgtggcaaatgcagacctggaagcagcccgaaggcaagaacagccacccccgcagaatccaccctcccagaacccaccaggccagaatatacaacttaatgatctccgaaatcctgagccacggtcggcgattgagacaatggatcagatagaagaggaggcagagcgaacgcgcgctcaacgacggcaagaccagatacgagaagcagatcgatcgaggcgacgactagctgagcaagcaattggacttggacgagggacggcacaggtatag

SEQ ID NO: 26025 - protein, 424 aa, Muscodor strobelii
  misc_feature: SGI Peptide ID NO. 568891
MASRDLHNVREVTRSPTPDPSSIANLTFVTVPENLMSGSTSQGQSSRRPLRAEEPSRSTSTAVDDDMEIQPVVDRRPKTPQQGDQPVLGAQQTFARSQEQAQQQQAEAHSSNWSRFKEYVRNIRGSGLPPWPFPFTKVPYVFLLLSFRFVMVYFASVAVAWSAKLMAHQRIGNPPWATSTIMYLSIVTIVYSLLHWVFVATQWKQRVFHVFYGPLDLAACVLYTGTSVLYSASLNNHRGWRCQSTAPHYVESRLRDKYLNGGCNPVNVNATLDSCSTAVDLQGEDLTPERCELAEVLMWVTVGLAAATFIISTVSIYFWTIDYDKARDECIRLAVANADLEAARRQEQPPPQNPPSQNPPGQNIQLNDLRNPEPRSAIETMDQIEEEAERTRAQRRQDQIREADRSRRRLAEQAIGLGRGTAQV

SEQ ID NO: 26026 - DNA, 495 bp, Muscodor strobelii
  misc_feature: SGI cDNA ID NO. 568892
  misc_feature: Encodes the peptide sequence at SEQ ID NO 26027
atggcttctacatcacaaatgtctatgccatcctcattcccaggcatcaatcatctaaagctgccctgcttctctctgcgcaaaagccgagaattctatacccagatctttccattcaagcacatagagaagtacaaccattacacacccgaccacaagcttttcgcacagatggttagccatgaacccactggtcttataatagaattccgctacctgcctgagcaggcggaggcgcaaaaaggctgggatccaatcacgtggggtgttgggacgcgacgcgatctcgaagaatggactcagtggttccaggtgcatggtgtaaagcacagcaagatctttacaggtatcaaaggctgggtgatgggatgcgaggatcctgacgggaggatcgtgagattgtacgtcaatgatgaggagcatgagtggactgatcatcctgaccaagatgagtactggctgggaactatacgaggagaccccgaggaggagtag

SEQ ID NO: 26027 - protein, 164 aa, Muscodor strobelii
  misc_feature: SGI Peptide ID NO. 568892
  misc_feature (15)..(134): Pfam Id: PF00903 Pfam Desc: Glyoxalase/Bleomycin resistance protein/Dioxygenase superfamily
  misc_feature (8)..(154): NCBI GI: 212536891 Blast Desc: PMAA_090630 [Penicillium marneffei ATCC 18224] gi|210068343|gb|EEA22434.1| PMAA_090630 [Penicillium marneffei ATCC 18224]
  misc_feature (11)..(135): NCBI GI: 271967054 Blast Desc: Sros_5759 [Streptosporangium roseum DSM 43021] gi|270510229|gb|ACZ88507.1| conserved [Streptosporangium roseum DSM 43021]
  misc_feature (9)..(137): NCBI GI: 158317387 Blast Desc: glyoxalase/bleomycin resistance protein/dioxygenase [Frankia sp. EAN1pec] gi|158112792|gb|ABW14989.1| Glyoxalase/bleomycin resistance protein/dioxygenase [Frankia sp.
  misc_feature (9)..(138): NCBI GI: 271967607 Blast Desc: Sros_6339 [Streptosporangium roseum DSM 43021] gi|270510782|gb|ACZ89060.1| conserved [Streptosporangium roseum DSM 43021]
  misc_feature (9)..(145): NCBI GI: 256666578 Blast Desc: glyoxalase/bleomycin resistance protein/dioxygenase [Streptomyces sp. AA4]
  misc_feature (13)..(135): NCBI GI: 256393776 Blast Desc: Glyoxalase/bleomycin resistance protein/dioxygenase [Catenulispora acidiphila DSM 44928] gi|256360002|gb|ACU73499.1| Glyoxalase/bleomycin resistance protein/dioxygenase acidiphila
  misc_feature (11)..(138): NCBI GI: 72161312 Blast Desc: Tfu_0908 [Thermobifida fusca YX] gi|71915044|gb|AAZ54946.1| Tfu_0908 [Thermobifida fusca YX]
  misc_feature (1)..(139): NCBI GI: 258650867 Blast Desc: Glyoxalase/bleomycin resistance protein/dioxygenase [Nakamurella multipartita DSM 44233] gi|258554092|gb|ACV77034.1| Glyoxalase/bleomycin resistance protein/dioxygenase [Nakamurella
  misc_feature (13)..(138): NCBI GI: 262203134 Blast Desc: Glyoxalase/bleomycin resistance protein/dioxygenase [Gordonia bronchialis DSM 43247] gi|262086481|gb|ACY22449.1| Glyoxalase/bleomycin resistance protein/dioxygenase [Gordonia DSM
MASTSQMSMPSSFPGINHLKLPCFSLRKSREFYTQIFPFKHIEKYNHYTPDHKLFAQMVSHEPTGLIIEFRYLPEQAEAQKGWDPITWGVGTRRDLEEWTQWFQVHGVKHSKIFTGIKGWVMGCEDPDGRIVRLYVNDEEHEWTDHPDQDEYWLGTIRGDPEEE

SEQ ID NO: 26028 - DNA, 756 bp, Muscodor strobelii
  misc_feature: SGI EST ID NO. CUFF.61414.0
  misc_feature: Variant of the nucleotide sequence at SEQ ID NO 26026
cgtaactcgcctctattcacgaacgtcgtatccgttctctttagtctgttccattcctctgctgcatttctaaagtcgcgagtgggcgccctatttgagaaagaagctctgcccaagtctcttattttcgccaattcacaagcagcaggcgtgcaccagtcttatagatattccgagatggcttctacatcacaaatgtctatgccatcctcattcccaggcatcaatcatctaaagctgccctgcttctctctgcgcaaaagccgagaattctatacccagatctttccattcaagcacatagagaagtacaaccattacacacccgaccacaagcttttcgcacagatggttagccatgaacccactggtcttataatagaattccgctacctgcctgagcaggcggaggcgcaaaaaggctgggatccaatcacgtggggtgttgggacgcgacgcgatctcgaagaatggactcagtggttccaggtgcatggtgtaaagcacagcaagatctttacaggtatcaaaggctgggtgatgggatgcgaggatcctgacgggaggatcgtgagattgtacgtcaatgatgaggagcatgagtggactgatcatcctgaccaagatgagtactggctgggaactatacgaggagaccccgaggaggagtagttaggtcagagaggctagatccgatttaccttagcgttatttgctgaaacttaagctagatgtctatctggagcaataaatttc

SEQ ID NO: 26029 - DNA, 1170 bp, Muscodor strobelii
  misc_feature: SGI cDNA ID NO. 568893
  misc_feature: Encodes the peptide sequence at SEQ ID NO 26030
atggcttcctcacctaagctcatcagcgcatctgatgagtctggtgtgctttgcacctacgacgaggacagcaaggccaaaccgaagcgtcgcagctacctgcgcgaggtccttgatgtcttcttgcctgctggctatccccataccgtcaccccggactacacgccttaccagatctacgactcactccaggccttttctagcacaatcgccggactgttgtcgtcacgagcagtactccagggtttcggcgtaggcgatgccgcctcaaccgccacaggcgcggtgcttctcaccgtacttcaggagtccacaggtcgcctagccactattctcttcgcccaccgactcggccaggccattgagcccgagtgcaagttctaccgcttcctcgccgacatcttcaacgacacgtccatgatcctcgacattctgtcgcccactctccccggccccgccaaggtcaccgccctctgcgcctcaggcgttcttaaggccctgtgcggcgtctcaggagcatccgccaaagcaagtctcagcgctcacttcgccaagtcaggcaacctcgcagaactcaatgcgaaagacggcagtcaggagacggtcatcagcctgatgggcatgctagtcggcagcgtattcctacgcttcgtccaaggtcgtctcgcagtctggatctggactctcgctctccttggcatccacctctggaccaactaccaagccgtccgctcggtccagatgcgcacgatcaaccgccagcgcgccaagttgatctacgacgaattcttcacccacgatcgcatcctacgcccggacgaagtcgctgagcgagagggcatcttattcggccgaaacgctatgaacgaggtccggtttgcgcgcagagcccccctcgccggagagatcaaggatcatgagctggaggattacgacaagaagatgtatgttatctcgtgggttgacaaaagcggcgagaccatctatctcaaggaaggtgccacgccgcgtgatgcactgctggcttggtttgagccgctctctccgtattacacgtgcgatcgtgtcgataacccagatgagttcttcctagctctcaagagtgctggctgggatctggacaccaatgcccttgagactggtcctgctgtcagaattcgcgttgagtga

SEQ ID NO: 26030 - protein, 389 aa, Muscodor strobelii
  misc_feature: SGI Peptide ID NO. 568893
  misc_feature (17)..(386): Pfam Id: PF04884 Pfam Desc: Domain of function, DUF647
  misc_feature (17)..(304): Pfam Id: PF04884 Pfam Desc: Domain of function, DUF647
  misc_feature (16)..(387): NCBI GI: 116205700 Blast Desc: CHGG_02143 [Chaetomium globosum CBS 148.51] gi|88182740|gb|EAQ90208.1| CHGG_02143 [Chaetomium globosum CBS 148.51]
  misc_feature (3)..(388): NCBI GI: 171678219 Blast Desc: protein product [Podospora anserina] gi|170937179|emb|CAP61836.1| protein product [Podospora anserina]
  misc_feature (32)..(267): NCBI GI: 259484769 Blast Desc: TPA: DUF647 domain protein (AFU_orthologue; AFUA_6G06850) [Aspergillus nidulans FGSC A4]
  misc_feature (12)..(386): NCBI GI: 145607998 Blast Desc: MGG_09749 [Magnaporthe grisea 70-15] gi|145015470|gb|EDK00007.1| MGG_09749 [Magnaporthe grisea 70-15]
  misc_feature (16)..(388): NCBI GI: 164423593 Blast Desc: NCU11380 [Neurospora crassa OR74A] gi|157070159|gb|EDO64976.1| conserved [Neurospora crassa OR74A]
  misc_feature (38)..(267): NCBI GI: 238488016 Blast Desc: DUF647 domain protein [Aspergillus flavus NRRL3357] gi|220700125|gb|EED56464.1| DUF647 domain protein [Aspergillus flavus NRRL3357]
  misc_feature (32)..(388): NCBI GI: 225683629 Blast Desc: DUF647 domain-containing protein [Paracoccidioides brasiliensis Pb03]
  misc_feature (39)..(388): NCBI GI: 239610850 Blast Desc: DUF647 domain-containing protein [Ajellomyces dermatitidis ER-3]
  misc_feature (39)..(388): NCBI GI: 261206350 Blast Desc: DUF647 domain-containing protein [Ajellomyces dermatitidis SLH14081] gi|239592971|gb|EEQ75552.1| DUF647 domain-containing protein [Ajellomyces dermatitidis SLH14081]
  misc_feature (61)..(388): NCBI GI: 240108001 Blast Desc: CPC735_003440 [Coccidioides posadasii C735 delta SOWgp]
MASSPKLISASDESGVLCTYDEDSKAKPKRRSYLREVLDVFLPAGYPHTVTPDYTPYQIYDSLQAFSSTIAGLLSSRAVLQGFGVGDAASTATGAVLLTVLQESTGRLATILFAHRLGQAIEPECKFYRFLADIFNDTSMILDILSPTLPGPAKVTALCASGVLKALCGVSGASAKASLSAHFAKSGNLAELNAKDGSQETVISLMGMLVGSVFLRFVQGRLAVWIWTLALLGIHLWTNYQAVRSVQMRTINRQRAKLIYDEFFTHDRILRPDEVAEREGILFGRNAMNEVRFARRAPLAGEIKDHELEDYDKKMYVISWVDKSGETIYLKEGATPRDALLAWFEPLSPYYTCDRVDNPDEFFLALKSAGWDLDTNALETGPAVRIRVE

SEQ ID NO: 26031 - DNA, 4983 bp, Muscodor strobelii
  misc_feature: SGI EST ID NO. CUFF.61629.0
  misc_feature: Variant of the nucleotide sequence at SEQ ID NO 26029
ctggcatcaggtctctcagtgagctgcacgccgtagtggggtaatcgtggggtacctactgcgttgcactcaacaccaacacattgtacacttcagatgcagtcgcaaaccatccacaaaaccacatcaacccttcttcgccatactgagggtatgagaagtcaagatggcttcctcacctaagctcatcagcgcatctgatgagtctggtgtgctttgcacctacgacgaggacagcaaggccaaaccgaagcgtcgcagctacctgcgcgaggtccttgatgtcttcttgcctgctggctatccccataccgtcaccccggactacacgccttaccagatctacgactcactccaggccttttctagcacaatcgccggactgttgtcgtcacgagcagtactccagggtttcggcgtaggcgatgccgcctcaaccgccacaggcgcggtgcttctcaccgtacttcaggagtccacaggtcgcctagccactattctcttcgcccaccgactcggccaggccattgagcccgagtgcaagttctaccgcttcctcgccgacatcttcaacgacacgtccatgatcctcgacattctgtcgcccactctccccggccccgccaaggtcaccgccctctgcgcctcaggcgttcttaaggccctgtgcggcgtctcaggagcatccgccaaagcaagtctcagcgctcacttcgccaagtcaggcaacctcgcagaactcaatgcgaaagacggcagtcaggagacggtcatcagcctgatgggcatgctagtcggcagcgtattcctacgcttcgtccaaggtcgtctcgcagtctggatctggactctcgctctccttggcatccacctctggaccaactaccaagccgtccgctcggtccagatgcgcacgatcaaccgccagcgcgccaagttgatctacgacgaattcttcacccacgatcgcatcctacgcccggacgaagtcgctgagcgagagggcatcttattcggccgaaacgctatgaacgaggtccggtttgcgcgcagagcccccctcgccggagagatcaaggatcatgagctggaggattacgacaagaagatgtatgttatctcgtgggttgacaaaagcggcgagaccatctatctcaaggaaggtgccacgccgcgtgatgcactgctggcttggtttgagccgctctctccgtattacacgtgcgatcgtgtcgataacccagatgagttcttcctagctctcaagagtgctggctgggatctggacaccaatgcccttgagactggtcctgctgtcagaattcgcgttgagtgaaggatttcaaggcgtgttgcaagagctggagacaagggctgagcaacgcattgtcagggtcaggacatgagctgagaaaatctgaggagcattctgctacctgagttgactgtgcggagtggcatatacacagcaatctgtgtcaggcaaaaaacactggatcggaacggaaaataagaaggggaaaatggcgattgcaattcaatttgcttgtagagtagatgcacaagatccacacgagactagtgtgcgacatagacgcgatgccctcatgatataccagaaacgccatgccttcccataccttctcgatgtataatgcatgctctccggggtcttgtgatgtgctccgcgtgatacattagttgtacaagtttcttcttacacttttccactcaccacttactcacacacctcgtatgtcacatatccctatccctcactacccgacttcaagccgggcctttccccatcaaaaataatcctcaatccccaagaacttaacagtccgcatcttgacgccctcccaggaattaagtttcggtcggacatcgaggtaaaaactcaatttcccatcaggcgatcccttacgtccggcgtagaagtcgataacgtactcgacttccttgccgcaccggtcgacgacccagtcgtgtcggtcgaagggcgcttggtagccgagcatcgtgtttattcgcgcctttggggacatttgcgaggagaggccggagaaagagtggaggcgtggtgtgtcgcaactgtgggtgttattagcgacgtgattttggcagaaggagaggtagacagtagagggttggtgtatggggaagatttagagggagaaagacgtacgcagaacccctcaaccatggtttctcccactccttgatctctgcccaagctcgctcgttcacggcgttgtggatcggtacgacggtccgcatatctgttgcttctggatcgtggcccttgcgcttcatggcgtcgaagaacatgcgctccgagggatatatccagttccccgtcgctttgtccgcgcctgtctcctgctcgttgttggcgggcgcatgggatgcggtgtaagtgctagcttttatctcggggtcggtggtgggtatgttggcggttcgggggatggtggatatttcgcgggatgtgtcaaggcctgtttttggcgctgggggagtctggggagaggaggtgaaggggaggcggaggtaggatgtccatgatgatgtagagggctgtgttgatggcgttgatgtggttgtggagggttgtgatgatgcgccgcgcgcttgttgcatccagacttctcgcgctccgtggtcgactgggcatgcgtctgcgtttgcgctggttgtcttgtctatcgttggatgcgacgacggtaagcttgttgctgtcgcatttgattctgctgaagcggcgcgggctttctcaagccaagcctcgcgactcttgtggtcgaccgggcatttgtcctcggcttttagatcgctggatgacatggtgtttcgagtatgaggatgtgaagggagggcggcggagtgagggtggtggtggttaaggaatatctgatcaattagatcttgcaacatggtgaagtcgggtccatcgaaattcctctatatcaaattcctagttgatgacgatagcttagcttcggatcgcgagctggacggtgcggctttcgtggtggagttcgtcgatgccatttaacatttctcgactttgctggtttggaaactttactggggcgccagggcgcatcgacttcagggtcttttgcagggtagccgggccgaactccctatttgggggcatgagtacatcgccttttgaaggaaggggagcttgagtgttactatgtgtatatctttgtcctttactctttccgatcctgaaatcgaatagggttactacatgtattccctctatcccgccattgataatgtactgcaatgacacctagagtcagtgaacaatgcacagtcgcaagatcttgagccatgcagtatgtgatggaatccgctttatgtgtcatttccaatatgtggtgtaaaacatctatctagccgctcattcaaatcatttcccatatccttttcccttatgccaaatgttgatccgtcttgacgggtccctcgcctacacctgtctgtatgactcggctgattccacccttgagcaaaccagccacaccctcgtctagctgcacaccagtcgtgaacgacttggcctcgtccttccagccatcagtgctcgacaacaggctgtagaaagtgcccacaaccgttgccttgtcctcctccaggtagtacacaaccgcgttcgggccggcatcgaatgtgtaagcggcaatggtcttgccagcggcggcgttgatagcttcaacggcacgaacggcggctcgagaaacgtcattcatgtagtagatgggagggtacgtatcggagcacgtggagtggaatgagttggagtccttcatggtgacctcggcgaacttggggaagtcacggacagcgatggcctcctccatgaggttcatgtgcttgggcaccaccgtctcgatacggcgctggaacatgtccgaggtggccaccgtttgctgcatgcccgaggtcgagctgacacccttcttggcggccgacgcgacgaggacaagggcgcgcatctccggccagtgagatgcgggggcgacctggacggccttggagtcactgccatcagcctcagatcccatctgccatgcgacgtagccaccgaacagagagcggcaggccgagccacttccctggcgcgagatcaaggagagctcggtggggttgctgggaagctcgtagaggtcggcaatggcacggacgagggcggcaaaaccagctgcggacgaggcaagaccagcggcagtggggaagttgttctcagagactatgcgcagaggcatggtcgagagcttggggagggaggagtccttctgctcgagggcgtcgcgcagggtcctcagctcgcgcagacaggcctgggtgcgggcacccgagatgtcggagggggcaccattgagggtgagagagtcgccctcgacgccgtaggaggaagagcaggtggcggtggtgagggttcggagatcgtcctgggacagagtgacggagagagaagagttggtgggcaggttgagcttggcgtctcgcttgccccagtatttgacgacggcgatgttgacgggcgccgtcgtgctggcgcggtagattttgtcagccatgatggtttctggtaacaagttttcttgtttactttcggatagcagcacgggtgacggtcaggggcaacgagcagcaacagcaactacaagaacttggcaatggtgaattgagaacaggagaaaatgatgaaagcttcgtcacgtcgacagcagagcctgctcgtaataataataatgctagctgggcggtctagtcaggaacgcaagactgtatgtagtcagcaatcctggcgctgatatcgacatttggaaatgtcccgttggaggggttcaccatggcggggtcctctgctattctcactctttctagtggggatttgtcacttcgtaccgtttatttagagaccaactgctggtgctaggcccaaccaggtttggcccgcca

SEQ ID NO: 26032 - DNA, 945 bp, Muscodor strobelii
  misc_feature: SGI cDNA ID NO. 568894
  misc_feature: Reduced expression when VOC is produced
  misc_feature: Encodes the peptide sequence at SEQ ID NO 26033
atgtcatccagcgatctaaaagccgaggacaaatgcccggtcgaccacaagagtcgcgaggcttggcttgagaaagcccgcgccgcttcagcagaatcaaatgcgacagcaacaagcttaccgtcgtcgcatccaacgatagacaagacaaccagcgcaaacgcagacgcatgcccagtcgaccacggagcgcgagaagtctggatgcaacaagcgcgcggcgcatcatcacaaccctccacaaccacatcaacgccatcaacacagccctctacatcatcatggacatcctacctccgcctccccttcacctcctctccccagactcccccagcgccaaaaacaggccttgacacatcccgcgaaatatccaccatcccccgaaccgccaacatacccaccaccgaccccgagataaaagctagcacttacaccgcatcccatgcgcccgccaacaacgagcaggagacaggcgcggacaaagcgacggggaactggatatatccctcggagcgcatgttcttcgacgccatgaagcgcaagggccacgatccagaagcaacagatatgcggaccgtcgtaccgatccacaacgccgtgaacgagcgagcttgggcagagatcaaggagtgggagaaaccatggttgaggggttctgcttgcgacacaccacgcctccactctttctccggcctctcctcgcaaatgtccccaaaggcgcgaataaacacgatgctcggctaccaagcgcccttcgaccgacacgactgggtcgtcgaccggtgcggcaaggaagtcgagtacgttatcgacttctacgccggacgtaagggatcgcctgatgggaaattgagtttttacctcgatgtccgaccgaaacttaattcctgggagggcgtcaagatgcggactgttaagttcttggggattgaggattatttttga

SEQ ID NO: 26033 - protein, 314 aa, Muscodor strobelii
  misc_feature: SGI Peptide ID NO. 568894
  misc_feature (55)..(310): Pfam Id: PF01265 Pfam Desc: Cytochrome c/c1 heme lyase
  misc_feature (164)..(310): Pfam Id: PF01265 Pfam Desc: Cytochrome c/c1 heme lyase
  misc_feature (55)..(310): NCBI GI: 261354350 Blast Desc: cytochrome c1 heme lyase [Verticillium albo-atrum VaMs.102]
  misc_feature (30)..(310): NCBI GI: 116205698 Blast Desc: CHGG_02142 [Chaetomium globosum CBS 148.51] gi|88182739|gb|EAQ90207.1| CHGG_02142 [Chaetomium globosum CBS 148.51]
  misc_feature (2)..(309): NCBI GI: 145608000 Blast Desc: MGG_09748 [Magnaporthe grisea 70-15] gi|145015471|gb|EDK00008.1| MGG_09748 [Magnaporthe grisea 70-15]
  misc_feature (1)..(310): NCBI GI: 189196180 Blast Desc: cytochrome c1 heme lyase [Pyrenophora tritici-repentis Pt-1C-BFP] gi|187980307|gb|EDU46933.1| cytochrome c1 heme lyase [Pyrenophora tritici-repentis Pt-1C-BFP]
  misc_feature (56)..(310): NCBI GI: 171678221 Blast Desc: protein product [Podospora anserina] gi|170937180|emb|CAP61837.1| protein product [Podospora anserina]
  misc_feature (57)..(307): NCBI GI: 256720891 Blast Desc: [Nectria haematococca mpVI 77-13-4]
  misc_feature (8)..(310): NCBI GI: 164423591 Blast Desc: cytochrome C1 heme lyase [Neurospora crassa OR74A] gi|157070158|gb|EAA30209.2| cytochrome C1 heme lyase [Neurospora crassa OR74A]
  misc_feature (1)..(308): NCBI GI: 156059888 Blast Desc: SS1G_03957 [Sclerotinia sclerotiorum 1980] gi|154701743|gb|EDO01482.1| SS1G_03957 [Sclerotinia sclerotiorum 1980]
  misc_feature (10)..(307): NCBI GI: 46137813 Blast Desc: FG10422.1 [Gibberella zeae PH-1]
  misc_feature (1)..(310): NCBI GI: 169603646 Blast Desc: SNOG_04831 [Phaeosphaeria nodorum SN15] gi|111066102|gb|EAT87222.1| SNOG_04831 [Phaeosphaeria nodorum SN15]
  misc_feature: Useful for introducing or modulating the production of volatile compounds
MSSSDLKAEDKCPVDHKSREAWLEKARAASAESNATATSLPSSHPTIDKTTSANADACPVDHGAREVWMQQARGASSQPSTTTSTPSTQPSTSSWTSYLRLPFTSSPQTPPAPKTGLDTSREISTIPRTANIPTTDPEIKASTYTASHAPANNEQETGADKATGNWIYPSERMFFDAMKRKGHDPEATDMRTVVPIHNAVNERAWAEIKEWEKPWLRGSACDTPRLHSFSGLSSQMSPKARINTMLGYQAPFDRHDWVVDRCGKEVEYVIDFYAGRKGSPDGKLSFYLDVRPKLNSWEGVKMRTVKFLGIEDYF

SEQ ID NO: 26034 - DNA, 4940 bp, Muscodor strobelii
  misc_feature: SGI EST ID NO. CUFF.61630.1
  misc_feature: Variant of the nucleotide sequence at SEQ ID NO 26032
tggcgggccaaacctggttgggcctagcaccagcagttggtctctaaataaacggtacgaagtgacaaatccccactagaaagagtgagaatagcagaggaccccgccatggtgaacccctccaacgggacatttccaaatgtcgatatcagcgccaggattgctgactacatacagtcttgcgttcctgactagaccgcccagctagcattattattattacgagcaggctctgctgtcgacgtgacgaagctttcatcattttctcctgttctcaattcaccattgccaagttcttgtagttgctgttgctgctcgttgcccctgaccgtcacccgtgctgctatccgaaagtaaacaagaaaacttgttaccagaaaccatcatggctgacaaaatctaccgcgccagcacgacggcgcccgtcaacatcgccgtcgtcaaatactggggcaagcgagacgccaagctcaacctgcccaccaactcttctctctccgtcactctgtcccaggacgatctccgaaccctcaccaccgccacctgctcttcctcctacggcgtcgagggcgactctctcaccctcaatggtgccccctccgacatctcgggtgcccgcacccaggcctgtctgcgcgagctgaggaccctgcgcgacgccctcgagcagaaggactcctccctccccaagctctcgaccatgcctctgcgcatagtctctgagaacaacttccccactgccgctggtcttgcctcgtccgcagctggttttgccgccctcgtccgtgccattgccgacctctacgagcttcccagcaaccccaccgagctctccttgatctcgcgccagggaagtggctcggcctgccgctctctgttcggtggctacgtcgcatggcagatgggatctgaggctgatggcagtgactccaaggccgtccaggtcgcccccgcatctcactggccggagatgcgcgcccttgtcctcgtcgcgtcggccgccaagaagggtgtcagctcgacctcgggcatgcagcaaacggtggccacctcggacatgttccagcgccgtatcgagacggtggtgcccaagcacatgaacctcatggaggaggccatcgctgtccgtgacttccccaagttcgccgaggtcaccatgaaggactccaactcattccactccacgtgctccgatacgtaccctcccatctactacatgaatgacgtttctcgagccgccgttcgtgccgttgaagctatcaacgccgccgctggcaagaccattgccgcttacacattcgatgccggcccgaacgcggttgtgtactacctggaggaggacaaggcaacggttgtgggcactttctacagcctgttgtcgagcactgatggctggaaggacgaggccaagtcgttcacgactggtgtgcagctagacgagggtgtggctggtttgctcaagggtggaatcagccgagtcatacagacaggtgtaggcgagggacccgtcaagacggatcaacatttggcataagggaaaaggatatgggaaatgatttgaatgagcggctagatagatgttttacaccacatattggaaatgacacataaagcggattccatcacatactgcatggctcaagatcttgcgactgtgcattgttcactgactctaggtgtcattgcagtacattatcaatggcgggatagagggaatacatgtagtaaccctattcgatttcaggatcggaaagagtaaaggacaaagatatacacatagtaacactcaagctccccttccttcaaaaggcgatgtactcatgcccccaaatagggagttcggcccggctaccctgcaaaagaccctgaagtcgatgcgccctggcgccccagtaaagtttccaaaccagcaaagtcgagaaatgttaaatggcatcgacgaactccaccacgaaagccgcaccgtccagctcgcgatccgaagctaagctatcgtcatcaactaggaatttgatatagaggaatttcgatggacccgacttcaccatgttgcaagatctaattgatcagatattccttaaccaccaccaccctcactccgccgccctcccttcacatcctcatactcgaaacaccatgtcatccagcgatctaaaagccgaggacaaatgcccggtcgaccacaagagtcgcgaggcttggcttgagaaagcccgcgccgcttcagcagaatcaaatgcgacagcaacaagcttaccgtcgtcgcatccaacgatagacaagacaaccagcgcaaacgcagacgcatgcccagtcgaccacggagcgcgagaagtctggatgcaacaagcgcgcggcgcatcatcacaaccctccacaaccacatcaacgccatcaacacagccctctacatcatcatggacatcctacctccgcctccccttcacctcctctccccagactcccccagcgccaaaaacaggccttgacacatcccgcgaaatatccaccatcccccgaaccgccaacatacccaccaccgaccccgagataaaagctagcacttacaccgcatcccatgcgcccgccaacaacgagcaggagacaggcgcggacaaagcgacggggaactggatatatccctcggagcgcatgttcttcgacgccatgaagcgcaagggccacgatccagaagcaacagatatgcggaccgtcgtaccgatccacaacgccgtgaacgagcgagcttgggcagagatcaaggagtgggagaaaccatggttgaggggttctgcttgcgacacaccacgcctccactctttctccggcctctcctcgcaaatgtccccaaaggcgcgaataaacacgatgctcggctaccaagcgcccttcgaccgacacgactgggtcgtcgaccggtgcggcaaggaagtcgagtacgttatcgacttctacgccggacgtaagggatcgcctgatgggaaattgagtttttacctcgatgtccgaccgaaacttaattcctgggagggcgtcaagatgcggactgttaagttcttggggattgaggattatttttgatggggaaaggcccggcttgaagtcgggtagtgagggatagggatatgtgacatacgaggtgtgtgagtaagtggtgagtggaaaagtgtaagaagaaacttgtacaactaatgtatcacgcggagcacatcacaagaccccggagagcatgcattatacatcgagaaggtatgggaaggcatggcgtttctggtatatcatgagggcatcgcgtctatgtcgcacactagtctcgtgtggatcttgtgcatctactctacaagcaaattgaattgcaatcgccattttccccttcttattttccgttccgatccagtgttttttgcctgacacagattgctgtgtatatgccactccgcacagtcaactcaggtagcagaatgctcctcagattttctcagctcatgtcctgaccctgacaatgcgttgctcagcccttgtctccagctcttgcaacacgccttgaaatccttcactcaacgcgaattctgacagcaggaccagtctcaagggcattggtgtccagatcccagccagcactcttgagagctaggaagaactcatctgggttatcgacacgatcgcacgtgtaatacggagagagcggctcaaaccaagccagcagtgcatcacgcggcgtggcaccttccttgagatagatggtctcgccgcttttgtcaacccacgagataacatacatcttcttgtcgtaatcctccagctcatgatccttgatctctccggcgaggggggctctgcgcgcaaaccggacctcgttcatagcgtttcggccgaataagatgccctctcgctcagcgacttcgtccgggcgtaggatgcgatcgtgggtgaagaattcgtcgtagatcaacttggcgcgctggcggttgatcgtgcgcatctggaccgagcggacggcttggtagttggtccagaggtggatgccaaggagagcgagagtccagatccagactgcgagacgaccttggacgaagcgtaggaatacgctgccgactagcatgcccatcaggctgatgaccgtctcctgactgccgtctttcgcattgagttctgcgaggttgcctgacttggcgaagtgagcgctgagacttgctttggcggatgctcctgagacgccgcacagggccttaagaacgcctgaggcgcagagggcggtgaccttggcggggccggggagagtgggcgacagaatgtcgaggatcatggacgtgtcgttgaagatgtcggcgaggaagcggtagaacttgcactcgggctcaatggcctggccgagtcggtgggcgaagagaatagtggctaggcgacctgtggactcctgaagtacggtgagaagcaccgcgcctgtggcggttgaggcggcatcgcctacgccgaaaccctggagtactgctcgtgacgacaacagtccggcgattgtgctagaaaaggcctggagtgagtcctatggtgtaaactggttagtaagatgattgagacgtgcgtcggtagtggttggtcggcatatgtgtttttgacactagtatggcgctatgggagacagtgaaacgatatgtgaaagatatgatctgaaataagatttccaaaaaaaaaaatagaaggaaaattactcacgtagatctggtaaggcgtgtagtccggggtgacggtatggggatagccagcaggcaagaagacatcaaggacctcgcgcaggtagctgcgacgcttcggtttggccttgctgtcctcgtcgtaggtgcaaagcacaccagactcatcagatgcgctgatgagcttaggtgaggaagccatcttgacttctcataccctcagtatggcgaagaagggttgatgtggtt

SEQ ID NO: 26035 - DNA, 1149 bp, Muscodor strobelii
  misc_feature: SGI cDNA ID NO. 568895
  misc_feature: Encodes the peptide sequence at SEQ ID NO 26036
atggctgacaaaatctaccgcgccagcacgacggcgcccgtcaacatcgccgtcgtcaaatactggggcaagcgagacgccaagctcaacctgcccaccaactcttctctctccgtcactctgtcccaggacgatctccgaaccctcaccaccgccacctgctcttcctcctacggcgtcgagggcgactctctcaccctcaatggtgccccctccgacatctcgggtgcccgcacccaggcctgtctgcgcgagctgaggaccctgcgcgacgccctcgagcagaaggactcctccctccccaagctctcgaccatgcctctgcgcatagtctctgagaacaacttccccactgccgctggtcttgcctcgtccgcagctggttttgccgccctcgtccgtgccattgccgacctctacgagcttcccagcaaccccaccgagctctccttgatctcgcgccagggaagtggctcggcctgccgctctctgttcggtggctacgtcgcatggcagatgggatctgaggctgatggcagtgactccaaggccgtccaggtcgcccccgcatctcactggccggagatgcgcgcccttgtcctcgtcgcgtcggccgccaagaagggtgtcagctcgacctcgggcatgcagcaaacggtggccacctcggacatgttccagcgccgtatcgagacggtggtgcccaagcacatgaacctcatggaggaggccatcgctgtccgtgacttccccaagttcgccgaggtcaccatgaaggactccaactcattccactccacgtgctccgatacgtaccctcccatctactacatgaatgacgtttctcgagccgccgttcgtgccgttgaagctatcaacgccgccgctggcaagaccattgccgcttacacattcgatgccggcccgaacgcggttgtgtactacctggaggaggacaaggcaacggttgtgggcactttctacagcctgttgtcgagcactgatggctggaaggacgaggccaagtcgttcacgactggtgtgcagctagacgagggtgtggctggtttgctcaagggtggaatcagccgagtcatacagacaggtgtaggcgagggacccgtcaagacggatcaacatttggcataa

SEQ ID NO: 26036 - protein, 382 aa, Muscodor strobelii
  misc_feature: SGI Peptide ID NO. 568895
  misc_feature (241)..(333): Pfam Id: PF08544 Pfam Desc: GHMP kinases C terminal
  misc_feature (109)..(167): Pfam Id: PF00288 Pfam Desc: GHMP kinases N terminal domain
  misc_feature (1)..(381): NCBI GI: 171678217 Blast Desc: protein product [Podospora anserina] gi|170937178|emb|CAP61835.1| protein product [Podospora anserina]
  misc_feature (1)..(381): NCBI GI: 116205702 Blast Desc: CHGG_02144 [Chaetomium globosum CBS 148.51] gi|88182741|gb|EAQ90209.1| CHGG_02144 [Chaetomium globosum CBS 148.51]
  misc_feature (2)..(382): NCBI GI: 39963452 Blast Desc: MGG_09750 [Magnaporthe grisea 70-15] gi|145015469|gb|EDK00006.1| MGG_09750 [Magnaporthe grisea 70-15]
  misc_feature (1)..(382): NCBI GI: 46137817 Blast Desc: FG10424.1 [Gibberella zeae PH-1]
  misc_feature (2)..(381): NCBI GI: 164423595 Blast Desc: diphosphomevalonate decarboxylase [Neurospora crassa OR74A] gi|157070160|gb|EDO64977.1| diphosphomevalonate decarboxylase [Neurospora crassa OR74A] diphosphomevalonate
  misc_feature (12)..(381): NCBI GI: 261354346 Blast Desc: diphosphomevalonate decarboxylase [Verticillium albo-atrum VaMs.102]
  misc_feature (1)..(381): NCBI GI: 256720688 Blast Desc: [Nectria haematococca mpVI 77-13-4]
  misc_feature (1)..(382): NCBI GI: 154292222 Blast Desc: BC1G_14194 [Botryotinia fuckeliana B05.10] gi|150846214|gb|EDN21407.1| BC1G_14194 [Botryotinia fuckeliana B05.10]
  misc_feature (1)..(381): NCBI GI: 156059890 Blast Desc: SS1G_03958 [Sclerotinia sclerotiorum 1980] gi|154701744|gb|EDO01483.1| SS1G_03958 [Sclerotinia sclerotiorum 1980]
  misc_feature (1)..(381): NCBI GI: 189196182 Blast Desc: diphosphomevalonate decarboxylase [Pyrenophora tritici-repentis Pt-1C-BFP] gi|187980308|gb|EDU46934.1| diphosphomevalonate decarboxylase [Pyrenophora tritici-repentis
  misc_feature (1)..(374): SWISSPROT Homolog: EC 4.1.1.33 Diphosphomevalonate decarboxylase
  misc_feature: Useful for fungicidal and/or biocontrol applications
MADKIYRASTTAPVNIAVVKYWGKRDAKLNLPTNSSLSVTLSQDDLRTLTTATCSSSYGVEGDSLTLNGAPSDISGARTQACLRELRTLRDALEQKDSSLPKLSTMPLRIVSENNFPTAAGLASSAAGFAALVRAIADLYELPSNPTELSLISRQGSGSACRSLFGGYVAWQMGSEADGSDSKAVQVAPASHWPEMRALVLVASAAKKGVSSTSGMQQTVATSDMFQRRIETVVPKHMNLMEEAIAVRDFPKFAEVTMKDSNSFHSTCSDTYPPIYYMNDVSRAAVRAVEAINAAAGKTIAAYTFDAGPNAVVYYLEEDKATVVGTFYSLLSSTDGWKDEAKSFTTGVQLDEGVAGLLKGGISRVIQTGVGEGPVKTDQHLA

SEQ ID NO: 26037 - DNA, 4940 bp, Muscodor strobelii; identical to SEQ ID NO: 26034
  misc_feature: SGI EST ID NO. CUFF.61630.1
  misc_feature: Variant of the nucleotide sequence at SEQ ID NO 26035

SEQ ID NO: 26038 - DNA, 702 bp, Muscodor strobelii
  misc_feature: SGI cDNA ID NO. 568896
  misc_feature: Reduced expression when VOC is produced
  misc_feature: Encodes the peptide sequence at SEQ ID NO 26039
atgccaccaacatcaccaatcatcatcaggctgtcgacagaggcagacggccaattcatgatggacgccttcgacgccgcactccccgccctcgcagcacgcggcagcggcgcacaatggggcagcacgccattccgcgagttaccgccagaccatcaggaaaagcgcattgagatggtgaagcaagctatgagattccaggccacgggcgagggaaatccgatacgcatcttcatcgctgaaaaggagatcacgcctgtggaagccgactcgttcaaagagcctgtgcacatcagagatggcgaggatgggaagaagcttttggctgtggcgtatgttaggctgagcgaggactttttgccggattacatcgaggaattaacccaacaccaagaggcaatgaagaaggaatttgtaggaaagaaagattatgtttacctcgaggctttgatcgcggatttcagaacgggagagtataggaagggcgcgggtggtgcgttgatcaaattcgcaaaggaatattgcttggaaaagaagaagccgacgttgtatttggactcgtgggcgggcaatgaggggacgcttatcaagtattacacggctcagggattctcgatgttcgatgagtttagggctccgaagcctgatggctcggaatggcatggtgcggtgtatcgcttagatgtgaaggaggagaaatga

SEQ ID NO: 26039 - protein, 233 aa, Muscodor strobelii
  misc_feature: SGI Peptide ID NO. 568896
  misc_feature (160)..(205): Pfam Id: PF00583 Pfam Desc: Acetyltransferase (GNAT) family
  misc_feature (12)..(229): NCBI GI: 238506339 Blast Desc: conserved [Aspergillus flavus NRRL3357] gi|220689084|gb|EED45435.1| conserved [Aspergillus flavus NRRL3357]
  misc_feature (16)..(229): NCBI GI: 46111745 Blast Desc: FG02754.1 [Gibberella zeae PH-1]
  misc_feature (26)..(231): NCBI GI: 258577629 Blast Desc: [Uncinocarpus reesii 1704] gi|237903262|gb|EEP77663.1| [Uncinocarpus reesii 1704]
  misc_feature (4)..(198): NCBI GI: 145250569 Blast Desc: An15g02600 [Aspergillus niger] gi|134082319|emb|CAL00414.1| [Aspergillus niger]
  misc_feature (13)..(229): NCBI GI: 116205872 Blast Desc: [Chaetomium globosum CBS 148.51] gi|88182826|gb|EAQ90294.1| [Chaetomium globosum CBS 148.51]
  misc_feature (1)..(210): NCBI GI: 121717133 Blast Desc: GNAT family acetyltransferase, [Aspergillus clavatus NRRL 1] gi|119404175|gb|EAW14592.1| GNAT family acetyltransferase, [Aspergillus clavatus NRRL 1]
  misc_feature (7)..(227): NCBI GI: 271970424 Blast Desc: GCN5-related N-acetyltransferase [Streptosporangium roseum DSM 43021] gi|270513599|gb|ACZ91877.1| GCN5-related N-acetyltransferase [Streptosporangium roseum DSM 43021]
  misc_feature (8)..(211): NCBI GI: 225557187 Blast Desc: conserved [Ajellomyces capsulatus G186AR]
  misc_feature (7)..(212): NCBI GI: 154285548 Blast Desc: conserved [Ajellomyces capsulatus NAm1] gi|150407210|gb|EDN02751.1| conserved [Ajellomyces capsulatus NAm1]
  misc_feature (9)..(224): NCBI GI: 29830436 Blast Desc: SAV_3893 [Streptomyces avermitilis MA-4680] gi|29607548|dbj|BAC71605.1| [Streptomyces avermitilis MA-4680]
  misc_feature: Useful for introducing or modulating the production of volatile compounds
MPPTSPIIIRLSTEADGQFMMDAFDAALPALAARGSGAQWGSTPFRELPPDHQEKRIEMVKQAMRFQATGEGNPIRIFIAEKEITPVEADSFKEPVHIRDGEDGKKLLAVAYVRLSEDFLPDYIEELTQHQEAMKKEFVGKKDYVYLEALIADFRTGEYRKGAGGALIKFAKEYCLEKKKPTLYLDSWAGNEGTLIKYYTAQGFSMFDEFRAPKPDGSEWHGAVYRLDVKEEK

SEQ ID NO: 26040 - DNA, 2424 bp, Muscodor strobelii
  misc_feature: SGI EST ID NO. CUFF.61975.0
  misc_feature: Variant of the nucleotide sequence at SEQ ID NO 26038
agatgataaataaaggcaggagtttcgacatgaaggaatagataaattttaagatcagaccattctcaatcagcattgttatttgcttaaatagaattcattagagactcatctttctacaactaatcaaataaaacctaatcaagacgaagtcatcaccaaaatgccaccaacatcaccaatcatcatcaggctgtcgacagaggcagacggccaattcatgatggacgccttcgacgccgcactccccgccctcgcagcacgcggcagcggcgcacaatggggcagcacgccattccgcgagttaccgccagaccatcaggaaaagcgcattgagatggtgaagcaagctatgagattccaggccacgggcgagggaaatccgatacgcatcttcatcgctgaaaaggagatcacgcctgtggaagccgactcgttcaaagagcctgtgcacatcagagatggcgaggatgggaagaagcttttggctgtggcgtatgttaggctgagcgaggactttttgccggattacatcgaggaattaacccaacaccaagaggcaatgaagaaggaatttgtaggaaagaaagattatgtttacctcgaggctttgatcgcggatttcagaacgggagagtataggaagggcgcgggtggtgcgttgatcaaattcgcaaaggaatattgcttggaaaagaagaagccgacgttgtatttggactcgtgggcgggcaatgaggggacgcttatcaagtattacacggctcagggattctcgatgttcgatgagtttagggctccgaagcctgatggctcggaatggcatggtgcggtgtatcgcttagatgtgaaggaggagaaatgactaccagaaaatgtggttgacattggatggttgcaagctctactcttttactaaatggataccaagctttctctcactgaatgaagagagggaagtgggcgagggaaggcgaagagtgcaaaaaagggggtgagacgcatatgagatccactgtgcgagatctgatcgctgcagccgaagccatcatgaaacgggatatttaaactcatcgtcggccaaacatgggatcgaactcatgacctgcccctcctggtcttctgtctctattaagtatattgttgtgcctctagaacgaggtggcatttttatgtccagcgatacggaacacctaaattttcccttcctcgaggtgagaacggtgcgaatcttgaaaactagtgctcaaattgtctctttgtcgacatccactggcggatgcgttctactgctctcaccaggcgagtctgtaaacgtaatctgagtcttgactttcgacgtggtatcatgagtatccgcagtaatgtcctccacgtctgaggagatagtagtcatcacctggatacgtctcacatccaagctcgatccgtcgtccctacaatagcaatatctcaactccgcacgaccaggctgtgcaatgatctccgtacgtgtgcttccgtgcattttgtctccaagatcgaggtgatcatccaatataggtgagtggtgcgaccatacgggacttcgcgatcgccatttcgcaaatgggtcggtgttagtgttcgtcctcgcaatcgattgagaggaccgcccggtgcgcatatctttcgctccaaatgctttgggtagccatgttttgagaagttgccggatggctggtagggacacgactatgatggagacgttgacctcaagcgctgtccagatgacgatgttcgtgtaatcccacgtcgcattcgcggaccgtgcgaaagtcagcaaatacctgaggcgaatgccactcgtgatcaacacgaacatcccgagactgaacatcaggattatgcctgctttcttgcgcttcgtagcattaagcttaaggagtagcgcgacagggaggaccatgattgctagttcttgggtgatggcagatacggcggcggcccaggatagctcacggatctcaatgcatttccctctccaatgccctttccagccttcccaattgtagttcacaggttgacattggaagatggtgaagaataccaatgttatggtgcacagagtcacccacaccattgtgatcttgacgatgatgcgaaatctccgattggggaaaatgcgcaggtaaaatagcagaatcgaaatcttcgtcaatgccaagagcgtcaaataaaatggctcgtcgatgtagaagagctcaagaccaattagtaagaggttcaaaatattaggggctgaggctttaccatcaaggccgtagtaaccgtgtccgcttccaaagtccacacatcaacaccaaacgccgtaacagaagctattacttttcatcagtgaagtcaagttagacacagatctaaaaatcgcaccgtattttccaatcagcgtgaaagcgataaaca

SEQ ID NO: 26041 - DNA, 1494 bp, Muscodor strobelii
  misc_feature: SGI cDNA ID NO. 568897
  misc_feature: Reduced expression when VOC is produced
  misc_feature: Encodes the peptide sequence at SEQ ID NO 26042
atgcagctacacatattgctgctgattgtgccggttattctagcgaccttatccttagcggaggtcagctacgcaggtaatctctcacagtgttctctagaatgcctcgatcaatgcctcccgcagtcgagctgccagacgatcgataacacaacatgtatatgcaccgataaaagcctcactctcatgattcagcaatgtttggtatctcagtgcacagaggaagaggcgcttaattttgagtacgttacttacaaaacatgtaaccttccgcagcggtcaaggagaagagatctatggggaatcacgattgtcgagttattcacgttcgtctgcgcttgtatgaggatatatggacgctggcgtgttgctcgaaggtttcagcctgaggactatgtgatgatgttggttctattgctgtttatcgctttcacgctgattggaaaatacgcttctgttacggcgtttggtgttgatgtgtggactttggaagcggacacggttactacggccttgatgctcttctacatcgacgagccattttatttgacgctcttggcattgacgaagatttcgattctgctattttacctgcgcattttccccaatcggagatttcgcatcatcgtcaagatcacaatggtgtgggtgactctgtgcaccataacattggtattcttcaccatcttccaatgtcaacctgtgaactacaattgggaaggctggaaagggcattggagagggaaatgcattgagatccgtgagctatcctgggccgccgccgtatctgccatcacccaagaactagcaatcatggtcctccctgtcgcgctactccttaagcttaatgctacgaagcgcaagaaagcaggcataatcctgatgttcagtctcgggatgttcgtgttgatcacgagtggcattcgcctcaggtatttgctgactttcgcacggtccgcgaatgcgacgtgggattacacgaacatcgtcatctggacagcgcttgaggtcaacgtctccatcatagtcgtgtccctaccagccatccggcaacttctcaaaacatggctacccaaagcatttggagcgaaagatatgcgcaccgggcggtcctctcaatcgattgcgaggacgaacactaacaccgacccatttgcgaaatggcgatcgcgaagtcccgtatggtcgcaccactcacctatattggatgatcacctcgatcttggagacaaaatgcacggaagcacacgtacggagatcattgcacagcctggtcgtgcggagttgagatattgctattgtagggacgacggatcgagcttggatgtgagacgtatccaggtgatgactactatctcctcagacgtggaggacattactgcggatactcatgataccacgtcgaaagtcaagactcagattacgtttacagactcgcctggtgagagcagtagaacgcatccgccagtggatgtcgacaaagagacaatttga

SEQ ID NO: 26042 - protein, 497 aa, Muscodor strobelii
  misc_feature: SGI Peptide ID NO. 568897
  misc_feature (25)..(386): NCBI GI: 255948054 Blast Desc: Pc22g07780 [Penicillium chrysogenum Wisconsin 54-1255] gi|211591811|emb|CAP98066.1| Pc22g07780 [Penicillium chrysogenum Wisconsin 54-1255]
  misc_feature (3)..(377): NCBI GI: 145247750 Blast Desc: An12g10780 [Aspergillus niger] gi|134080867|emb|CAK41425.1| protein product [Aspergillus niger]
  misc_feature (5)..(373): NCBI GI: 242791742 Blast Desc: integral membrane protein, [Talaromyces stipitatus ATCC 10500] gi|218718403|gb|EED17823.1| integral membrane protein, [Talaromyces stipitatus ATCC 10500]
  misc_feature (25)..(374): NCBI GI: 212533903 Blast Desc: integral membrane protein [Penicillium marneffei ATCC 18224] gi|210072472|gb|EEA26561.1| integral membrane protein [Penicillium marneffei ATCC 18224]
  misc_feature (59)..(362): NCBI GI: 46139733 Blast Desc: FG11381.1 [Gibberella zeae PH-1]
  misc_feature (25)..(362): NCBI GI: 115491889 Blast Desc: [Aspergillus terreus NIH2624] gi|114197432|gb|EAU39132.1| [Aspergillus terreus NIH2624]
  misc_feature (26)..(359): NCBI GI: 189198121 Blast Desc: conserved [Pyrenophora tritici-repentis Pt-1C-BFP] gi|187981346|gb|EDU47972.1| conserved [Pyrenophora tritici-repentis Pt-1C-BFP]
  misc_feature (1)..(393): NCBI GI: 156050259 Blast Desc: SS1G_07716 [Sclerotinia sclerotiorum 1980] gi|154692117|gb|EDN91855.1| SS1G_07716 [Sclerotinia sclerotiorum 1980]
  misc_feature (3)..(423): NCBI GI: 256728628 Blast Desc: NECHADRAFT_50557 [Nectria haematococca mpVI 77-13-4]
  misc_feature (25)..(381): NCBI GI: 119499497 Blast Desc: CFEM domain protein [Neosartorya fischeri NRRL 181] gi|119414670|gb|EAW24609.1| CFEM domain protein [Neosartorya fischeri NRRL 181]
  misc_feature: Useful for introducing or modulating the production of volatile compounds
MQLHILLLIVPVILATLSLAEVSYAGNLSQCSLECLDQCLPQSSCQTIDNTTCICTDKSLTLMIQQCLVSQCTEEEALNFEYVTYKTCNLPQRSRRRDLWGITIVELFTFVCACMRIYGRWRVARRFQPEDYVMMLVLLLFIAFTLIGKYASVTAFGVDVWTLEADTVTTALMLFYIDEPFYLTLLALTKISILLFYLRIFPNRRFRIIVKITMVWVTLCTITLVFFTIFQCQPVNYNWEGWKGHWRGKCIEIRELSWAAAVSAITQELAIMVLPVALLLKLNATKRKKAGIILMFSLGMFVLITSGIRLRYLLTFARSANATWDYTNIVIWTALEVNVSIIVVSLPAIRQLLKTWLPKAFGAKDMRTGRSSQSIARTNTNTDPFAKWRSRSPVWSHHSPILDDHLDLGDKMHGSTRTEIIAQPGRAELRYCYCRDDGSSLDVRRIQVMTTISSDVEDITADTHDTTSKVKTQITFTDSPGESSRTHPPVDVDKETI

SEQ ID NO: 26043 - DNA, 3099 bp, Muscodor strobelii
  misc_feature: SGI EST ID NO. CUFF.61976.2
  misc_feature: Variant of the nucleotide sequence at SEQ ID NO 26041
atccaagatgccaatgacagctgtggcgtgatggatctggcgtagctttcgaagggaggccatacaaccaccgactatacccaagtggctgactctagtcaataatgagacatcaccactgggtttggaagtgcccaaagtctccgagacctcgagatggcaacacgccattattctctccaacaatattcttcgttgacggtatcgtgtcatcgcatttccatggcattatgatcagagagtcagtcggtcagcgatgcagctacacatattgctgctgattgtgccggttattctagcgaccttatccttagcggaggtcagctacgcaggtaatctctcacagtgttctctagaatgcctcgatcaatgcctcccgcagtcgagctgccagacgatcgataacacaacatgtatatgcaccgataaaagcctcactctcatgattcagcaatgtttggtatctcagtgcacagaggaagaggcgcttaattttgagtacgttacttacaaaacatgtaaccttccgcagcggtcaaggagaagagatctatggggaatcacgattgtcgagttattcacgttcgtctgcgcttgtatgaggatatatggacgctggcgtgttgctcgaaggtttcagcctgaggactatgtgatgatgttggttctattgctgtttatcgctttcacgctgattggaaaatacggtgcgatttttagatctgtgtctaacttgacttcactgatgaaaagtaatagcttctgttacggcgtttggtgttgatgtgtggactttggaagcggacacggttactacggccttgatgctcttctacatcgacgagccattttatttgacgctcttggcattgacgaagatttcgattctgctattttacctgcgcattttccccaatcggagatttcgcatcatcgtcaagatcacaatggtgtgggtgactctgtgcaccataacattggtattcttcaccatcttccaatgtcaacctgtgaactacaattgggaaggctggaaagggcattggagagggaaatgcattgagatccgtgagctatcctgggccgccgccgtatctgccatcacccaagaactagcaatcatggtcctccctgtcgcgctactccttaagcttaatgctacgaagcgcaagaaagcaggcataatcctgatgttcagtctcgggatgttcgtgttgatcacgagtggcattcgcctcaggtatttgctgactttcgcacggtccgcgaatgcgacgtgggattacacgaacatcgtcatctggacagcgcttgaggtcaacgtctccatcatagtcgtgtccctaccagccatccggcaacttctcaaaacatggctacccaaagcatttggagcgaaagatatgcgcaccgggcggtcctctcaatcgattgcgaggacgaacactaacaccgacccatttgcgaaatggcgatcgcgaagtcccgtatggtcgcaccactcacctatattggatgatcacctcgatcttggagacaaaatgcacggaagcacacgtacggagatcattgcacagcctggtcgtgcggagttgagatattgctattgtagggacgacggatcgagcttggatgtgagacgtatccaggtgatgactactatctcctcagacgtggaggacattactgcggatactcatgataccacgtcgaaagtcaagactcagattacgtttacagactcgcctggtgagagcagtagaacgcatccgccagtggatgtcgacaaagagacaatttgagcactagttttcaagattcgcaccgttctcacctcgaggaagggaaaatttaggtgttccgtatcgctggacataaaaatgccacctcgttctagaggcacaacaatatacttaatagagacagaagaccaggaggggcaggtcatgagttcgatcccatgtttggccgacgatgagtttaaatatcccgtttcatgatggcttcggctgcagcgatcagatctcgcacagtggatctcatatgcgtctcacccccttttttgcactcttcgccttccctcgcccacttccctctcttcattcagtgagagaaagcttggtatccatttagtaaaagagtagagcttgcaaccatccaatgtcaaccacattttctggtagtcatttctcctccttcacatctaagcgatacaccgcaccatgccattccgagccatcaggcttcggagccctaaactcatcgaacatcgagaatccctgagccgtgtaatacctactcctggttagccctccagtcatatccgtcaaatataggtcaacttacttgataagcgtcccctcattgcccgcccacgagtccaaatacaacgtcggcttcttcttttccaagcaatattcctttgcgaatttgatcaacgcaccacccgcgcccttcctatactctcccgttctgaaatccgcgatcaaagcctcgaggtaaacataatctttctttcctacaaattccttcttcattgcctcttggtgttgggttaattcctcgatgtaatccggcaaaaagtcctcgctcagcctaacatacgccacagccaaaagcttcttcccatcctcgccatctctgatgtgcacaggctctttgaacgagtcggcttccacaggcgtgatctccttttcagcgatgaagatgcgtatcggatttccctcgcccgtggcctggaatctcatagcttgcttcaccatctcaatgcgcttttcctgatggtctggcggtaactcgcggaatggcgtgctgccccattgtgcgccgctgccgcgtgctgcgagggcggggagtgcggcgtcgaaggcgtccatcatgaattggccgtctgcctctgtcgacagcctgatgatgattggtgatgttggtggcattttggtgatgacttcgtcttgattaggttttatttgattagttgtagaaagatgagtctctaatgaattctatttaagcaaataacaatgctgattgagaatggtctgatcttaaaatttatctattccttcatgtcgaaactcctgcctttatttatcatct

SEQ ID NO: 26044 - DNA, 900 bp, Muscodor strobelii
  misc_feature: SGI cDNA ID NO. 568898
  misc_feature: Encodes the peptide sequence at SEQ ID NO 26045
atgcacggatcacaatgcattcgcatgcctccatcgaataatccagtcacaaatgtcggcagtaccgatatccgatgcaatgtaggaggcacaaaaggtgttgcggccaagtgtcccgtaaaagcgggttccactgtcactgttgagatgcacgcacaacctggcgataggaagtgttcggcggaggcaataggtggagcacattacggtccggtcaacgtctacatgagttccgtggcagacgcaacgaaagcagatggttcggccccatggtataaaattttcgcggattcctggtcatcgaaaggatccgtgggcgacgcagacaactggggcacaaatgatcttaatgcgtgctgcggaaagatggacgttctcatccctaaagatactccagctggcgactacttactccgtgctgaagttattgctttgcatactgcttcctcatctggcggcgcacaattttatatgtcctgctaccaaatcactgtggcaggaggttcgtcctctgcagcggctgttccggccggcgtatcgcttcctggtgccttcaaagccagtgatccaggtatcatggtcaacattcacgccaagatgagcgattatgtcaaccctgggcctgctgtggtcgcaggtggcaccacaaaggtagctggatcggcttgcgccagtggctgcgcgaagacctgtactgctggttcgggacctagtggcactgcgattgggtctccggcacctacagggtctagcggtggcggctcaagcagcggcggtggcacgtgtgctcaagctcaattccaacaatgcggcggccagggttatacgggttgtacgacatgtgctagtggctttacatgcaaagatgtttcaccgccatactactctcaatgctcatga

SEQ ID NO: 26045 - protein, 299 aa, Muscodor strobelii
  misc_feature: SGI Peptide ID NO. 568898
  misc_feature (266)..(294): Pfam Id: PF00734 Pfam Desc: Fungal cellulose binding domain
  misc_feature (127)..(196): Pfam Id: PF03443 Pfam Desc: Glycosyl hydrolase family 61
  misc_feature (2)..(299): NCBI GI: 85118747 Blast Desc: NCU01867 [Neurospora crassa OR74A] gi|28927308|gb|EAA36262.1| conserved [Neurospora crassa OR74A] gi|38636430|emb|CAE81966.1| related to endoglucanase IV crassa]
  misc_feature (2)..(298): NCBI GI: 85078092 Blast Desc: NCU08760 [Neurospora crassa OR74A] gi|28917156|gb|EAA26873.1| [Neurospora crassa OR74A]
  misc_feature (2)..(298): NCBI GI: 116208244 Blast Desc: CHGG_03415 [Chaetomium globosum CBS 148.51] gi|88184012|gb|EAQ91480.1| CHGG_03415 [Chaetomium globosum CBS 148.51]
  misc_feature (2)..(299): NCBI GI: 261360704 Blast Desc: endoglucanase-4 [Verticillium albo-atrum VaMs.102]
  misc_feature (2)..(299): NCBI GI: 171683157 Blast Desc: protein product [Podospora anserina] gi|170941538|emb|CAP67190.1| protein product [Podospora anserina]
  misc_feature (3)..(298): NCBI GI: 171685522 Blast Desc: protein product [Podospora anserina] gi|170942722|emb|CAP68375.1| protein product [Podospora anserina]
  misc_feature (32)..(299): NCBI GI: 116193969 Blast Desc: CHGG_06702 [Chaetomium globosum CBS 148.51] gi|88182615|gb|EAQ90083.1| CHGG_06702 [Chaetomium globosum CBS 148.51]
  misc_feature (4)..(298): NCBI GI: 189193871 Blast Desc: endoglucanase II [Pyrenophora tritici-repentis Pt-1C-BFP] gi|187978838|gb|EDU45464.1| endoglucanase II [Pyrenophora tritici-repentis Pt-1C-BFP]
  misc_feature (50)..(299): NCBI GI: 145608220 Blast Desc: MGG_12733 [Magnaporthe grisea 70-15] gi|145015721|gb|EDK00211.1| MGG_12733 [Magnaporthe grisea 70-15]
  misc_feature (4)..(221): NCBI GI: 169596244 Blast Desc: SNOG_00879 [Phaeosphaeria nodorum SN15] gi|160701263|gb|EAT92374.2| SNOG_00879 [Phaeosphaeria nodorum SN15]
  misc_feature (23)..(219): SWISSPROT Homolog: EC 3.2.1.4 Cellulase
MHGSQCIRMPPSNNPVTNVGSTDIRCNVGGTKGVAAKCPVKAGSTVTVEMHAQPGDRKCSAEAIGGAHYGPVNVYMSSVADATKADGSAPWYKIFADSWSSKGSVGDADNWGTNDLNACCGKMDVLIPKDTPAGDYLLRAEVIALHTASSSGGAQFYMSCYQITVAGGSSSAAAVPAGVSLPGAFKASDPGIMVNIHAKMSDYVNPGPAVVAGGTTKVAGSACASGCAKTCTAGSGPSGTAIGSPAPTGSSGGGSSSGGGTCAQAQFQQCGGQGYTGCTTCASGFTCKDVSPPYYSQCS

SEQ ID NO: 26046 - DNA, 2580 bp, Muscodor strobelii
  misc_feature: SGI EST ID NO. CUFF.61427.0
  misc_feature: Variant of the nucleotide sequence at SEQ ID NO 26044
gcagcactaagcttttctaagtaggtttacaagaagcacttaccgtatggggccggatccccgattaagttcatcgcctaggaacttgagatcgttccacgatttttacctgaagacatcgactttttgacgcgcctgcgcgatactctggtagcgcattcgatcccaacaatcatgagcagtaggacaaccgcacaagtctttactgctctcattcgaacacatcatatcagcagtcgcaaaaagctccaacgcgtcaaaaaggctgcgtcgcaatatgccgtgccctatgttctcattcgaagcggcgcacctggcataatgtatgctgaaggcaatgaagaaagcgtcactgcttgggtgggcttcgttcgagggcttcgctacaaggactttcagtgtccgcggaaacccgctctcaatcgcatacaagtgcatcccaaaagtaatgagccaagcttccaagaagttacttccattactgagtttggtgatcgcattgagcagaaaggcctaacttcgtggtggaaatcggcgatgggatatacctcgaccggatgaagactcatcaagctcaaccaacgctacggaacgtcgcatcatgattagaggtcatgccgtccctatccgtatcagtatcaactacaaatgggctgagaaaactatgaggtcatcagcgtctcaacccgttcatctcgaaccatttggacgctttccagaacatagaaagcccggattctgacttgccaagcatatcaacacaccagatgtcggctcccattccgcgatgcaagtaactatgagtcgtttttccatctatcccagatctttccatgacctgatgcagtactagagggaatcctggtgtgaatactgcaatgacggcccgatatgaggctcgctatagactctattcatggtcacaatccctgcgtccgatcccgatcagtacaactttgtggctttcacagacttacaagatcagttaaacgctcacgtgtcggcaagacagcctccgacatgggtcacttagattggcctcatttgtttttcagcttcttgttcgccgaacagcagtctatgcgatccgtgggttgggggtgagtgggaacctggggtattttgccggcgcggcagttacatcgtgtggacttgtgagccgttcaaccaatagcttccatgcgggttattgtcttcgctcccgaataaacaacattcggttagactcagccgacttagtgtcatgctgtgtatgcctttctattgcatctctcttcgacagagatataagcacctcgaggatgtgcacgatggaccaagtcagtgagcctggtctcctcatccttgccgaaattgcagctctgcttggctcccatcactcgttggcataatgaagtccacagtatacgccctcctttcagcggctctcgcttctaatgtcgccgctcattcgactttccagcaactctgggtagatggagttgacatgggatcacaatgcattcgcatgcctccatcgaataatccagtcacaaatgtcggcagtaccgatatccgatgcaatgtaggaggcacaaaaggtgttgcggccaagtgtcccgtaaaagcgggttccactgtcactgttgagatgcacgcacaacctggcgataggaagtgttcggcggaggcaataggtggagcacattacggtccggtcaacgtctacatgagttccgtggcagacgcaacgaaagcagatggttcggccccatggtataaaattttcgcggattcctggtcatcgaaaggatccgtgggcgacgcagacaactggggcacaaatgatcttaatgcgtgctgcggaaagatggacgttctcatccctaaagatactccagctggcgactacttactccgtgctgaagttattgctttgcatactgcttcctcatctggcggcgcacaattttatatgtcctgctaccaaatcactgtggcaggaggttcgtcctctgcagcggctgttccggccggcgtatcgcttcctggtgccttcaaagccagtgatccaggtatcatggtcaacattcacgccaagatgagcgattatgtcaaccctgggcctgctgtggtcgcaggtggcaccacaaaggtagctggatcggcttgcgccagtggctgcgcgaagacctgtactgctggttcgggacctagtggcactgcgattgggtctccggcacctacagggtctagcggtggcggctcaagcagcggcggtggcacgtgtgctcaagctcaattccaacaatgcggcggccagggttatacgggttgtacgacatgtgctagtggctttacatgcaaagatgtttcaccgccatactactctcaatgctcatgagttagtagattgctacgatgttgatgactaaggtagctcatgcaaagatcgcactaaaacatctggttgagtgatgagcttgccgccaagttgcaatgaaataataccaattgctagtctaaatgcacctgacaccaaggccctattgttaagatttagtgattctttaatttacatatcgatcaggtattatgttt

SEQ ID NO: 26047 - DNA, 387 bp, Muscodor strobelii
  misc_feature: SGI cDNA ID NO. 568899
  misc_feature: Encodes the peptide sequence at SEQ ID NO 26048
atgagcagtaggacaaccgcacaagtctttactgctctcattcgaacacatcatatcagcagtcgcaaaaagctccaacgcgtcaaaaaggctgcgtcgcaatatgccgtgccctatgttctcattcgaagcggcgcacctggcataatgtatgctgaaggcaatgaagaaagcgtcactgcttgggtgggcttcgttcgagggcttcgctacaaggactttcagtgtccgcggaaacccgctctcaatcgcatacaagtgcatcccaaaagtaatgagccaagcttccaagaagttacttccattactgagtttggtgatcgcattgagcagaaaggcctaacttcgtggtggaaatcggcgatgggatatacctcgaccggatga

SEQ ID NO: 26048 - protein, 128 aa, Muscodor strobelii
  misc_feature: SGI Peptide ID NO. 568899
  misc_feature (6)..(128): NCBI GI: 256731855 Blast Desc: NECHADRAFT_69635 [Nectria haematococca mpVI 77-13-4]
  misc_feature (10)..(125): NCBI GI: 171693557 Blast Desc: protein product [Podospora anserina] gi|170946727|emb|CAP73530.1| protein product [Podospora anserina]
  misc_feature (9)..(126): NCBI GI: 70982823 Blast Desc: AFUA_8G02680 [Aspergillus fumigatus Af293] gi|66844564|gb|EAL84901.1| AFUA_8G02680 [Aspergillus fumigatus Af293] gi|159123823|gb|EDP48942.1| AFUB_083910 [Aspergillus
  misc_feature (10)..(125): NCBI GI: 259486679 Blast Desc: TPA: conserved [Aspergillus nidulans FGSC A4]
  misc_feature (10)..(128): NCBI GI: 67903802 Blast Desc: AN8888.2 [Aspergillus nidulans FGSC A4] gi|40744946|gb|EAA64102.1| AN8888.2 [Aspergillus nidulans FGSC A4]
  misc_feature (9)..(126): NCBI GI: 238507515 Blast Desc: conserved [Aspergillus flavus NRRL3357] gi|220689672|gb|EED46023.1| conserved [Aspergillus flavus NRRL3357]
  misc_feature (9)..(126): NCBI GI: 169786495 Blast Desc: [Aspergillus oryzae RIB40] gi|83776456|dbj|BAE66575.1| protein product [Aspergillus oryzae]
  misc_feature (9)..(114): NCBI GI: 115449911 Blast Desc: conserved [Aspergillus terreus NIH2624] gi|114187677|gb|EAU29377.1| conserved [Aspergillus terreus NIH2624]
  misc_feature (9)..(105): NCBI GI: 121714803 Blast Desc: conserved [Aspergillus clavatus NRRL 1] gi|119403167|gb|EAW13585.1| conserved [Aspergillus clavatus NRRL 1]
  misc_feature (13)..(124): NCBI GI: 154303723 Blast Desc: [Botryotinia fuckeliana B05.10] gi|150854540|gb|EDN29732.1| [Botryotinia fuckeliana B05.10]
MSSRTTAQVFTALIRTHHISSRKKLQRVKKAASQYAVPYVLIRSGAPGIMYAEGNEESVTAWVGFVRGLRYKDFQCPRKPALNRIQVHPKSNEPSFQEVTSITEFGDRIEQKGLTSWWKSAMGYTSTG

SEQ ID NO: 26049 - DNA, 2580 bp, Muscodor strobelii; identical to SEQ ID NO: 26046
  misc_feature: SGI EST ID NO. CUFF.61427.0
  misc_feature: Variant of the nucleotide sequence at SEQ ID NO 26047

SEQ ID NO: 26050 - DNA, 1158 bp, Muscodor strobelii
  misc_feature: SGI cDNA ID NO. 568900
  misc_feature: Encodes the peptide sequence at SEQ ID NO 26051
atgctcgtgcagctgcttggtctattgctgggcgcagctggctgtgccgacgccgcgaatgcgatagtccctggcagggcttttgacagattcatcagtatctggttagaaaaccaggactttgctaaggtcgttatagacgaggcgttcgcagacttgaagcggttcggtatttcacagacacgttattacgcccatacgcatccaagccagcccaactatctcgctgctgtagctggtgactactgggggctcgaccacgacgatgtagtccgcatgcccgaaaacatctcgaccatcgtcgacctcctcgaacccaagggcatctcatggagaggatatttcgagggcaaccctggtccgggatatatggctccagcgtctgtaggacgaccagaacaccactctcctagtggtacctgggactatgttcgaaaacacaatccctttgtctcgtacgattcaataaaccacttcgggagccggctagttaactctctatccctcgacgatttccaagatgacttcgcagccggtactgtgccgcaatttgtgatgatatcaccggatatgctcaacgacgggcataacacgactctggactacgcgacaaactggtcacgggaatttctgaaacctttattgacagagggcgggttttcatctaaagaaagaactctgatacagttgacttacgatgaagccgaggactatacacagccgaaccaaattgcctcgttactacttggcaacgcagtacccgacagactgaagggcaccaaagatgacacattctatacccattactctatactagcgacaatgcagaacaattgggagctaccaaatttgggaagatatgacgttggtgccaatgtttttcagttggttgctgatcagaccaaatacaccaacaaagaccctcctgcgaacgtcaacatgtccatatcttaccctggacctctgaaccgaaaccataccacaaaaatcaccacttacccaccaccgaatctcaagttgacaggtgcaggcgggcagcctattttgaaagaaattgctgataagtgggcatctgaagccggagagactccgtatgatggcagtggcaatgtgtatgatggcgacaacgtgccgatatataagctacctaaaagctag

SEQ ID NO: 26051 - protein, 385 aa, Muscodor strobelii
  misc_feature: SGI Peptide ID NO. 568900
  misc_feature (28)..(282): Pfam Id: PF04185 Pfam Desc: Phosphoesterase family
  misc_feature (61)..(282): Pfam Id: PF04185 Pfam Desc: Phosphoesterase family
  misc_feature (8)..(385): NCBI GI: 171688942 Blast Desc: protein product [Podospora anserina] gi|170944433|emb|CAP70544.1| protein product [Podospora anserina]
  misc_feature (2)..(381): NCBI GI: 85082112 Blast Desc: NCU03404 [Neurospora crassa OR74A] gi|18376376|emb|CAD21153.1| acid phosphatase Pho610 [Neurospora crassa] gi|28917930|gb|EAA27615.1| NCU03404 [Neurospora crassa
  misc_feature (8)..(380): NCBI GI: 154316532 Blast Desc: BC1G_04197 [Botryotinia fuckeliana B05.10] gi|150845997|gb|EDN21190.1| BC1G_04197 [Botryotinia fuckeliana B05.10]
  misc_feature (40)..(376): NCBI GI: 156043315 Blast Desc: SS1G_10661 [Sclerotinia sclerotiorum 1980] gi|154695048|gb|EDN94786.1| SS1G_10661 [Sclerotinia sclerotiorum 1980]
  misc_feature (8)..(308): NCBI GI: 116199931 Blast Desc: CHGG_08121 [Chaetomium globosum CBS 148.51] gi|88179400|gb|EAQ86868.1| CHGG_08121 [Chaetomium globosum CBS 148.51]
  misc_feature (2)..(379): NCBI GI: 170113334 Blast Desc: acid phosphatase [Laccaria bicolor S238N-H82] gi|164637228|gb|EDR01515.1| acid phosphatase [Laccaria bicolor S238N-H82]
  misc_feature (5)..(358): NCBI GI: 37999241 Blast Desc: acid phosphatase [Pholiota nameko] gi|37999243|dbj|BAD00142.1| acid phosphatase [Pholiota nameko]
  misc_feature (6)..(359): NCBI GI: 50304485 Blast Desc: PHOX_KLULA [Kluyveromyces lactis] gi|585687|sp|P08540.2|PHOX_KLULA RecName: Full= acid phosphatase gi|49641324|emb|CAH02585.1| KLLA0B14839p [Kluyveromyces lactis]
  misc_feature (6)..(359): NCBI GI: 1325996 Blast Desc: protein product [Kluyveromyces lactis]
  misc_feature (18)..(379): NCBI GI: 37999237 Blast Desc: acid phosphatase [Pholiota nameko] gi|37999239|dbj|BAD00140.1| acid phosphatase [Pholiota nameko]
  misc_feature (23)..(359): SWISSPROT Homolog: EC 3.1.3.2 Acid phosphatase
MLVQLLGLLLGAAGCADAANAIVPGRAFDRFISIWLENQDFAKVVIDEAFADLKRFGISQTRYYAHTHPSQPNYLAAVAGDYWGLDHDDVVRMPENISTIVDLLEPKGISWRGYFEGNPGPGYMAPASVGRPEHHSPSGTWDYVRKHNPFVSYDSINHFGSRLVNSLSLDDFQDDFAAGTVPQFVMISPDMLNDGHNTTLDYATNWSREFLKPLLTEGGFSSKERTLIQLTYDEAEDYTQPNQIASLLLGNAVPDRLKGTKDDTFYTHYSILATMQNNWELPNLGRYDVGANVFQLVADQTKYTNKDPPANVNMSISYPGPLNRNHTTKITTYPPPNLKLTGAGGQPILKEIADKWASEAGETPYDGSGNVYDGDNVPIYKLPKS

SEQ ID NO: 26052 - DNA, 2256 bp, Muscodor strobelii
  misc_feature: SGI EST ID NO. CUFF.61571.0
  misc_feature: Variant of the nucleotide sequence at SEQ ID NO 26050
tggctggtcgctgctcggctttcaggcttcggcgctcggagatacgatgcagggccgaattaacacgtattatatatatgtacttctgaatatgccgattccttattgaatcgagtatccctagggataccatacctatatcgaagtcaagctgatacttcaattgatgacatcgcttcagctgcatgtaagctttggaatggcagcattgccagcatatgccgagtggctgaagctgcgatgacgagactcggaattgagacagtgtccctacataatattgcacacgtgctgcacgaagggcccaggcacggccttatctggggttcttaggtggcatcatgcgctaatagaggccagcgataagctaagaatcctaccacgatcttttcctagcattgtcgcgtcgtgtcttcaatcgcttcgatggcgccttcgacttgatcgcattttacgattctttgtatttggcgcaggttttgctttgacaatagtagttatgctcgtgcagctgcttggtctattgctgggcgcagctggctgtgccgacgccgcgaatgcgatagtccctggcagggcttttgacagattcatcagtatctggttagaaaaccaggactttgctaaggtcgttatagacgaggcgttcgcagacttgaagcggttcggtatttcacagacacgttattacgcccatacgcatccaagccagcccaactatctcgctgctgtagctggtgactactgggggctcgaccacgacgatgtagtccgcatgcccgaaaacatctcgaccatcgtcgacctcctcgaacccaagggcatctcatggagaggatatttcgagggcaaccctggtccgggatatatggctccagcgtctgtaggacgaccagaacaccactctcctagtggtacctgggactatgttcgaaaacacaatccctttgtctcgtacgattcaataaaccacttcgggagccggctagttaactctctatccctcgacgatttccaagatgacttcgcagccggtactgtgccgcaatttgtgatgatatcaccggatatgctcaacgacgggcataacacgactctggactacgcgacaaactggtcacgggaatttctgaaacctttattgacagagggcgggttttcatctaaagaaagaactctgatacagttgacttacgatgaagccgaggactatacacagccgaaccaaattgcctcgttactacttggcaacgcagtacccgacagactgaagggcaccaaagatgacacattctatacccattactctatactagcgacaatgcagaacaattgggagctaccaaatttgggaagatatgacgttggtgccaatgtttttcagttggttgctgatcagaccaaatacaccaacaaagaccctcctgcgaacgtcaacatgtccatatcttaccctggacctctgaaccgaaaccataccacaaaaatcaccacttacccaccaccgaatctcaagttgacaggtgcaggcgggcagcctattttgaaagaaattgctgataagtgggcatctgaagccggagagactccgtatgatggcagtggcaatgtgtatgatggcgacaacgtgccgatatataagctacctaaaagctagatctcgggtacttcatagaaactaaaaaaaactttcacgaggtgtgttttgaccaaaccggcacttgtaccctgtacaaaacgctatatcgcccatcatgccaaggaacgaatcttgactagcgaggtagcagacggcagcgtgtctaccactcttaaatggtgcatttgccgcgtcttcagaagcagatattaagcgaacataagcgtcctcctattcactttcctcgacacactcagcaagataacgcctgagtccacgagcggggattcaagaagcgcaagagaagaatcgacgcctatacagtagagtagtagctttcccgtctgccaagtttcccctgcattggctacctaccttatgtagcgttattttgaattgtacacagcttaatatctaggctgagggtttagtggctgcttagaagtgaccccgatcgcacaatgttgccgagcgagcgttgagaagactagacgtgtgctggaagctgccattatagcagtgatgattccatttcaatatgattctccgaaattatgacaacgattttctaataatcaaggcacgcaaagcctgacataggaacaccttaaatttcc

SEQ ID NO: 26053 - DNA, 2022 bp, Muscodor strobelii
  misc_feature: SGI cDNA ID NO. 568901
  misc_feature: Reduced expression when VOC is produced
  misc_feature: Encodes the peptide sequence at SEQ ID NO 26054
atggctggctcagacgaatcgacggcgaacaaccacgcgcctgatgaagacggacacgataatggtgaaaataatgacgattctcaacagggtccctctcgaaaacgacagcgagaatcgcgacgttccaatggcaatacgccccctgtgactacgacggttttgaaagacgccgcgcgagatcatgagcgcatcagaaaactggaattggaggtggctcaactcagaaatgcattatcgaagcaatcttcaatggatggcactacagttgttgcatctccgtcgacgataagagacgctagcaaagacacgcccccggggctgcatatacatgcgtttatggaaggtggtgaattcgaggcaaaggacaagaagaaagctgccaatttcaagaacaggtacttcgggccacacaatgtctggtcttctctcaaagagctatctggaatttgctgttttatgaaagagacatccgacgagtggcttaagcctctcaatattcagaagaaggatagggtgaagaggaaagaagatcgcgaacggaaatttgcagaacccgaaatcaccttggagtcgttgctgccctcgaaagaggaaacggattcgcttattggagtctatctggaccagttcgaacagctttatcgaatcctccacgtcccatctttcaagaaagaatacgagacattttgggatcctactcagacgaggactgcgtcctttacgacactagtgctctcgatgatttccgtctcctgctgtttggacatgcaatcctcaagcaagttcattggagtcaagtccagcgcgttccagcttgcagagaattggataaaggcctgtgacaagtggctaaacaaacagagctacaagcatcgcagactaattcattaccaaataatgtgcctcctatatctggccaagagggtaaatgtgattaagaaaaagcggttttggaccgaagcaggcgacttggtgcgcaacgcaatgacggttgggctgcatcaagatcctgacacgatgtcacctgatatcaccccatataacaaggagatgagacgcagaatttggtcaactatggttgagttcgatattcaggcctcatttgatattggtgcccctaccttactaagccaaattcacaacgatacggatgcgccaaaaaatatcgacgacgacagttttgatccagagtccttagaactccctatgtctcgacctcgcacagagtacactgattcatcttacgcacatttcagtcgccagagcctcccccttcgactcgaactgaataagatcttaactgggccgccaattgacctcgaatgggatcaaattcttcaatatagcgacatgatcacgaaagagattgatgcgttaccggcatgggacaccgacgcagacaaaagcattcgagcattgtatttcctgcgcgaggactctatcaacgccacgatcaatctttgcaacgtcgctcttcatcaaccaaggggatcaacgtcgcttatcaacgtcaaccacaaagaaactttgcgcctgattgagacatgtatcgctcttaaagaagaccgcatacttcggtgcgggaatcatgatgcatggggctactcaagtctgtgtgcctcatatggaatgctagaaactcacttgggcgtaaaaacacaagaggcggcaaaagcagccgcagcggagcgattcattgctcttcattacaagttgctgtcacatcaggttccgcttggagggcaacaacagtcgcataacgatatgcccgacctaaacccagatcaaatcaacggcgctcagtcttcgagttcctacgccaccaacacgccgattcctgctgcacaactcgggaccacgccaatacatcgcgatggcctaccattatcaatgccatggctgctaccacaaccagatgccagccaactcatggtgccaaatcctgacttcaacttcgaactcctcggctcagacctgaatgaattatggggtgatttcaccgggaccgactatatttag

SEQ ID NO: 26054 - protein, 673 aa, Muscodor strobelii
  misc_feature: SGI Peptide ID NO. 568901
  misc_feature (333)..(393): Pfam Id: PF04082 Pfam Desc: Fungal specific transcription factor domain
  misc_feature (6)..(666): NCBI GI: 46108170 Blast Desc: FG00967.1 [Gibberella zeae PH-1]
  misc_feature (55)..(577): NCBI GI: 116199929 Blast Desc: CHGG_08120 [Chaetomium globosum CBS 148.51] gi|88179399|gb|EAQ86867.1| CHGG_08120 [Chaetomium globosum CBS 148.51]
  misc_feature (39)..(619): NCBI GI: 18376352 Blast Desc: conserved [Neurospora crassa]
  misc_feature (6)..(470): NCBI GI: 256735385 Blast Desc: [Nectria haematococca mpVI 77-13-4]
  misc_feature (39)..(619): NCBI GI: 164427398 Blast Desc: NCU03417 [Neurospora crassa OR74A] gi|157071726|gb|EAA27628.2| conserved [Neurospora crassa OR74A]
  misc_feature (55)..(468): NCBI GI: 171688940 Blast Desc: protein product [Podospora anserina] gi|170944432|emb|CAP70543.1| protein product [Podospora anserina]
  misc_feature (154)..(470): NCBI GI: 261353023 Blast Desc: C6 zinc finger domain-containing protein [Verticillium albo-atrum VaMs.102]
  misc_feature (39)..(299): NCBI GI: 145606010 Blast Desc: MGG_11867 [Magnaporthe grisea 70-15] gi|145013750|gb|EDJ98391.1| MGG_11867 [Magnaporthe grisea 70-15]
  misc_feature (126)..(462): NCBI GI: 212530896 Blast Desc: conserved [Penicillium marneffei ATCC 18224] gi|212530898|ref|XP_002145606.1| conserved [Penicillium marneffei ATCC 18224] gi|210075003|gb|EEA29090.1| conserved [Penicillium
  misc_feature (44)..(460): NCBI GI: 242817244 Blast Desc: conserved [Talaromyces stipitatus ATCC 10500] gi|218713381|gb|EED12805.1| conserved [Talaromyces stipitatus ATCC 10500]
  misc_feature: Useful for introducing or modulating the production of volatile compounds
MAGSDESTANNHAPDEDGHDNGENNDDSQQGPSRKRQRESRRSNGNTPPVTTTVLKDAARDHERIRKLELEVAQLRNALSKQSSMDGTTVVASPSTIRDASKDTPPGLHIHAFMEGGEFEAKDKKKAANFKNRYFGPHNVWSSLKELSGICCFMKETSDEWLKPLNIQKKDRVKRKEDRERKFAEPEITLESLLPSKEETDSLIGVYLDQFEQLYRILHVPSFKKEYETFWDPTQTRTASFTTLVLSMISVSCCLDMQSSSKFIGVKSSAFQLAENWIKACDKWLNKQSYKHRRLIHYQIMCLLYLAKRVNVIKKKRFWTEAGDLVRNAMTVGLHQDPDTMSPDITPYNKEMRRRIWSTMVEFDIQASFDIGAPTLLSQIHNDTDAPKNIDDDSFDPESLELPMSRPRTEYTDSSYAHFSRQSLPLRLELNKILTGPPIDLEWDQILQYSDMITKEIDALPAWDTDADKSIRALYFLREDSINATINLCNVALHQPRGSTSLINVNHKETLRLIETCIALKEDRILRCGNHDAWGYSSLCASYGMLETHLGVKTQEAAKAAAAERFIALHYKLLSHQVPLGGQQQSHNDMPDLNPDQINGAQSSSSYATNTPIPAAQLGTTPIHRDGLPLSMPWLLPQPDASQLMVPNPDFNFELLGSDLNELWGDFTGTDYI

SEQ ID NO: 26055 - DNA, 4315 bp, Muscodor strobelii
  misc_feature: SGI EST ID NO. CUFF.61564.3
  misc_feature: Variant of the nucleotide sequence at SEQ ID NO 26053
cagatcgacttgcatattgactcatccccatcgtcgagggcgcggccactggaattttcatcgtcgcgctcagcagtctatgcaatatggctggctcagacgaatcgacggcgaacaaccacgcgcctgatgaagacggacacgataatggtgaaaataatgacgattctcaacagggtccctctcgaaaacgacagcgagtccgtctctcttgtttagaatgtagaaggaggaagctgtcgtgttcacgagagctgccatgtgatcgttgtataaaatctggcacgcccgagcgttgcacctatgagtctaaacccggtgctacggcgacgcattcgattctttccgcagggaaaaacgcattcgcaccgcctgagaatccattggtatcttttggccaggaatcgcgacgttccaatggcaatacgccccctgtgactacgacggttttgaaagacgccgcgcgagatcatgagcgcatcagaaaactggaattggaggtggctcaactcagaaatgcattatcgaagcaatcttcaatggatggcactacagttgttgcatctccgtcgacgataagagacgctagcaaagacacgcccccggggctgcatatacatgcgtttatggaaggtggtgaattcgaggcaaaggacaagaagaaagctgccaatttcaagaacaggtacttcgggccacacaatgtctggtcttctctcaaagagctatctggaatttgctgttttatgaaagagacatccgacgagtggcttaagcctctcaatattcagaagaaggatagggtgaagaggaaagaagatcgcgaacggaaatttgcagaacccgaaatcaccttggagtcgttgctgccctcgaaagaggaaacggattcgcttattggagtctatctggaccagttcgaacagctttatcgaatcctccacgtcccatctttcaagaaagaatacgagacattttgggatcctactcagacgaggactgcgtcctttacgacactagtgctctcgatgatttccgtctcctgctgtttggacatgcaatcctcaagcaagttcattggagtcaagtccagcgcgttccagcttgcagagaattggataaaggcctgtgacaagtggctaaacaaacagagctacaagcatcgcagactaattcattaccaaataatgtgcctcctatatctggccaagagggtaaatgtgattaagaaaaagcggttttggaccgaagcaggcgacttggtgcgcaacgcaatgacggttgggctgcatcaagatcctgacacgatgtcacctgatatcaccccatataacaaggagatgagacgcagaatttggtcaactatggttgagttcgatattcaggcctcatttgatattggtgcccctaccttactaagccaaattcacaacgatacggatgcgccaaaaaatatcgacgacgacagttttgatccagagtccttagaactccctatgtctcgacctcgcacagagtacactgattcatcttacgcacatttcagtcgccagagcctcccccttcgactcgaactgaataagatcttaactgggccgccaattgacctcgaatgggatcaaattcttcaatatagcgacatgatcacgaaagagattgatgcgttaccggcatgggacaccgacgcagacaaaagtactgacgatcaccataggccgcaactcgctcaaacacttcttcaccttcaactaagacaatatctaatacctttgcatcagcctttcgtcaggttacgaaaatcccattcaaggtaccaaacagcggaactcatctattacactgcatctcgcgatatagtattaatgcatgatcacctctgcaaacaaggcattcgagcattgtatttcctgcgcgaggactctatcaacgccacgatcaatctttgcaacgtcgctcttcatcaaccaaggggatcaacgtcgcttatcaacgtcaaccacaaagaaactttgcgcctgattgagacatgtatcgctcttaaagaagaccgcatacttcggtgcgggaatcatgatgcatggggctactcaagtctgtgtgcctcatatggaatgctagaaactcacttgggcgtaaaaacacaagaggcggcaaaagcagccgcagcggagcgattcattgctcttcattacaagttgctgtcacatcaggttccgcttggagggcaacaacagtcgcataacgatatgcccgacctaaacccagatcaaatcaacggcgctcagtcttcgagttcctacgccaccaacacgccgattcctgctgcacaactcgggaccacgccaatacatcgcgatggcctaccattatcaatgccatggctgctaccacaaccagatgccagccaactcatggtgccaaatcctgacttcaacttcgaactcctcggctcagacctgaatgaattatggggtgatttcaccgggaccgactatatttagggttgaaaactgcattggacgcggatggatggagttggtttaattagcgtgttagtcacggcgttatgtacaacatatatctcttctccctccccaaggcaatggaaaaggaaatgatacccctcaatgaacctcataataacccatttgccagctcctttgtcgttttgacgcgatattgctttttgccattgataacgacgagcgaaaccacaatgggtaacttcatatatcgcggaaaatgccgtaacgctgacataaccacttagttgctagtggtaactcacaccattggtccatcgcctgcggctttagtcgcgagcaccgactaattggacgtacatgaaatgatcgatgagtcatctcattaagatatgtttcatcacatctcgtcgtggtattcgctgcatggcaccttatttctatacttgcttgcgagggacgtccctagctccaacctttatgtctcgcatcaaaaaataccacgccgaacagcccgaggttccaatgcgagccaggcaatgacagcgggtctccacacaaaagtctacaaggatgtgacagttacagctctccacccatggagacggctcaacaacaaacccgctaggaagaagagtgaacagtaatcaacaatccgcttgtaacaggtggcctttgaaacgatccattggatatccgtcgcgcgattcggcgacccggacgcggttgtgctgagcggatatggaataacacaggtggagggctgacattagcgtccaattatgacgaacgtggaggtgtctatagtcgcaacgtgaacctgattacgcgcacgcattatggatttgggatttcttcgtgcagtcaggcgctgagcgcgactactgtagtagtttaatttgtttgtgatttcagttttgagaggtcttcccgttacccctgcatctaggaagagctctggtcgtggaggatttaaggggtttaatgtccccggtgacgtgaacgaaaagtgtacatagcttgcttcatcccaccagactttcttgtaacacctcgatctcacaacaaactcaatctcataatacatacaactactcgatttctatattcgtatcagcaaatccgacaaaatggcttctttcctcactgacaagaacatttcctacttcactatccccgtagcccttgttttggctctgtaccccagatcatacgccgtctcaggcccaaccgagaaggccttcgacccctccaaccctcgcactctccagtccaacctagcaggctccgatatcgacaagaaggtcgtcgcgaaggtcctgcgcgccgagtccgccagctccaacggcttcgagggtcttcccctctttgccgccgccgtcgtagccggtaacacggccggtctcagcaccctgactttgaacgctgcatccgtcggctacgtcgtcactcgtgtgttgtacaactacatctacatcacgctgcaagagaaccgcaagttcgctgctatccgaactcctgtgtggttcactggtgtcgctgctatcatgaccttgttcgtcaaggctggtcttaaggcttaagttgcttgtgatgggatatggagggttgtatgagtgtgtttgagtttttattgagatacctatgggaatactgtgaatagaagggaatagtcttacctaatacacgattttctttgccaagagattcgagttatagcgtgcgctcaagtcccagtgaatatcatcttgagaatcgatactgtgtgcggtagaagtatgcaaagcatggggctgcttagagtgcatttcataagagccacagcatgtcgc

SEQ ID NO: 26056 - DNA, 453 bp, Muscodor strobelii
  misc_feature: SGI cDNA ID NO. 568902
  misc_feature: Encodes the peptide sequence at SEQ ID NO 26057
atggcttctttcctcactgacaagaacatttcctacttcactatccccgtagcccttgttttggctctgtaccccagatcatacgccgtctcaggcccaaccgagaaggccttcgacccctccaaccctcgcactctccagtccaacctagcaggctccgatatcgacaagaaggtcgtcgcgaaggtcctgcgcgccgagtccgccagctccaacggcttcgagggtcttcccctctttgccgccgccgtcgtagccggtaacacggccggtctcagcaccctgactttgaacgctgcatccgtcggctacgtcgtcactcgtgtgttgtacaactacatctacatcacgctgcaagagaaccgcaagttcgctgctatccgaactcctgtgtggttcactggtgtcgctgctatcatgaccttgttcgtcaaggctggtcttaaggcttaa

SEQ ID NO: 26057 - protein, 150 aa, Muscodor strobelii
  misc_feature: SGI Peptide ID NO. 568902
  misc_feature (1)..(147): NCBI GI: 164429117 Blast Desc: NCU00456 [Neurospora crassa OR74A] gi|157072416|gb|EAA27539.2| [Neurospora crassa OR74A]
  misc_feature (1)..(149): NCBI GI: 46125023 Blast Desc: FG06889.1 [Gibberella zeae PH-1]
  misc_feature (5)..(149): NCBI GI: 171686036 Blast Desc: protein product [Podospora anserina] gi|170942979|emb|CAP68632.1| protein product [Podospora anserina]
  misc_feature (6)..(121): NCBI GI: 154317162 Blast Desc: BC1G_03483 [Botryotinia fuckeliana B05.10] gi|150844900|gb|EDN20093.1| BC1G_03483 [Botryotinia fuckeliana B05.10]
  misc_feature (4)..(147): NCBI GI: 156048995 Blast Desc: [Sclerotinia sclerotiorum 1980] gi|154692603|gb|EDN92341.1| [Sclerotinia sclerotiorum 1980]
  misc_feature (9)..(149): NCBI GI: 71003774 Blast Desc: UM00406.1 [Ustilago maydis 521] gi|46095555|gb|EAK80788.1| UM00406.1 [Ustilago maydis 521]
  misc_feature (1)..(146): NCBI GI: 169607643 Blast Desc: SNOG_06880 [Phaeosphaeria nodorum SN15] gi|111064411|gb|EAT85531.1| SNOG_06880 [Phaeosphaeria nodorum SN15]
  misc_feature (9)..(149): NCBI GI: 58262792 Blast Desc: [Cryptococcus neoformans var. neoformans JEC21] gi|134108514|ref|XP_777208.1| CNBB4380 [Cryptococcus neoformans var. neoformans B-3501A] gi|50259893|gb|EAL22561.1| CNBB4380 var.
  misc_feature (9)..(149): NCBI GI: 71010371 Blast Desc: UM02234.1 [Ustilago maydis 521] gi|46098123|gb|EAK83356.1| UM02234.1 [Ustilago maydis 521]
  misc_feature (13)..(144): NCBI GI: 187923671 Blast Desc: membrane protein-like protein [Burkholderia phytofirmans PsJN] gi|187714865|gb|ACD16089.1| membrane protein-like protein [Burkholderia phytofirmans PsJN]
MASFLTDKNISYFTIPVALVLALYPRSYAVSGPTEKAFDPSNPRTLQSNLAGSDIDKKVVAKVLRAESASSNGFEGLPLFAAAVVAGNTAGLSTLTLNAASVGYVVTRVLYNYIYITLQENRKFAAIRTPVWFTGVAAIMTLFVKAGLKA

SEQ ID NO: 26058 - DNA, 4315 bp, Muscodor strobelii; identical to SEQ ID NO: 26055
  misc_feature: SGI EST ID NO. CUFF.61564.3
  misc_feature: Variant of the nucleotide sequence at SEQ ID NO 26056

SEQ ID NO: 26059 - DNA, 1362 bp, Muscodor strobelii
  misc_feature: SGI cDNA ID NO. 568903
  misc_feature: Encodes the peptide sequence at SEQ ID NO 26060
atggacaaccgcctcgttaagattcgagataacttctcggagctctctttgtcgccaagcgaggcacgatatctcaagatgctttgttccactatcaaaactgatatcatcaacgacctacctgtcgagatcgtaggcttgatcagtctatatctagacatttctgatctggcaacttgtcttcaagtctccaaggcatggcgtgccatgcttttgtccgaccatgtcatcagtgcttacggtcgagctcactggcccaacctacgcagaggctctgagacccccagctcgtttatcgaggctctgatcaagctcggatggtgtcgtcgccgttatctctacacagagtgcatagtttcttacgctaaaccggatcccacaatcttaagcataaccaaaatcccgctagatcccgagtaccatgccggacgcggagcatccgcacatgaaatgagtctcgaatggtcgccttgtgatgaggcggacttcatttactcacacgggaaggccgcatggagtgaccattcccacttcatttgcatcgacgatctgcgacagaggacccgaaaggttttcacaccccccagcggcatcatgcaagggctacggttgaagctagaagcattcggctcaaaattagcagtcggaacagtcgacaggctcatagttacctggaatcatgtaaccaatgaatctagagagaagcacttaccaagcctgccctacctttgtacaacacacgatgataaagtcggtgtcatactccgtgacggcgatattttcgtctggaccctgctcgacaacaaattcaagcgcattgaaacgtcgcctgccatgcgaaacttggccctcgacattatcttgggcaagacagaagggcagatggatatctttttcgattcccaacggacaaacaccttgtatctcgcaactatcagaagagataagaaggaagagtatgatgtgattaatatgcaagtccacgagttcgacatgatacattgtgttgaatcatggtccttaaatgagtcatggcctaaggaccactctggacctgcaatcataaagagttacgcggttgagcgcgattgtatcgtcttcgcggatcccatattctgtcctgtccttatatttgcttgccatgagcgacaatggtgccctgattggcaggtattcagtcaggactatatgctatgcttttcgcgtgacacccaggaatggaacgacctcgatttctgtgttttttacaaccacgagacccgtatcgcccgccttcacgacggtacgactcatgagtggaggttgcaggtgaacgagcgactagttacgactcacgaagactcacgcgaactcgacctatag

SEQ ID NO: 26060 - protein, 453 aa, Muscodor strobelii
  misc_feature: SGI Peptide ID NO. 568903
  misc_feature (35)..(82): Pfam Id: PF00646 Pfam Desc: F-box domain
  misc_feature (17)..(223): NCBI GI: 46109654 Blast Desc: FG01709.1 [Gibberella zeae PH-1]
  misc_feature (4)..(88): NCBI GI: 16944661 Blast Desc: [Neurospora crassa]
MDNRLVKIRDNFSELSLSPSEARYLKMLCSTIKTDIINDLPVEIVGLISLYLDISDLATCLQVSKAWRAMLLSDHVISAYGRAHWPNLRRGSETPSSFIEALIKLGWCRRRYLYTECIVSYAKPDPTILSITKIPLDPEYHAGRGASAHEMSLEWSPCDEADFIYSHGKAAWSDHSHFICIDDLRQRTRKVFTPPSGIMQGLRLKLEAFGSKLAVGTVDRLIVTWNHVTNESREKHLPSLPYLCTTHDDKVGVILRDGDIFVWTLLDNKFKRIETSPAMRNLALDIILGKTEGQMDIFFDSQRTNTLYLATIRRDKKEEYDVINMQVHEFDMIHCVESWSLNESWPKDHSGPAIIKSYAVERDCIVFADPIFCPVLIFACHERQWCPDWQVFSQDYMLCFSRDTQEWNDLDFCVFYNHETRIARLHDGTTHEWRLQVNERLVTTHEDSRELDL

SEQ ID NO: 26061 - DNA, 268 bp, Muscodor strobelii
  misc_feature: SGI EST ID NO. CUFF.61466.0
  misc_feature: Variant of the nucleotide sequence at SEQ ID NO 26059
ccaaaatcccgctagatcccgagtaccatgccggacgcggagcatccgcacatgaaatgagtctcgaatggtcgccttgtgatgaggcggacttcatttactcacacgggaaggccgcatggagtgaccattcccacttcatttgcatcgacgatctgcgacagaggacccgaaaggttttcacaccccccagcggcatcatgcaagggctacggttgaagctagaagcattcggctcaaaattagcagtcggaacagtcgacaggct

SEQ ID NO: 26062 - DNA, 1749 bp, Muscodor strobelii
  misc_feature: SGI cDNA ID NO. 568904
  misc_feature: Encodes the peptide sequence at SEQ ID NO 26063
atgacgaccgacgcgaacgacccgagcgatccggcacgcgcgccccttctccgcaacaactcgacgtcgacgctgggtcccctcagctcgaggagctccataagcgatgcatctccaaatcagaagttggggggcagggctgtccctctgcgcgccatcgtattcgtctgcgccattctcggagcgcttggagctggctccatcaccgtcttctcgctctacggccatctcttccagtcgcgcctgcactactcccagtttcaggtcaacactgtcgcctctgtcatgaacatatccatgtatctgcctgtacccatcatcggctacgtgtgcgaccgcttcggcccgggtcccctcgctcttgtgtctactatactacacggcctgggttacggcctggctgccggcttatatcggaaaggtctacaagaagcctcggcacatgacactcgccagaaaagtacttttgtgcccatgatactcgcctttgttgctatcggcattgccactgcttgcttatacttgggcgctatcacgacgtgcgctaagaatttcggcaagggcaaatacagagggctcatgcttgttgcgcctattgcgtcctttggattaagcggaatgatcatgagtcagattgccagtagattactctacgaggtgcaacctgacggctcaaaaggcgacgtgaatgtctttcacttctttatcttcctctgcgtcctcttgaccaccgttggcctcattggtaccgtcttcttgcaggttgtggaagaggacgttcttatcgacggcgcagttgaggagctcgagaggagtggtttcctcgatggcagcgaagtgttccgtcgaagatccgagcgaggttatggtgccgttggccaaagcactactgagaatgaagacgacaacaccctgcttgatccctcgaaagatgacgaagaggatgatatgtatgccaagctgaaaaaggcatggcttttgaatgctgagactagacgtttcttatctgatcctaccatgtggttctttgctgttggattttggttgatcattgggcccggcgagtccttcatcaacaatctcggcactgttattggtaccctgaatacaccaggtggcgattcccatgctactacggccgctactcatgtttctattctagcgactgtaagcacagtcgcacgactggtggctgcctcactgagtgatcttctctcgccgagcccccaaaaccaatacgttcaggttggtggcacgcagtctttgcctgaaacgcggaggaagttcacaatctcgcgcgttgtcttatttgttgtttctgctctcgtattttctgttggcacactattcttagcatctggtgcggcccaagagcacgcaggtcgtttttgggttgtatccagcaccattggcgccggttatggtgcagtgtttagtctaactcctatcattatcactctagtttggggagtcgaaaatttcggcacgaattttggcattgttgctctcacaccagccatcggctcaatcatttggaatttcatatactcggctgtctatcaagctggggccgataactcacccttacttgatgagggtggtgatgacagcgatgtgttttgctacggaaagcagtgttataccataaccttctgggcaatgactgcgtcaatctgggctggttgtctaatgatcctctgggcatggaaaggcagacatggctggtcggatagaggcgttgtgatatag

SEQ ID NO: 26063 - protein, 582 aa, Muscodor strobelii
  misc_feature: SGI Peptide ID NO. 568904
  misc_feature (56)..(513): Pfam Id: PF07690 Pfam Desc: Major Facilitator Superfamily
  misc_feature (34)..(582): NCBI GI: 74638638 Blast Desc: MCH1_NEUCR RecName: Full= transporter MCH1 gi|9367549|emb|CAB97457.1| conserved [Neurospora crassa]
  misc_feature (1)..(582): NCBI GI: 46109656 Blast Desc: FG01710.1 [Gibberella zeae PH-1] gi|82592960|sp|Q4IM48.1|MCH1_GIBZE RecName: Full= transporter MCH1
  misc_feature (18)..(582): NCBI GI: 261357106 Blast Desc: conserved [Verticillium albo-atrum VaMs.102]
  misc_feature (34)..(558): NCBI GI: 164424810 Blast Desc: NCU05392 [Neurospora crassa OR74A] gi|157070671|gb|EAA34244.2| conserved [Neurospora crassa OR74A]
  misc_feature (11)..(582): NCBI GI: 256730691 Blast Desc: NECHADRAFT_74048 [Nectria haematococca mpVI 77-13-4]
  misc_feature (2)..(582): NCBI GI: 189189546 Blast Desc: MFS monocarboxylic acid transporter [Pyrenophora tritici-repentis Pt-1C-BFP] gi|187972718|gb|EDU40217.1| MFS monocarboxylic acid transporter [Pyrenophora tritici-repentis
  misc_feature (15)..(582): NCBI GI: 171690166 Blast Desc: protein product [Podospora anserina] gi|170945031|emb|CAP71142.1| protein product [Podospora anserina]
  misc_feature (65)..(582): NCBI GI: 116204785 Blast Desc: CHGG_10276 [Chaetomium globosum CBS 148.51] gi|88176404|gb|EAQ83872.1| CHGG_10276 [Chaetomium globosum CBS 148.51]
  misc_feature (50)..(582): NCBI GI: 154311865 Blast Desc: BC1G_05966 [Botryotinia fuckeliana B05.10] gi|150850616|gb|EDN25809.1| BC1G_05966 [Botryotinia fuckeliana B05.10]
  misc_feature (50)..(582): NCBI GI: 169607983 Blast Desc: SNOG_07056 [Phaeosphaeria nodorum SN15] gi|160701530|gb|EAT85707.2| SNOG_07056 [Phaeosphaeria nodorum SN15]
MTTDANDPSDPARAPLLRNNSTSTLGPLSSRSSISDASPNQKLGGRAVPLRAIVFVCAILGALGAGSITVFSLYGHLFQSRLHYSQFQVNTVASVMNISMYLPVPIIGYVCDRFGPGPLALVSTILHGLGYGLAAGLYRKGLQEASAHDTRQKSTFVPMILAFVAIGIATACLYLGAITTCAKNFGKGKYRGLMLVAPIASFGLSGMIMSQIASRLLYEVQPDGSKGDVNVFHFFIFLCVLLTTVGLIGTVFLQVVEEDVLIDGAVEELERSGFLDGSEVFRRRSERGYGAVGQSTTENEDDNTLLDPSKDDEEDDMYAKLKKAWLLNAETRRFLSDPTMWFFAVGFWLIIGPGESFINNLGTVIGTLNTPGGDSHATTAATHVSILATVSTVARLVAASLSDLLSPSPQNQYVQVGGTQSLPETRRKFTISRVVLFVVSALVFSVGTLFLASGAAQEHAGRFWVVSSTIGAGYGAVFSLTPIIITLVWGVENFGTNFGIVALTPAIGSIIWNFIYSAVYQAGADNSPLLDEGGDDSDVFCYGKQCYTITFWAMTASIWAGCLMILWAWKGRHGWSDRGVVI

SEQ ID NO: 26064 - DNA, 4147 bp, Muscodor strobelii
  misc_feature: SGI EST ID NO. CUFF.61471.0
  misc_feature: Variant of the nucleotide sequence at SEQ ID NO 26062
gtttaggccgccttgttaaacgctgtctgtctaggccatatatggctacgagcgacctgtcagaagttggagatagctccactcgttgcttgccttgcctcatgtttacgtcgtgacccgtgacggatttggagcatgcaacatggcccatgactccatttggcgtctcctctccatgcccgatcactaaatcgtggctccatcaatctcaaaatcgtcccagacgtcgccagagatgacttgatcgctctagcccgctttgtgctgccgtgcgcactgtaaattattatgctgtcacccttgcgacagacatcacacgtcacaacgactgctatccgccagcgccagctcaggtcgagcgtcctcccatctatcgtcagaacgcagagaggtctcgagtcgtgttcccaagcttcatatcgagctcgccttggaatcagatatctcaactcctagaatgacgaccgacgcgaacgacccgagcgatccggcacgcgcgccccttctccgcaacaactcgacgtcgacgctgggtcccctcagctcgaggagctccataagcgatgcatctccaaatcagaagttggggggcagggctgtccctctgcgcgccatcgtattcgtctgcgccattctcggagcgcttggagctggctccatcaccgtcttctcgctctacggccatctcttccagtcgcgcctgcactactcccagtttcaggtcaacactgtcgcctctgtcatgaacatatccatgtatctgcctgtacccatcatcggctacgtgtgcgaccgcttcggcccgggtcccctcgctcttgtgtctactatactacacggcctgggttacggcctggctgccggcttatatcggaaaggtctacaagaagcctcggcacatgacactcgccagaaaagtacttttgtgcccatgatactcgcctttgttgctatcggcattgccactgcttgcttatacttgggcgctatcacgacgtgcgctaagaatttcggcaagggcaaatacagagggctcatgcttgttgcgcctattgcgtcctttggattaagcggaatgatcatgagtcagattgccagtagattactctacgaggtgcaacctgacggctcaaaaggcgacgtgaatgtctttcacttctttatcttcctctgcgtcctcttgaccaccgttggcctcattggtaccgtcttcttgcaggttgtggaagaggacgttcttatcgacggcgcagttgaggagctcgagaggagtggtttcctcgatggcagcgaagtgttccgtcgaagatccgagcgaggttatggtgccgttggccaaagcactactgagaatgaagacgacaacaccctgcttgatccctcgaaagatgacgaagaggatgatatgtatgccaagctgaaaaaggcatggcttttgaatgctgagactagacgtttcttatctgatcctaccatgtggttctttgctgttggattttggttgatcattgggcccggcgagtccttcatcaacaatctcggcactgttattggtaccctgaatacaccaggtggcgattcccatgctactacggccgctactcatgtttctattctagcgactgtaagcacagtcgcacgactggtggctgcctcactgagtgatcttctctcgccgagcccccaaaaccaatacgttcaggttggtggcacgcagtctttgcctgaaacgcggaggaagttcacaatctcgcgcgttgtcttatttgttgtttctgctctcgtattttctgttggcacactattcttagcatctggtgcggcccaagagcacgcaggtcgtttttgggttgtatccagcaccattggcgccggttatggtgcagtgtttagtctaactcctatcattatcactctagtttggggagtcgaaaatttcggcacgaattttggcattgttgctctcacaccagccatcggctcaatcatttggaatttcatatactcggctgtctatcaagctggggccgataactcacccttacttgatgagggtggtgatgacagcgatgtgttttgctacggaaagcagtgttataccataaccttctgggcaatgactgcgtcaatctgggctggttgtctaatgatcctctgggcatggaaaggcagacatggctggtcggatagaggcgttgtgatatagaatgcgtacgaatgtatatacatgtggtacaaatagaagtacaaattgctccaacatatcgcttgcgcgccagctatttggtcagcctcgatgatttagtatacacaacagagcccgaatttctattattgttcgaaatctatcccgtccggagctagtttaattacactttcaacgaagaatcgctgggagccaatcagcgtgaccaaagtcgcgaggtagtacttgaatggtacccataagtttcatctcggagaagtcaaaacaagcaaggcctcacagttctcatcttttcaaatcttgattgcacatattatttatcttccttccctctttgccctgatcagctccaggccctgttcaagttgccacgaacaccttcaattttgggtaaatatgtctcatgtagattgaacggagcaaaaatatcacaacacagtctccgatccctttcggctggatgatgtcagtacccggacttgcactcatgttttcgactctcgaagggcggcgcgcatcgttcagacattctccgacatgcccacgcggttgccgtgtttgcgtgtgacggtccgctgcaggcattgagaggtcgcagtttgtgtggaggaaaaagcacgttgacgtcggttccatgtgggatacgagtgcttggcgctgttgacctcagcagatacccagatgcaccaagcggatggaccggttaaactacttgatttccaacttttggagggaacgggcaagacatgcttattctacgattctttagcaatcgagcaggccgtagagaccgctgaccactgccaacctccaccagtggcctttttgtgatgtcctccgatacgacgtgccttaccggtcgccagccgggaaaaatcaagatgatctatgtctttgcgtgtgctcaatatcgacgtagatgaaaagcccgcagtggttggttctcgcctggaccaaattctgcactacgacgcttgacaaattaattacatagccagggatgagagaagatataagagggagactctgcgacgtcagtccttgcctctaaataccactatcgacagcatcgccatcgagataacagagaaataaaagtttcagacaatttttacctgcactccaattgcttaatcctttaatccacttgaaactacaccaatcaatcacatcaaacaacgtaactcaaaatgcaactcctcactctcctcactatcccctccctcgcaaccgcagcagtactctcaacattcgcagacacggaatggacactccaaggcctctaccgagtctgcgacagcgaagacacaaactgcacatggaacttccggatcaacaccaacgaagagggcgtcgacgtcacgccctgttcctacatagtctacagcacaatgaacgggacgaacaccatccccgcctcgcaagcaaacggcggcccgactacgtgcggtgcgttcaatatcacgagtgggtggagtggtcagtttggaccggaccagggattcacgacgcttagtgtggtggattatgcgaagatgcttattgcttgggctggatatacagatgcgatggttgcgcatgaggcgctggttagtcctgatttgtcgtttcctgtgcagatgcttcctatgtgagggatgggggtttaggagtatagagactcagaatgttggggagaggagagggcttttgggagtagttggtgatgtaagtggagcaacgagggccattgagttctggcgcgaattgggcaaatgaggtctgatcgtagctgtgtctatgaacgatagtttcgttgctaaggagttgtaatggcagtcatgcgaaccttaggcaagctaggatttgattgcaaagagacaaaactcacgttctatgacgcaatttgacttatgcaggtcgtctcatataaataaagggatcaactgaatgactcagagc

SEQ ID NO: 26065 - DNA, 444 bp, Muscodor strobelii
  misc_feature: SGI cDNA ID NO. 568905
  misc_feature: Elevated expression when VOC is produced
  misc_feature: Encodes the peptide sequence at SEQ ID NO 26066
atgcaactcctcactctcctcactatcccctccctcgcaaccgcagcagtactctcaacattcgcagacacggaatggacactccaaggcctctaccgagtctgcgacagcgaagacacaaactgcacatggaacttccggatcaacaccaacgaagagggcgtcgacgtcacgccctgttcctacatagtctacagcacaatgaacgggacgaacaccatccccgcctcgcaagcaaacggcggcccgactacgtgcggtgcgttcaatatcacgagtgggtggagtggtcagtttggaccggaccagggattcacgacgcttagtgtggtggattatgcgaagatgcttattgcttgggctggatatacagatgcgatggttgcgcatgaggcgctggttagtcctgatttgtcgtttcctgtgcagatgcttcctatgtga

SEQ ID NO: 26066 - protein, 147 aa, Muscodor strobelii
  misc_feature: SGI Peptide ID NO. 568905
  misc_feature (22)..(146): NCBI GI: 256722734 Blast Desc: NECHADRAFT_72854 [Nectria haematococca mpVI 77-13-4]
  misc_feature (10)..(146): NCBI GI: 256722249 Blast Desc: NECHADRAFT_52368 [Nectria haematococca mpVI 77-13-4]
  misc_feature (1)..(146): NCBI GI: 255936199 Blast Desc: Pc13g06930 [Penicillium chrysogenum Wisconsin 54-1255] gi|211583746|emb|CAP91762.1| Pc13g06930 [Penicillium chrysogenum Wisconsin 54-1255]
  misc_feature (22)..(146): NCBI GI: 67516423 Blast Desc: AN0493.2 [Aspergillus nidulans FGSC A4] gi|40747436|gb|EAA66592.1| AN0493.2 [Aspergillus nidulans FGSC A4] gi|259489254|tpe|CBF89373.1| TPA: [Aspergillus nidulans FGSC
  misc_feature (7)..(146): NCBI GI: 256724272 Blast Desc: NECHADRAFT_53490 [Nectria haematococca mpVI 77-13-4]
  misc_feature (10)..(137): NCBI GI: 46115206 Blast Desc: FG03445.1 [Gibberella zeae PH-1]
  misc_feature (1)..(146): NCBI GI: 255935271 Blast Desc: Pc13g02210 [Penicillium chrysogenum Wisconsin 54-1255] gi|211583282|emb|CAP91290.1| Pc13g02210 [Penicillium chrysogenum Wisconsin 54-1255]
  misc_feature (3)..(146): NCBI GI: 46127721 Blast Desc: FG08238.1 [Gibberella zeae PH-1]
  misc_feature (25)..(146): NCBI GI: 256729378 Blast Desc: small secreted protein [Nectria haematococca mpVI 77-13-4]
  misc_feature (25)..(145): NCBI GI: 39973357 Blast Desc: MGG_07973 [Magnaporthe grisea 70-15] gi|145012792|gb|EDJ97446.1| MGG_07973 [Magnaporthe grisea 70-15]
  misc_feature: Useful for introducing or modulating the production of volatile compounds
MQLLTLLTIPSLATAAVLSTFADTEWTLQGLYRVCDSEDTNCTWNFRINTNEEGVDVTPCSYIVYSTMNGTNTIPASQANGGPTTCGAFNITSGWSGQFGPDQGFTTLSVVDYAKMLIAWAGYTDAMVAHEALVSPDLSFPVQMLPM

SEQ ID NO: 26067 - DNA, 4147 bp, Muscodor strobelii; identical to SEQ ID NO: 26064
  misc_feature: SGI EST ID NO. CUFF.61471.0
  misc_feature: Variant of the nucleotide sequence at SEQ ID NO 26065

SEQ ID NO: 26068 - DNA, 1704 bp, Muscodor strobelii
  misc_feature: SGI cDNA ID NO. 568906
  misc_feature: Elevated expression when VOC is produced
  misc_feature: Encodes the peptide sequence at SEQ ID NO 26069
atgaagggtctccttcagcctatggcctcattggccctgtttctaggccgaaccaatgctgcgccagccccgtccaatacggtagtggaaaggactactgttttcgttgaggttgagctaggcacagtagtaggctcttcgttgctgggagtcgacagctttgcgggcattccttttgcggacgcccctataggcgaccttcgtttagccgctccgcaaaaaagggtatcgtctttcgggacttttgatgcgactggatcaggcccatcttgtccacagatgttcttctcgaccgaaggagagttcctcacggaagtccttggttatgtgactggcacgcccttatttcaaactgtcctatctgagacggaggactgcttaactatgaaagtacagcggcccgccggtaccaaagcaggtgataaactccctgtgctcttctggatttttggtggaggtttcgaactcggtagccccacgatgtatgatggtgccgatcttgttttaaatggtattgctcggaagcagccattcgtctttgtcgcagtcaactaccgcgtcgctggattcggatttatggcagggaaagagatcttggcagcaaacgcaagtaatcttggtctactagatcaacgaatgggtctcgaatgggtccaggacaacatagaggctttcggaggcgatccgaccaaagtaacgatttggggtgaatcggcaggtgctatctccgtctttgatcaaatggctctctacgatggcgataacacatataatggtaatgcgctcttccgcggcgcgataatgaacagcggcagcattgttcccgcagatcctgtggactgtccccgcgcccaggaaatctacgatgctgtagtcgaagaaggcggatgctctggtgcatccgataccctccaatgccttcgtggactggactacgatacttttcttcacgccgcaaacagtgtaccaggccttctcagctatacatcggttgcattatcctacgtgcctcgtcccgacggcgttgccttgactgagagccctgatgtattagcgaaggctggcaaatatgctgccgttcccatgatcattggtgatcaggaagacgaaggcaccttgttttccctatttcaaggaaacattacaaacgagaatgagctaatcgactatctgtacggtattttcttccgagatgccgaccgggacactattgccaacctagtggcaacgtatagtgcaagtcccattgatggaagcccattcagaacgggtatcaccaacatcatctatccggaattcaagcgtcttgctgccatccttggtgatctggtgtttactctcacacgacgattgttcctcgagggcacaaatgctgtgaacccagatgttccgtcgtggagttatctctcatcttacgactatggaactcctatcttgggcacctttcacggctcggatatcctgcaagtattctacgggatccttcccaactacgcaagcgctgcgatccaaagctattatatcaacttcgtatacaacttggatccaaacaaaggcgttactgacttcatggactggccggagtggagtggcaacaagactttaatgcagttctatgccgaatccgccaacctgctaccagatactttcagatcggagagcgcggagtttattgcgaataatgtcgaggctcttcatatctaa

SEQ ID NO: 26069 - protein, 567 aa, Muscodor strobelii
  misc_feature: SGI Peptide ID NO. 568906
  misc_feature (1)..(558): Pfam Id: PF00135 Pfam Desc: Carboxylesterase
  misc_feature (1)..(390): Pfam Id: PF00135 Pfam Desc: Carboxylesterase
  misc_feature (1)..(567): NCBI GI: 84993514 Blast Desc: sterol esterase precursor [Melanocarpus albomyces]
  misc_feature (16)..(567): NCBI GI: 85093411 Blast Desc: NCU09575 [Neurospora crassa OR74A] gi|28921135|gb|EAA30450.1| NCU09575 [Neurospora crassa OR74A]
  misc_feature (4)..(567): NCBI GI: 238507487 Blast Desc: extracellular lipase, [Aspergillus flavus NRRL3357] gi|220689658|gb|EED46009.1| extracellular lipase, [Aspergillus flavus NRRL3357]
  misc_feature (1)..(566): NCBI GI: 116205752 Blast Desc: CHGG_02169 [Chaetomium globosum CBS 148.51] gi|88182766|gb|EAQ90234.1| CHGG_02169 [Chaetomium globosum CBS 148.51]
  misc_feature (34)..(565): NCBI GI: 46109442 Blast Desc: FG01603.1 [Gibberella zeae PH-1]
  misc_feature (33)..(567): NCBI GI: 169786469 Blast Desc: [Aspergillus oryzae RIB40] gi|83776443|dbj|BAE66562.1| protein product [Aspergillus oryzae]
  misc_feature (27)..(567): NCBI GI: 256730747 Blast Desc: NECHADRAFT_30050 [Nectria haematococca mpVI 77-13-4]
  misc_feature (36)..(567): NCBI GI: 39975079 Blast Desc: MGG_00314 [Magnaporthe grisea 70-15] gi|145018803|gb|EDK03082.1| MGG_00314 [Magnaporthe grisea 70-15]
  misc_feature (20)..(567): NCBI GI: 171678173 Blast Desc: protein product [Podospora anserina] gi|170937156|emb|CAP61813.1| protein product [Podospora anserina]
  misc_feature (8)..(567): NCBI GI: 189208005 Blast Desc: lipase 3 precursor [Pyrenophora tritici-repentis Pt-1C-BFP] gi|187976429|gb|EDU43055.1| lipase 3 precursor [Pyrenophora tritici-repentis Pt-1C-BFP]
  misc_feature (42)..(552): SWISSPROT Homolog: EC 3.1.1.3 Triacylglycerol lipase
  misc_feature: Useful for introducing or modulating the production of volatile compounds
MKGLLQPMASLALFLGRTNAAPAPSNTVVERTTVFVEVELGTVVGSSLLGVDSFAGIPFADAPIGDLRLAAPQKRVSSFGTFDATGSGPSCPQMFFSTEGEFLTEVLGYVTGTPLFQTVLSETEDCLTMKVQRPAGTKAGDKLPVLFWIFGGGFELGSPTMYDGADLVLNGIARKQPFVFVAVNYRVAGFGFMAGKEILAANASNLGLLDQRMGLEWVQDNIEAFGGDPTKVTIWGESAGAISVFDQMALYDGDNTYNGNALFRGAIMNSGSIVPADPVDCPRAQEIYDAVVEEGGCSGASDTLQCLRGLDYDTFLHAANSVPGLLSYTSVALSYVPRPDGVALTESPDVLAKAGKYAAVPMIIGDQEDEGTLFSLFQGNITNENELIDYLYGIFFRDADRDTIANLVATYSASPIDGSPFRTGITNIIYPEFKRLAAILGDLVFTLTRRLFLEGTNAVNPDVPSWSYLSSYDYGTPILGTFHGSDILQVFYGILPNYASAAIQSYYINFVYNLDPNKGVTDFMDWPEWSGNKTLMQFYAESANLLPDTFRSESAEFIANNVEALHI

SEQ ID NO: 26070 - DNA, 2150 bp, Muscodor strobelii
  misc_feature: SGI EST ID NO. CUFF.61495.0
  misc_feature: Variant of the nucleotide sequence at SEQ ID NO 26068
ggcggctgggccaggtagggccaggcacgcgctattgtaaagacatcctatcactattatatagagccgaggatggcacgctcgaagcgagttgatttatttgtttgttcgtgtggtaggtcgactacttggctcattctcttatatcaaccacgaagtggtcagcgagcacctcatctgatccgaggcttgagtttgccttgtcgctatctctcccgggcctccgagtttgcagacctcgaataacatcatgaagggtctccttcagcctatggcctcattggccctgtttctaggccgaaccaatgctgcgccagccccgtccaatacggtagtggaaaggactactgttttcgttgaggttgagctaggcacagtagtaggctcttcgttgctgggagtcgacagctttgcgggcattccttttgcggacgcccctataggcgaccttcgtttagccgctccgcaaaaaagggtatcgtctttcgggacttttgatgcgactggatcaggcccatcttgtccacagatgttcttctcgaccgaaggagagttcctcacggaagtccttggttatgtgactggcacgcccttatttcaaactgtcctatctgagacggaggactgcttaactatgaaagtacagcggcccgccggtaccaaagcaggtgataaactccctgtgctcttctggatttttggtggaggtttcgaactcggtagccccacgatgtatgatggtgccgatcttgttttaaatggtattgctcggaagcagccattcgtctttgtcgcagtcaactaccgcgtcgctggattcggatttatggcagggaaagagatcttggcagcaaacgcaagtaatcttggtctactagatcaacgaatgggtctcgaatgggtccaggacaacatagaggctttcggaggcgatccgaccaaagtaacgatttggggtgaatcggcaggtgctatctccgtctttgatcaaatggctctctacgatggcgataacacatataatggtaatgcgctcttccgcggcgcgataatgaacagcggcagcattgttcccgcagatcctgtggactgtccccgcgcccaggaaatctacgatgctgtagtcgaagaaggcggatgctctggtgcatccgataccctccaatgccttcgtggactggactacgatacttttcttcacgccgcaaacagtgtaccaggccttctcagctatacatcggttgcattatcctacgtgcctcgtcccgacggcgttgccttgactgagagccctgatgtattagcgaaggctggcaaatatgctgccgttcccatgatcattggtgatcaggaagacgaaggcaccttgttttccctatttcaaggaaacattacaaacgagaatgagctaatcgactatctgtacggtattttcttccgagatgccgaccgggacactattgccaacctagtggcaacgtatagtgcaagtcccattgatggaagcccattcagaacgggtatcaccaacatcatctatccggaattcaagcgtcttgctgccatccttggtgatctggtgtttactctcacacgacgattgttcctcgagggcacaaatgctgtgaacccagatgttccgtcgtggagttatctctcatcttacgactatggaactcctatcttgggcacctttcacggctcggatatcctgcaagtattctacgggatccttcccaactacgcaagcgctgcgatccaaagctattatatcaacttcgtatacaacttggatccaaacaaaggcgttactgacttcatggactggccggagtggagtggcaacaagactttaatgcagttctatgccgaatccgccaacctgctaccagatactttcagatcggagagcgcggagtttattgcgaataatgtcgaggctcttcatatctaaggctgggaaggaaatgatgtttaaaagttcgcatatggattggtctaatactaataacgattggatgacagaaaatgtgcatacgtcttcgatacctttttgtatataatgcctacggcttagcattgaccagtcctgatgtctgctttagcaagtgcagatagtaatgcctcatgatttagtctttgaagcacca

SEQ ID NO: 26071 - DNA, 756 bp, Muscodor strobelii
  misc_feature: SGI cDNA ID NO. 568907
  misc_feature: Encodes the peptide sequence at SEQ ID NO 26072
atgtcgccgagagtgatcccggctaagggcaatgcgccgaatgtcgtgcgggacgcccgtgaagcattcgatgttctcaaagccggcggtgtcatcatagtaccaacagatgtcgggtacgggctgatgtcctgcagctccgaaggtattgagcgcgccttcgccgctaagcaacggaaacccggccacacactcggtatcattgggacttatacccagcatgaacaactgcatattctgcccgacaagaaattcgagatgactcgggcaatcacacaggacttgaattcgactcttgcagtcgttgcaccttttcgaaaagatcatccacgcattaaggctctcacacctgaaacattggcgcggacgaccaaaggcgatacacttggtatcgcaattcccgagggtccatttttacgagaactagggaggttgaacgatgaggatgggcaattgatggtcggcagcagtgccaatttatcggggcagggacagaaatttcgtatcgaggatattgagcaagaggtcctcgaggccgctgaccttgttattgactacgggttacagcggtatcatcgatatcaaagggcaggaaccaatattgacatggaaaatatgaaggtactccgtattggggccaattatgaagtcttcagggaacgaatgctgaagtggtggggtgttgagttgccagaggatcctgataataagactcagagcgttggcgtgggagtctcaatcaagattgatcactga

SEQ ID NO: 26072 - protein, 251 aa, Muscodor strobelii
  misc_feature: SGI Peptide ID NO. 568907
  misc_feature (1)..(243): NCBI GI: 238500582 Blast Desc: conserved [Aspergillus flavus NRRL3357] gi|220691762|gb|EED48109.1| conserved [Aspergillus flavus NRRL3357]
  misc_feature (1)..(243): NCBI GI: 169782145 Blast Desc: [Aspergillus oryzae RIB40] gi|83774278|dbj|BAE64402.1| protein product [Aspergillus oryzae]
  misc_feature (1)..(242): NCBI GI: 255943590 Blast Desc: Pc19g00760 [Penicillium chrysogenum Wisconsin 54-1255] gi|211587297|emb|CAP79492.1| Pc19g00760 [Penicillium chrysogenum Wisconsin 54-1255]
  misc_feature (1)..(244): NCBI GI: 58268134 Blast Desc: [Cryptococcus neoformans var. neoformans JEC21] gi|134111867|ref|XP_775469.1| CNBE1840 [Cryptococcus neoformans var. neoformans B-3501A] gi|50258128|gb|EAL20822.1| CNBE1840 var.
  misc_feature (1)..(244): NCBI GI: 119472196 Blast Desc: NFIA_057440 [Neosartorya fischeri NRRL 181] gi|119406444|gb|EAW16395.1| conserved [Neosartorya fischeri NRRL 181]
  misc_feature (1)..(235): NCBI GI: 239614287 Blast Desc: conserved [Ajellomyces dermatitidis ER-3]
  misc_feature (1)..(235): NCBI GI: 261204349 Blast Desc: conserved [Ajellomyces dermatitidis SLH14081] gi|239587173|gb|EEQ69816.1| conserved [Ajellomyces dermatitidis SLH14081]
  misc_feature (1)..(226): NCBI GI: 116198445 Blast Desc: CHGG_07378 [Chaetomium globosum CBS 148.51] gi|88178657|gb|EAQ86125.1| CHGG_07378 [Chaetomium globosum CBS 148.51]
  misc_feature (1)..(238): NCBI GI: 145246840 Blast Desc: An12g06060 [Aspergillus niger] gi|134080391|emb|CAK46312.1| protein product [Aspergillus niger]
  misc_feature (4)..(238): NCBI GI: 145234176 Blast Desc: An02g13280 [Aspergillus niger] gi|134057403|emb|CAK47741.1| protein product [Aspergillus niger]
MSPRVIPAKGNAPNVVRDAREAFDVLKAGGVIIVPTDVGYGLMSCSSEGIERAFAAKQRKPGHTLGIIGTYTQHEQLHILPDKKFEMTRAITQDLNSTLAVVAPFRKDHPRIKALTPETLARTTKGDTLGIAIPEGPFLRELGRLNDEDGQLMVGSSANLSGQGQKFRIEDIEQEVLEAADLVIDYGLQRYHRYQRAGTNIDMENMKVLRIGANYEVFRERMLKWWGVELPEDPDNKTQSVGVGVSIKIDH

SEQ ID NO: 26073 - DNA, 857 bp, Muscodor strobelii
  misc_feature: SGI EST ID NO. CUFF.61498.0
  misc_feature: Variant of the nucleotide sequence at SEQ ID NO 26071
ccggctaagggcaatgcgccgaatgtcgtgcgggacgcccgtgaagcattcgatgttctcaaagccggcggtgtcatcatagtaccaacagatgtcgggtacgggctgatgtcctgcagctccgaaggtattgagcgcgccttcgccgctaagcaacggaaacccggccacacactcggtatcattgggacttatacccagcatgaacaactgcatattctgcccgacaagaaattcgagatgactcgggcaatcacacaggacttgaattcgactcttgcagtcgttgcaccttttcgaaaagatcatccacgcattaaggctctcacacctgaaacattggcgcggacgaccaaaggcgatacacttggtatcgcaattcccgagggtccatttttacgagaactagggaggttgaacgatgaggatgggcaattgatggtcggcagcagtgccaatttatcggggcagggacagaaatttcgtatcgaggatattgagcaagaggtcctcgaggccgctgaccttgttattgactacgggttacagcggtatcatcgatatcaaagggcaggaaccaatattgacatggaaaatatgaaggtactccgtattggggccaattatgaagtcttcagggaacgaatgctgaagtggtggggtgttgagttgccagaggatcctgataataagactcagagcgttggcgtgggagtctcaatcaagattgatcactgagatattaggttgcgcataattgctcattcgttatagaaaaaggatttgtttcggatagtaaaatgtctttcacaaatccacaggcccaagcattgcagaatagatcgcagttagttttg

SEQ ID NO: 26074 - DNA, 387 bp, Muscodor strobelii
  misc_feature: SGI cDNA ID NO. 568908
  misc_feature: Encodes the peptide sequence at SEQ ID NO 26075
atggcagagcgcatgatccagcctcttcgtgaagtcaactcgcagcgtatggtgatcgaaccaagcatccagccgcaatggaatgagattggataccaggccgaacaaatcgagcgcgataagccttcaacggctatgacaacttccatttaccatatgtctggcgctatgccgtttaatgactttcaaagcgctttctcggatatggacctgaataccaacctcaatggaagcctcgatggcacattcaacaatcacgatttcggctacactagcgtcgtcggcaatcctaccaacaatcttgatgacagcattgacccgaacttggattgtgtatttggcaaccttaccgatctcgacctcacgtacagccacggcggagtgtag

SEQ ID NO: 26075 - protein, 128 aa, Muscodor strobelii
  misc_feature: SGI Peptide ID NO. 568908
MAERMIQPLREVNSQRMVIEPSIQPQWNEIGYQAEQIERDKPSTAMTTSIYHMSGAMPFNDFQSAFSDMDLNTNLNGSLDGTFNNHDFGYTSVVGNPTNNLDDSIDPNLDCVFGNLTDLDLTYSHGGV

SEQ ID NO: 26076 - DNA, 1608 bp, Muscodor strobelii
  misc_feature: SGI cDNA ID NO. 568909
  misc_feature: Encodes the peptide sequence at SEQ ID NO 26077
atggctaccaacgactgtatcggcaccaaaagtctcgactcctgcgctgagcgccccgaaggcgaagagcagcagtttcttccaccctccgagtcaacaccactcctggataatgaggaacgacataaacatttagccgctgctacgaagaacgatggcgttgcagatgaagtgtggttgctgatacgttactcgctccctcttattgtgacgtatctgctgcagtactcgtgggcaataattgtgacatttgtagcgggccatctaagtccagaagatctagcagccgcgagcatcggtgagacggtgatgatcatcactggcctcgccatatttgagggcatggcaacagcattagacacgctgtgctcgcaggcatatggcaatggtagcgacccaaccgctgtcggcctgcatgtacagcgcatgctgctgcttatcacagcggtctcggtgctcatttccgcaatctgggctgtgtcgccgttcctactgccgcttgtgctggaggctcctcaaggccacctggccaaccgcgcaggtctctttctccaagtcagcattctgggtataccagggtacgcaggattcgaggctctcaaacgccttttgcaggcacagggaagctttcgccctgcaactgtgatccttatcatctgcactccgctcaacgcgctactctgctgggtgtttgctttccgatgcgagatgggtctggcaggtgcagcactgggtacagccttggtcaacgatctgcgaccattacttttgctgatctacatggctctgcctatgggcaaatggtcacgtaaatgctggggcggcttctcgcgtgccgcgctgactgtatcctggcccatggttaagctcgctgttgctgggtccgttgtaaatatcgcagaatggggcgctttccagatcctgaccttcagtacctcgcgactgagcatgcagcatctggctgctcagacgatcctcaccaccatttcgatcgtatccttccatattccattctctatgggaatcggcattagtacacgcatcggacatctcgtcggcgcaggccttttgacaaaggctcgccgcgctgccaagctgtacgcgtttgtgttcactctcgtcgggttggttgatggactactcatctactgctcgcgacatgcattattgcattttttcctagatctacatgaacccaaacctagttcctcagttgtgatgaggtcctttttacaggacggacaacacggtctcgaaagtacagatgatcctacggtctcagcgctggtattggaaacaatgctgacggtcagtatatatcaagtgcttgacgccttcatgtgtttttccaacggcacaatccgagggctggggcgtcaatccgtcgcggcctgcgtcgtgataattgtaaattactgtggagctgtccccatggcaatatggctcgagctcggaacgcctagtctagggctcaatggagtctggatcggaatgggggcaggcatggtcctgatcgcaataatcgaatgttcgtacatgagcatactgaactggcagaaatgtgtcgataatgtccggagacacgaagcgctcagttcgaatgattag

SEQ ID NO: 26077 - protein, 535 aa, Muscodor strobelii
  misc_feature: SGI Peptide ID NO. 568909
  misc_feature (67)..(230): Pfam Id: PF01554 Pfam Desc: MatE
  misc_feature (293)..(481): Pfam Id: PF01554 Pfam Desc: MatE
  misc_feature (293)..(395): Pfam Id: PF01554 Pfam Desc: MatE
  misc_feature (30)..(529): NCBI GI: 46130666 Blast Desc: FG08937.1 [Gibberella zeae PH-1]
  misc_feature (30)..(529): NCBI GI: 226508862 Blast Desc: LOC100274589 [Zea mays] gi|194708706|gb|ACF88437.1| [Zea mays]
  misc_feature (19)..(531): NCBI GI: 261356059 Blast Desc: conserved [Verticillium albo-atrum VaMs.102]
  misc_feature (30)..(529): NCBI GI: 46114496 Blast Desc: FG03090.1 [Gibberella zeae PH-1]
  misc_feature (31)..(529): NCBI GI: 256723652 Blast Desc: NECHADRAFT_97317 [Nectria haematococca mpVI 77-13-4]
  misc_feature (11)..(529): NCBI GI: 169598906 Blast Desc: SNOG_02262 [Phaeosphaeria nodorum SN15] gi|111069354|gb|EAT90474.1| SNOG_02262 [Phaeosphaeria nodorum SN15]
  misc_feature (56)..(529): NCBI GI: 189208754 Blast Desc: conserved [Pyrenophora tritici-repentis Pt-1C-BFP] gi|187976803|gb|EDU43429.1| conserved [Pyrenophora tritici-repentis Pt-1C-BFP]
  misc_feature (32)..(532): NCBI GI: 189212180 Blast Desc: conserved [Pyrenophora tritici-repentis Pt-1C-BFP] gi|187979614|gb|EDU46240.1| conserved [Pyrenophora tritici-repentis Pt-1C-BFP]
  misc_feature (31)..(529): NCBI GI: 242803564 Blast Desc: MATE efflux family protein subfamily, [Talaromyces stipitatus ATCC 10500] gi|218717545|gb|EED16966.1| MATE efflux family protein subfamily, [Talaromyces stipitatus ATCC 10500]
  misc_feature (18)..(531): NCBI GI: 225558595 Blast Desc: multidrug and toxin extrusion protein [Ajellomyces capsulatus G186AR]
MATNDCIGTKSLDSCAERPEGEEQQFLPPSESTPLLDNEERHKHLAAATKNDGVADEVWLLIRYSLPLIVTYLLQYSWAIIVTFVAGHLSPEDLAAASIGETVMIITGLAIFEGMATALDTLCSQAYGNGSDPTAVGLHVQRMLLLITAVSVLISAIWAVSPFLLPLVLEAPQGHLANRAGLFLQVSILGIPGYAGFEALKRLLQAQGSFRPATVILIICTPLNALLCWVFAFRCEMGLAGAALGTALVNDLRPLLLLIYMALPMGKWSRKCWGGFSRAALTVSWPMVKLAVAGSVVNIAEWGAFQILTFSTSRLSMQHLAAQTILTTISIVSFHIPFSMGIGISTRIGHLVGAGLLTKARRAAKLYAFVFTLVGLVDGLLIYCSRHALLHFFLDLHEPKPSSSVVMRSFLQDGQHGLESTDDPTVSALVLETMLTVSIYQVLDAFMCFSNGTIRGLGRQSVAACVVIIVNYCGAVPMAIWLELGTPSLGLNGVWIGMGAGMVLIAIIECSYMSILNWQKCVDNVRRHEALSSND

SEQ ID NO: 26078 - DNA, 179 bp, Muscodor strobelii
  misc_feature: SGI EST ID NO. CUFF.61516.0
  misc_feature: Variant of the nucleotide sequence at SEQ ID NO 26076
cctcgccatatttgagggcatggcaacagcattagacacgctgtgctcgcaggcatatggcaatggtagcgacccaaccgctgtcggcctgcatgtacagcgcatgctgctgcttatcacagcggtctcggtgctcatttccgcaatctgggctgtgtcgccgttcctactgccgcttg

SEQ ID NO: 26079 - DNA, 1506 bp, Muscodor strobelii
  misc_feature: SGI cDNA ID NO. 568910
  misc_feature: Encodes the peptide sequence at SEQ ID NO 26080
atggatgctttgggtcttctcaacagtgcttttaccggctatggagtctctaccgttttatttgccctagtacttgctacttgcacatttgttgctcgtttcttagtatcatatatcactgcacgctctcaatttcctggccctccagtcaagaattttctgattggcaatcttgatcagaccatggctgacgatgtgcatgagaaatggctggaatggaatcggcagtatggccgagtcttccaaacttggaatggcctactctctcgtgtgatatacatcggcgagccacggatcattgcggaaatagccactgcgaattggcctaaatccgcagagcagtacgatggttttcgacctcttgacggtgatgctcttttcgtgcaaaccaacatgcacagatggaaaatacagaggaagcggctcgctcctgcattccaaccacaggtcattcagaagcaatattcgtcattggctaagcatatcgggaatcttgttcgtcagcttgaccttgccgcgatgcagaggaagacaatagacctcagctcgctaaatatcctattatccattgacttcgttggtgacattgcgttcggctcggaatttcacgccctgaatcaaggtccaacatgtcgcatcctacagttgctagaaatgatcttgccggagctaatgaagtgtggacttttccctcttagagcaaagatccctatcctgcagaaaaccagaatcatgcacagcgccatcgcggagctgagaagtctggcggaagacgcggtcaagtcctctcgccaaagacaggccattgacgaagacggtctcaaacccaacaagaagatcttcgaaatcctggcattacagaaggagtcagacgggaactacacgtttaatgaaatagaactgcgtgataactacattgcattcttagttgccggaggcgatccgactgctcacaccatgtcctttgcagtataccaagtactcactcaccccgacgtttaccagaaactgagagctgagatagacgccaatgttccgttcgacacacaggtcccatctctggagcaagtcgcacttccctatcttggaatggtaatcaaagaaacactacgattcagctcaccaggttttggtacattcagggtctgcacaaaagatacaactgttgcaggcgtgacattaccggccaatactactctggcgttgtggaacccagcagtgcaccgagaccccggcctttggaaagatgccgacaagttcgaccctgaacgttggcgagttggaacacctgatagtgagcggggatcttattttcctttctcccacggtccgagaagctgcatcgggaaaggcctggccatgctggaaatgactctcactctggcgactctctttcgacggtatgatctgtgtctagagcctggattcaaattggaatatctgcctagcttcacgctgaagccaaaaaacggcctaccagtacgggtcatgctgcaggagaagtga

SEQ ID NO: 26080 - protein, 501 aa, Muscodor strobelii
  misc_feature: SGI Peptide ID NO. 568910
  misc_feature (46)..(495): Pfam Id: PF00067 Pfam Desc: Cytochrome P450
  misc_feature (133)..(495): Pfam Id: PF00067 Pfam Desc: Cytochrome P450
  misc_feature (30)..(478): NCBI GI: 189207330 Blast Desc: cytochrome P450 46A1 [Pyrenophora tritici-repentis Pt-1C-BFP] gi|187976092|gb|EDU42718.1| cytochrome P450 46A1 [Pyrenophora tritici-repentis Pt-1C-BFP]
  misc_feature (16)..(501): NCBI GI: 156376624 Blast Desc: [Nematostella vectensis] gi|156217481|gb|EDO38396.1| [Nematostella vectensis]
  misc_feature (43)..(492): NCBI GI: 156387936 Blast Desc: [Nematostella vectensis] gi|156221541|gb|EDO42395.1| [Nematostella vectensis]
  misc_feature (43)..(492): NCBI GI: 156387938 Blast Desc: [Nematostella vectensis] gi|156221542|gb|EDO42396.1| [Nematostella vectensis]
  misc_feature (28)..(497): NCBI GI: 118092162 Blast Desc: [Gallus gallus]
  misc_feature (14)..(496): NCBI GI: 49900541 Blast Desc: Cyp46a1 protein [Danio rerio]
  misc_feature (14)..(496): NCBI GI: 148726341 Blast Desc: novel protein (zgc:109896) [Danio rerio]
  misc_feature (25)..(492): NCBI GI: 187608754 Blast Desc: LOC100145328 [Xenopus (Silurana) tropicalis] gi|169641874|gb|AAI60534.1| LOC100145328 protein [Xenopus (Silurana) tropicalis]
  misc_feature (20)..(496): NCBI GI: 66472706 Blast Desc: cytochrome P450, family 46, subfamily A, polypeptide 1 [Danio rerio] gi|63100522|gb|AAH95036.1| Cytochrome P450, family 46, subfamily A, polypeptide 1 [Danio rerio] Cyp46a1 protein
  misc_feature (17)..(488): NCBI GI: 237511755 Blast Desc: cytochrome P450 family 46 subfamily A polypeptide 1 [Mesocricetus auratus]
  misc_feature (28)..(488): SWISSPROT Homolog: EC 1.14.13.98 Cholesterol 24-hydroxylase
MDALGLLNSAFTGYGVSTVLFALVLATCTFVARFLVSYITARSQFPGPPVKNFLIGNLDQTMADDVHEKWLEWNRQYGRVFQTWNGLLSRVIYIGEPRIIAEIATANWPKSAEQYDGFRPLDGDALFVQTNMHRWKIQRKRLAPAFQPQVIQKQYSSLAKHIGNLVRQLDLAAMQRKTIDLSSLNILLSIDFVGDIAFGSEFHALNQGPTCRILQLLEMILPELMKCGLFPLRAKIPILQKTRIMHSAIAELRSLAEDAVKSSRQRQAIDEDGLKPNKKIFEILALQKESDGNYTFNEIELRDNYIAFLVAGGDPTAHTMSFAVYQVLTHPDVYQKLRAEIDANVPFDTQVPSLEQVALPYLGMVIKETLRFSSPGFGTFRVCTKDTTVAGVTLPANTTLALWNPAVHRDPGLWKDADKFDPERWRVGTPDSERGSYFPFSHGPRSCIGKGLAMLEMTLTLATLFRRYDLCLEPGFKLEYLPSFTLKPKNGLPVRVMLQEK

SEQ ID NO: 26081 - DNA, 375 bp, Muscodor strobelii
  misc_feature: SGI EST ID NO. CUFF.61520.0
  misc_feature: Variant of the nucleotide sequence at SEQ ID NO 26079
ccggcctttggaaagatgccgacaagttcgaccctgaacgttggcgagttggaacacctgatagtgagcggggatcttattttcctttctcccacggtccgagaagctgcatcgggaaaggcctggccatgctggaaatgactctcactctggcgactctctttcgacggtatgatctgtgtctagagcctggattcaaattggaatatctgcctagcttcacgctgaagccaaaaaacggcctaccagtacgggtcatgctgcaggagaagtgaggagattatattcggtcagttgaaaaaggtagaaaagcatgtggctgaagaaagacaaatattgtatgctaaccgtcactttacattatacacgtctttt

SEQ ID NO: 26082 - DNA, 744 bp, Muscodor strobelii
  misc_feature: SGI cDNA ID NO. 568911
  misc_feature: Encodes the peptide sequence at SEQ ID NO 26083
atgtcatcggctgcgaatcttgacatgaacggcattctgccatcgaagaaagtattcttctttaatgtaggcgccggtgtgcataaacatatggcagatctgatccacgattatttcgaacgctacctagatataccacgatatgaagccataaaacttcaccagacatactacaaagtctacgggctagcagtcacgggcttggtccgtcatcatcatattgatgcattgcatttcaatgctgaggtagatgacgcattacctttggacgatcttatcaagccaaggccggaattgaacaagctcctacaagatatcgaccgaagcaaagtgaagctatggctttttaccaacgcctatgtaacgcatgcccgacgggtcgtgcgattactaggagtcgaggacttctttgaaggcataacctactgcgactacgccacacttccatttgtctgtaagcctcatgaagacatgtatgtcaaagcaatgagggaggcaaggaccggtggagtggaagactgttacttcgtcgacgactcttggggtaattgtaacactgcacaacagcttgggtggaacactgctcatttagacgaggaaggaaatgtagatacaaggagccaggtctctggacatgagattcaacatcttaatgagctccgaaacatttttcccgagctgttcaccgaggctgagagctcggaatacttgaatggttgtagaggacaacgggttcgaacgtaa

SEQ ID NO: 26083 - protein, 247 aa, Muscodor strobelii
  misc_feature: SGI Peptide ID NO. 568911
  misc_feature (16)..(200): Pfam Id: PF00702 Pfam Desc: haloacid dehalogenase-like hydrolase
  misc_feature (91)..(200): Pfam Id: PF00702 Pfam Desc: haloacid dehalogenase-like hydrolase
  misc_feature (10)..(230): NCBI GI: 116196410 Blast Desc: CHGG_04803 [Chaetomium globosum CBS 148.51] gi|88180716|gb|EAQ88184.1| CHGG_04803 [Chaetomium globosum CBS 148.51]
  misc_feature (17)..(230): NCBI GI: 145613243 Blast Desc: MGG_01783 [Magnaporthe grisea 70-15] gi|145020362|gb|EDK04491.1| MGG_01783 [Magnaporthe grisea 70-15]
  misc_feature (18)..(232): NCBI GI: 85104893 Blast Desc: NCU05264 [Neurospora crassa OR74A] gi|28923407|gb|EAA32593.1| conserved [Neurospora crassa OR74A]
  misc_feature (12)..(228): NCBI GI: 46123603 Blast Desc: FG06179.1 [Gibberella zeae PH-1]
  misc_feature (31)..(234): NCBI GI: 171688518 Blast Desc: protein product [Podospora anserina] gi|170944221|emb|CAP70331.1| protein product [Podospora anserina]
  misc_feature (10)..(234): NCBI GI: 256726876 Blast Desc: [Nectria haematococca mpVI 77-13-4]
  misc_feature (15)..(228): NCBI GI: 156063586 Blast Desc: SS1G_01911 [Sclerotinia sclerotiorum 1980] gi|154697245|gb|EDN96983.1| SS1G_01911 [Sclerotinia sclerotiorum 1980]
  misc_feature (10)..(233): NCBI GI: 261352206 Blast Desc: SSM1 [Verticillium albo-atrum VaMs.102]
  misc_feature (16)..(231): NCBI GI: 169605757 Blast Desc: SNOG_05905 [Phaeosphaeria nodorum SN15] gi|111065849|gb|EAT86969.1| SNOG_05905 [Phaeosphaeria nodorum SN15]
  misc_feature (16)..(231): NCBI GI: 189198545 Blast Desc: pyrimidine 5'-nucleotidase [Pyrenophora tritici-repentis Pt-1C-BFP] gi|187981558|gb|EDU48184.1| pyrimidine 5'-nucleotidase [Pyrenophora tritici-repentis
MSSAANLDMNGILPSKKVFFFNVGAGVHKHMADLIHDYFERYLDIPRYEAIKLHQTYYKVYGLAVTGLVRHHHIDALHFNAEVDDALPLDDLIKPRPELNKLLQDIDRSKVKLWLFTNAYVTHARRVVRLLGVEDFFEGITYCDYATLPFVCKPHEDMYVKAMREARTGGVEDCYFVDDSWGNCNTAQQLGWNTAHLDEEGNVDTRSQVSGHEIQHLNELRNIFPELFTEAESSEYLNGCRGQRVRT

SEQ ID NO: 26084 - DNA, 3564 bp, Muscodor strobelii
  misc_feature: SGI cDNA ID NO. 568912
  misc_feature: Encodes the peptide sequence at SEQ ID NO 26085
atggatccagaattgaaaacaacgctccaccacgctcagcgtggcctccttatgcggccgatttttggccatacattgactatcttcctgaagcagaaagacagcaagacgaaagactttatgctcgatatcatccataccttggataagaacatcgaagataatcacaatgatgattgtggttttattgtcgcctttgctccagcgctctggagtgaatgggccgcaagaagcataatcatttctacttctgttcttgatcaggggcataatttgaacaatacgggtggtgatatcctggtgtatatcaaagctccgagccctgaaatcgcatcgcagctagcagcgagtacgttgccttcgctagagccacttgttacagacatacagacaatggctctagggaagcgcccagatggccgagtaatagggggccgttacgtggaccacattagcaaccctaacgatcctatcagcttggttgaggatatcctgatttccagcgaagatgtttcccgcggcggcacatttggcctcacgcagaagtttgtttttgactggagcgatatagcttctcagtcaggggacgatcttgacgctgttatcggacgtaggccagacggagaaatcatttcgcagaatgaagtcaacgcgcatgtccatcgcgcccatattcttgataagaatctagatcaacgaaagatgctgagacaagccttacctttcggcgagtccgaggggcttgctagtcgcgaggaggggattatgttcgtcgctttctgcaatgaccaacagcggttcgaggatgtgttgaagaatatgatcggcgatcgtgcggatcgacctctcgataggctgatggactttgtacaaggcgtttcaggaagctactggtatgtaccttcagccaccgagctcaaaatcgctgcagtccgacctggagatgatgttttcgaagatccacactggtctgttcggagttccaacgggtatctcttctataactcccgtgactacatgcatcatatggcgactggacaatacattggaggcgaccctcctactccacgtaccttgagtctcatgtcgagagtattttcgcattggatcgatggttggatgctcaatcagcatttcccacgtctaccacatctgaaggatcagcttattgctactaatcacacgacaatcccgcagtcaattctcgggcgaaaaggactcgccaattttgtgacgctgtcttacctcttatcttcacctcattccaagatcgctcgcgacaatggactgctgcgcatcgctgcaaaggagctcatcgttggtgctattcccgacttctctctcgggcgaggaaaggaagtcgttccttatctggacgaggatgagcaattagctgcttggctcaaggcttccctcgatgagtcttcatctatgggtcacattatacccaactatcagacactcgtcaataagggcctctcgacaattatcgcggatcttcagatacgtgaagaggtctctcgaagacaaaacaatggcctacatgctagcttctatatagcagcgagagaatcgcttagaggcgttcaggactatcttgccaattgggccaaaatttgcagacaagtccacgatcgggcgtcggtgaaacaagacaaggacaacatgttagaagtcatcggacgcttagaacgaattgtaaacgaaccacctactagcttccacgacgcagttcagctgatattctcgttccactgctgccttcatcttgtcggcgagctgacggcctttggtcgtctcgaccagatcctgtggccattcctcgaacgagacttggagaacaaggcaacgactaccactcgtgcacaggagattatcgatcacctctggatcaaggtcggtgagaacgctttcgtaaaccgcgccttcatctatgattataggtcatacggctgcaccacggtcaacggattaggcggtaactttcctcagggcggcggcatcaatcaatgggtacagcagatcaccgttggcgggtataaagcgacggataaagatgcgcctgagggcggcgccaatcccgtcacgctcttatgtctcaaggcggcacgccgcatcccagtgaatgccccatgtctgtcgctacgcgtatacaaggatatgcccccggagtatcttgaagaggcggcgaagtcgattctttccggcggcgcccacccgctgctatataatgacgacaagttgtgcgagggtctcttccgatccggtgagaacgttacccgtcgttggtcacgcgactatgctgcggatggatgcttcgagccactaatgtctggagcatcggacttgacctttggtaacgtcgctcctatgctagctctcgagcaggcgctcaaccgcggtgccacatacggaactgcaggttcaacttatcttcgtgggctgaaacaaacggtcaggtctccgaatgtggaggacatcaaatcatttgcccagctccaggatatttttctcactcagctaaaatggcttaccatccaagcctatagcgttctgttcggcgcctacggtaatctggatggcatctgcccatcaccactactgtcagcagtcctagatggctgcgtcgagtccggacgtgatctaacagctggcggatctaaatttcatgtcattgccctgatgttcattggcgtatccaatactattgactcgctctacgccataaagaaactctgttttgacccggcttcggcgcgcgctacgctgccagaattgctcaaatgtttgatatgtgactggggtttcgacatgatcgagccatatcaggacgccggtctgggtccgactaatgcggcagagaagtcggtgcgatataaagagctgcgaaaggaagcgttggatctgcccaagtgggctagtgggagaggtgataaggagctgaaggagttgggcgtgtggctcatcgacaacatggtacgcctttgcgttaacactatccgaaacccgccatccgttctacaggcttctttagatcgtatcaaagataattatggccccgactttgagtttgtggttacaccaggcgtcggcactttcgagggctacgttggtgatggcctagcgtgcggtgcctcggccgacggtcgccgaaagggcatgccattggcgtcagacatgtctcctgtaccggctccacaggatctgcccgcgtccccggcgcaatgtgatatatacaaagcgatggacagttacgcgaccgatgaaatcgatatcgggctatcgaacgcggcgcctgtggacctgaacatttctgagcggttctcgctgggtcaattgaagaagttcatcacggactttgctcagggcaaagtgggaggaaactacttgacgttgacatgcgcagatctagaaacgtacaggaaggcgtctgaggatgacgagaagtataatcttcttcgtgtacgcatgggtgggtggtcggaattctactctgtcatgttccccgaataccaagagcattcacagcgaaggcaatactttgaagtgcaaggagagtcttaa

SEQ ID NO: 26085 - protein, 1187 aa, Muscodor strobelii
  misc_feature: SGI Peptide ID NO. 568912
  misc_feature (314)..(1019): Pfam Id: PF02901 Pfam Desc: Pyruvate formate lyase
  misc_feature (153)..(306): Pfam Id: PF04261 Pfam Desc: Dyp-type peroxidase family
  misc_feature (565)..(633): Pfam Id: PF02901 Pfam Desc: Pyruvate formate lyase
  misc_feature (5)..(1181): NCBI GI: 116206084 Blast Desc: CHGG_02335 [Chaetomium globosum CBS 148.51] gi|88182932|gb|EAQ90400.1| CHGG_02335 [Chaetomium globosum CBS 148.51]
  misc_feature (12)..(1180): NCBI GI: 260799876 Blast Desc: BRAFLDRAFT_132834 [Branchiostoma floridae] gi|229280135|gb|EEN50908.1| BRAFLDRAFT_132834 [Branchiostoma floridae]
  misc_feature (63)..(1180): NCBI GI: 260803037 Blast Desc: BRAFLDRAFT_76215 [Branchiostoma floridae] gi|229281653|gb|EEN52410.1| BRAFLDRAFT_76215 [Branchiostoma floridae]
  misc_feature (3)..(1178): NCBI GI: 260803047 Blast Desc: BRAFLDRAFT_76220 [Branchiostoma floridae] gi|229281658|gb|EEN52415.1| BRAFLDRAFT_76220 [Branchiostoma floridae]
  misc_feature (81)..(1178): NCBI GI: 262279692 Blast Desc: formate acetyltransferase [Acinetobacter calcoaceticus RUH2202] gi|262260043|gb|EEY78776.1| formate acetyltransferase [Acinetobacter calcoaceticus RUH2202]
  misc_feature (6)..(1180): NCBI GI: 83747891 Blast Desc: Formate acetyltransferase [Ralstonia solanacearum UW551] gi|83725424|gb|EAP72570.1| Formate acetyltransferase [Ralstonia solanacearum UW551]
  misc_feature (6)..(1180): NCBI GI: 207739281 Blast Desc: RSIPO_03983 [Ralstonia solanacearum IPO1609] gi|206592654|emb|CAQ59560.1| conserved [Ralstonia solanacearum IPO1609]
  misc_feature (146)..(1180): NCBI GI: 17546265 Blast Desc: RSc1546 [Ralstonia solanacearum GMI1000] gi|17428562|emb|CAD15248.1| conserved [Ralstonia solanacearum GMI1000]
  misc_feature (13)..(1079): NCBI GI: 221106031 Blast Desc: , partial [Hydra magnipapillata]
  misc_feature (478)..(1180): NCBI GI: 207724621 Blast Desc: (partial sequence c terminus) [Ralstonia solanacearum MolK2] gi|206589843|emb|CAQ36804.1| (partial sequence c terminus) [Ralstonia solanacearum]
  misc_feature (457)..(1173): SWISSPROT Homolog: EC 2.3.1.54 Formate C-acetyltransferase
MDPELKTTLHHAQRGLLMRPIFGHTLTIFLKQKDSKTKDFMLDIIHTLDKNIEDNHNDDCGFIVAFAPALWSEWAARSIIISTSVLDQGHNLNNTGGDILVYIKAPSPEIASQLAASTLPSLEPLVTDIQTMALGKRPDGRVIGGRYVDHISNPNDPISLVEDILISSEDVSRGGTFGLTQKFVFDWSDIASQSGDDLDAVIGRRPDGEIISQNEVNAHVHRAHILDKNLDQRKMLRQALPFGESEGLASREEGIMFVAFCNDQQRFEDVLKNMIGDRADRPLDRLMDFVQGVSGSYWYVPSATELKIAAVRPGDDVFEDPHWSVRSSNGYLFYNSRDYMHHMATGQYIGGDPPTPRTLSLMSRVFSHWIDGWMLNQHFPRLPHLKDQLIATNHTTIPQSILGRKGLANFVTLSYLLSSPHSKIARDNGLLRIAAKELIVGAIPDFSLGRGKEVVPYLDEDEQLAAWLKASLDESSSMGHIIPNYQTLVNKGLSTIIADLQIREEVSRRQNNGLHASFYIAARESLRGVQDYLANWAKICRQVHDRASVKQDKDNMLEVIGRLERIVNEPPTSFHDAVQLIFSFHCCLHLVGELTAFGRLDQILWPFLERDLENKATTTTRAQEIIDHLWIKVGENAFVNRAFIYDYRSYGCTTVNGLGGNFPQGGGINQWVQQITVGGYKATDKDAPEGGANPVTLLCLKAARRIPVNAPCLSLRVYKDMPPEYLEEAAKSILSGGAHPLLYNDDKLCEGLFRSGENVTRRWSRDYAADGCFEPLMSGASDLTFGNVAPMLALEQALNRGATYGTAGSTYLRGLKQTVRSPNVEDIKSFAQLQDIFLTQLKWLTIQAYSVLFGAYGNLDGICPSPLLSAVLDGCVESGRDLTAGGSKFHVIALMFIGVSNTIDSLYAIKKLCFDPASARATLPELLKCLICDWGFDMIEPYQDAGLGPTNAAEKSVRYKELRKEALDLPKWASGRGDKELKELGVWLIDNMVRLCVNTIRNPPSVLQASLDRIKDNYGPDFEFVVTPGVGTFEGYVGDGLACGASADGRRKGMPLASDMSPVPAPQDLPASPAQCDIYKAMDSYATDEIDIGLSNAAPVDLNISERFSLGQLKKFITDFAQGKVGGNYLTLTCADLETYRKASEDDEKYNLLRVRMGGWSEFYSVMFPEYQEHSQRRQYFEVQGES

SEQ ID NO: 26086 - DNA, 390 bp, Muscodor strobelii
  misc_feature: SGI cDNA ID NO. 568913
  misc_feature: Elevated expression when VOC is produced
  misc_feature: Encodes the peptide sequence at SEQ ID NO 26087
atgtctgactacttcgaacaatactttttcgacgtcaacgcaccatggggcccccctgagccgatgttcgatctcggcgaaaccagtagcgctcctgttgtccaagctcctgttgctggacaacaggaactgcctagccacgactttgaccttgatcattactttgacccaggaatgagcaatggtttcgcccttcatgacgagccccttgaaggcggccttgacctggactacaccgctcccatcggtcagccaggggttggattgcctgacttccaccctaatcttgagcccgatggcacgtcaaacttcggcttcaatcctgattcgatcttacccctgcagacgcctctgcagctttacgccaccgcgcccaacgaccaatcgtga

SEQ ID NO: 26087 - protein, 129 aa, Muscodor strobelii
  misc_feature: SGI Peptide ID NO. 568913
  misc_feature: Useful for introducing or modulating the production of volatile compounds
MSDYFEQYFFDVNAPWGPPEPMFDLGETSSAPVVQAPVAGQQELPSHDFDLDHYFDPGMSNGFALHDEPLEGGLDLDYTAPIGQPGVGLPDFHPNLEPDGTSNFGFNPDSILPLQTPLQLYATAPNDQS

SEQ ID NO: 26088 - DNA, 2193 bp, Muscodor strobelii
  misc_feature: SGI EST ID NO. CUFF.61549.0
  misc_feature: Variant of the nucleotide sequence at SEQ ID NO 26086
cgcccctcgactcctttctggccaacactgctttcacacacattcttctttctgcaagtactcttctctgttcatcacagccaatcacatacgcactcgcatacttcggtctctcgccgcttcaacgacaagatgtctgactacttcgaacaatactttttcgacgtcaacgcaccatggggcccccctgagccgatgttcgatctcggcgaaaccagtagcgctcctgttgtccaagctcctgttgctggacaacaggaactgcctagccacgactttgaccttgatcattactttgacccaggaatgagcaatggtttcgcccttcatgacgagccccttgaaggcggccttgacctggactacaccgctcccatcggtcagccaggggttggattgcctgacttccaccctaatcttgagcccgatggcacgtcaaacttcggcttcaatcctgattcgatcttacccctgcagacgcctctgcagctttacgccaccgcgcccaacgaccaatcgtgagaagttttttttttagcacttgctaacaaaaagggtgttaagtcctggctcgttggcattcttgactttgaagcctaatgcctgggaccgagaggtctctaccacatcaggcacatgctctcctattcaggcaatgcgaggtttcaaagaatgcacaatctgcaacagaaattttcactctcttttggcgctcgattaccattgccgcttgaattttcacgatggaattgagtgtgattttccaagctgcaacgatcggttttttaattcagcgcagcttgctgcccataaggctgttccacatcttccacaacatcgtctcatctttggctgccagaatgcattcgtttgcggtcaatgcggtcaggaatttaagaaccatacgcaacttcagtcacatgcaaacagtcagaaacacactccttttcaatgctcgtgtggggtgaaatttgtgaggatcgatgtggctcatcgtcacatcaagagtttcagcaaaggaagttctaaatacccgtgtacatactgcaaacgacaccgcggcaagcaggcgttccgccggagagatcacttagtccaacaccttcgaggttaccacaagtttgatcaggatgatattgatcaagcttgtcctgtaacccgctctgtggagagtcgtcaggttctgacttgtcctcatgaagggtgtgagtcttaccgtgacgccgaattcctctctttgccatggaaagaacaagaatcacagaggcctttcaaaaaacaatccgactacaacaaacacatgagggttgtacacgaagagagcccgttcccctgtcgctcatctggctgtgaccgggtcggggcaaagggttacatgcgcgaaaaggatttaatgaagcacattactgacaaacacccggatgcaccgagatacactcctggggaagcccctcgtcgcaaatacatttgtgatctgtgcggcatgggactagctacactccagtcgctccgatacgaccaccgcgatagatatcattgtcttgagaggcaacaaaaaatgaaggcgcacgaaaattgaactttccaaggtcaacaatcttgatatgcaagctcaagccaagtttgaagccgcgcccagagatgccagtactttgatgaacgttgggcttagatcaacaattaccgccgatgtaagcacttctgttggaacacagtcacgatctgtgctttggcagttggttatcacccctcaaaatgcacatactttttatctcgccatattctttcatcgtttcccatattagcctacgtgttcagaagacatcccgtcggaagcggaaatttttgaacatatgaaagtatcttggttagtttgttggttatgaaagggttctaaggaaagtgaggaactctcgggagctattccacgagcatgatagacgtcggaatgcaaagatctagtgtaaactgggcaacattagagattcagtctatatggttttccctgaacaggatggtagctcacgggttttcccatataggcagtgcctcaagtgaggactgtgcgaatgcgctgacgcggattgaaaagagcattttcagcgatgtcaagtctatgttatagtagagaatgatttgaataaattatagcaatgattacgccatcatcaacgcccaattattgctcgtatg

SEQ ID NO: 26089 - DNA, 3111 bp, Muscodor strobelii
  misc_feature: SGI cDNA ID NO. 568914
  misc_feature: Reduced expression when VOC is produced
  misc_feature: Encodes the peptide sequence at SEQ ID NO 26090
atgaataagccatggctccgtgccattcgctcggcggcactgaacccgcgacttacgcaaaactcgccgcgatcgacgcgagttttccacacgtcctttcccacaagatggccaaccgacaatggaaacgatccaagcggcgatggcaacaagcctaatgataacagtggaagcggaaaaaatgttagcacagaggagaagctcttcgaggatcccagctcggcagcaaacggcgaaagtcatggccgcaaaagacctgctgccggactaaggtcacgggctcaacggaatcggaaatccgagcttcctgccgttcaaataccccagtcttttctcgatctctcgattactcgccatgaagatattaagataggaaacctagaggggcaggacaaacaggccaagtctatagaagagactcatgacgagttgcgccagctgctcgagcaatatcctcattcggtagaaagtacaagccgtgggttcattgatgtcatgtctttctatacgttcgtgccgcagaactacagcggtcgcagcgcccagcaactatctgacgaaccgtaccttggtcaaaaatatctcaatattttgaacgcttctttcatcctggctttgaaaaccaatacgcaagccaacgatgagagtaggcctttagatcccatgcacacagaactgctatacagagtatctgaagatactggtcgatctcctgcttcagattggatggaattatggcgagaatatcatcatccgtcgttcgaggccgtgcgtaggagcatagttctctcgcgtctagcgttcgagcaatcgacgagagcaaaaattgatgagtcagatcttagtctgatccggtcttatttgccgggacgccagaccctattcctatcacacggcacccttcaggagatcaatcttgctatccttggcgatctgagcgtgcaggcccccaaagatatccggcttgcaaatttgcatcggcctgttactattatagatatgccagactgcaccggctattctttggccaagtccgtaatccatctcgctgcaaaggaagctggtgccgatgtcttgcatctgcgagctgcggatatcgcacatatcgtgggaatctatcttagccaagacgtaacaagaacccccggtgacatatcccttatgggatacaaggcggcagaaaatgcaagtagaatcaagtatccccaacaacgtcaagaagaacaggacgcgggtgaattcttgaacatccctgtttccattacagtacgcggccagaggtcacgcgatgaaatgagacggcaaactgtctcaatggatgagtacctactgaactcaggtacgcgtgggaaaagcgatgagctttgggaggagatgaagatcaatgctgccttagacgaactcgttcattcagccgatttggacggggccgaacaaaaaccacttcttgttcatattcacgatttcacctcattagaaatggatccagactatggctcggcaatcattgctaaacttcgaaagattgttgacgcactatggacaacaagccgaaaagttgcacttgttgggacctgctcgtctaaagatacttcaaacatctacagaaagactctggcaggtttggagaagacggaccgagtaattcgcctttctacagagagagatatctcggcaattcggcagagtctagacgagactgacaggcgagacgctctccgtgagaatgacgagaatctactcagggtacttcaatcaatgtccgaagcaagcaccacagtccaagcacctgttacgagcactcttggattaagcgagaaagtgacacttgataggcgtggtcgttggcctaatttatcagataggcttcagccaatcaacatattacccttgaccgagatacatcgcatcgccaccactatgtttgcgttagccacaaggcgtgacgacaaaatcttgaattatgaccattttgaggcagccatgaccttactgtcgaagtctcagctggacaggaatgcgtccgtatttggtgttagagactctaatggctcaagtcgtaatccttcccagacgaattcatcggccgcgcaaagaaacaatccttaccaggaaaaccacgaagagaagcttctctctggaatggtgaaagctgaggatttacgcacgacattcaaagatatacacgcgcccaaagagacacttgattcgatcaaaatgcttacgacgctatctctcgttcgtcccgaagccttctcgtacggagtcttagccagcgataggatccctggttgtcttctctacggtccgccaggtacgggtaagacgttgcttgcaaaagcagtagctaaggagagcggcgcaaacatgatcgaagtcagcggtgcgtctataaatgccatgtgggtaggcgaaagcgagaagaacgtgcgtgctttattccgactagcgaagaaaaaagagcctatggtcatattcatcgatgaggctgatgcgctacttggcgctcgtggtgctggtcgggatagtggcggtaggagacagacgataaaccagttcttgcgcgaatgggatggcatggataggatgaaggccttcatcatggttgcgacgaatcggccgtttgatctcgatgaggctgttctcagacgtctcccgcggaagatcttggttgatttgcctcttgaggctgatcgtgctgcgatcttgaagatacatctcaaggatgagcagctcgatgacaccgtgtctcttgaagacctcgctaaacagactccgctgtattctggctcggatcttaagaatatgtgcgttgcggctgctatggcggctgtgaaagaggaacttgatgcttttgaggctcatgaagggcccgaggagtatgtctgggctcagaaacgagttctgaataagaggcactttgataaaggactcaaggagatcggcgccagtgtctccgaggatatggagacgttgactgccataagaaagttcgatcagagatatggagatggaaaggaaaagaaaaagaggaagggtatgggctttgaggttgtgcctgaagctaaagattcggagggcgcgagagttaggaaagcgccttctccttga

SEQ ID NO: 26090 - protein, 1036 aa, Muscodor strobelii
  misc_feature: SGI Peptide ID NO. 568914
  misc_feature (764)..(946): Pfam Id: PF00004 Pfam Desc: ATPase family associated with various cellular activities (AAA)
  misc_feature (301)..(1033): NCBI GI: 261354874 Blast Desc: spastin [Verticillium albo-atrum VaMs.102]
  misc_feature (306)..(1032): NCBI GI: 116204757 Blast Desc: CHGG_10262 [Chaetomium globosum CBS 148.51] gi|88176390|gb|EAQ83858.1| CHGG_10262 [Chaetomium globosum CBS 148.51]
  misc_feature (43)..(1032): NCBI GI: 171690244 Blast Desc: protein product [Podospora anserina] gi|170945070|emb|CAP71181.1| protein product [Podospora anserina]
  misc_feature (300)..(1032): NCBI GI: 85110419 Blast Desc: NCU05459 [Neurospora crassa OR74A] gi|7801053|emb|CAB91448.1| related to MSP1 protein [Neurospora crassa] gi|28925131|gb|EAA34214.1| conserved [Neurospora crassa
  misc_feature (300)..(1033): NCBI GI: 256729412 Blast Desc: [Nectria haematococca mpVI 77-13-4]
  misc_feature (454)..(1034): NCBI GI: 154296359 Blast Desc: BC1G_13006 [Botryotinia fuckeliana B05.10] gi|150843464|gb|EDN18657.1| BC1G_13006 [Botryotinia fuckeliana B05.10]
  misc_feature (327)..(1035): NCBI GI: 145608348 Blast Desc: MGG_03191 [Magnaporthe grisea 70-15] gi|145015827|gb|EDK00317.1| MGG_03191 [Magnaporthe grisea 70-15]
  misc_feature (454)..(1029): NCBI GI: 156055944 Blast Desc: SS1G_05324 [Sclerotinia sclerotiorum 1980] gi|154703108|gb|EDO02847.1| SS1G_05324 [Sclerotinia sclerotiorum 1980]
  misc_feature (476)..(1016): NCBI GI: 240107169 Blast Desc: ATPase, AAA family protein [Coccidioides posadasii C735 delta SOWgp]
  misc_feature (476)..(1016): NCBI GI: 119190207 Blast Desc: CIMG_05151 [Coccidioides immitis RS]
  misc_feature: Useful for introducing or modulating the production of volatile compounds
MNKPWLRAIRSAALNPRLTQNSPRSTRVFHTSFPTRWPTDNGNDPSGDGNKPNDNSGSGKNVSTEEKLFEDPSSAANGESHGRKRPAAGLRSRAQRNRKSELPAVQIPQSFLDLSITRHEDIKIGNLEGQDKQAKSIEETHDELRQLLEQYPHSVESTSRGFIDVMSFYTFVPQNYSGRSAQQLSDEPYLGQKYLNILNASFILALKTNTQANDESRPLDPMHTELLYRVSEDTGRSPASDWMELWREYHHPSFEAVRRSIVLSRLAFEQSTRAKIDESDLSLIRSYLPGRQTLFLSHGTLQEINLAILGDLSVQAPKDIRLANLHRPVTIIDMPDCTGYSLAKSVIHLAAKEAGADVLHLRAADIAHIVGIYLSQDVTRTPGDISLMGYKAAENASRIKYPQQRQEEQDAGEFLNIPVSITVRGQRSRDEMRRQTVSMDEYLLNSGTRGKSDELWEEMKINAALDELVHSADLDGAEQKPLLVHIHDFTSLEMDPDYGSAIIAKLRKIVDALWTTSRKVALVGTCSSKDTSNIYRKTLAGLEKTDRVIRLSTERDISAIRQSLDETDRRDALRENDENLLRVLQSMSEASTTVQAPVTSTLGLSEKVTLDRRGRWPNLSDRLQPINILPLTEIHRIATTMFALATRRDDKILNYDHFEAAMTLLSKSQLDRNASVFGVRDSNGSSRNPSQTNSSAAQRNNPYQENHEEKLLSGMVKAEDLRTTFKDIHAPKETLDSIKMLTTLSLVRPEAFSYGVLASDRIPGCLLYGPPGTGKTLLAKAVAKESGANMIEVSGASINAMWVGESEKNVRALFRLAKKKEPMVIFIDEADALLGARGAGRDSGGRRQTINQFLREWDGMDRMKAFIMVATNRPFDLDEAVLRRLPRKILVDLPLEADRAAILKIHLKDEQLDDTVSLEDLAKQTPLYSGSDLKNMCVAAAMAAVKEELDAFEAHEGPEEYVWAQKRVLNKRHFDKGLKEIGASVSEDMETLTAIRKFDQRYGDGKEKKKRKGMGFEVVPEAKDSEGARVRKAPSP

SEQ ID NO: 26091 - DNA, 3812 bp, Muscodor strobelii
  misc_feature: SGI EST ID NO. CUFF.61552.0
  misc_feature: Variant of the nucleotide sequence at SEQ ID NO 26089
caatttcacatcgccatgcctgcgccagctcttccagagcgccaattgcccacatgaataagccatggctccgtgccattcgctcggcggcactgaacccgcgacttacgcaaaactcgccgcgatcgacgcgagttttccacacgtcctttcccacaagatggccaaccgacaatggaaacgatccaagcggcgatggcaacaagcctaatgataacagtggaagcggaaaaaatgttagcacagaggagaagctcttcgaggatcccagctcggcagcaaacggcgaaagtcatggccgcaaaagacctgctgccggactaaggtcacgggctcaacggaatcggaaatccgagcttcctgccgttcaaataccccagtcttttctcgatctctcgattactcgccatgaagatattaagataggaaacctagaggggcaggacaaacaggccaagtctatagaagagactcatgacgagttgcgccagctgctcgagcaatatcctcattcggtagaaagtacaagccgtgggttcattgatgtcatgtctttctatacgttcgtgccgcagaactacagcggtcgcagcgcccagcaactatctgacgaaccgtaccttggtcaaaaatatctcaatattttgaacgcttctttcatcctggctttgaaaaccaatacgcaagccaacgatgagagtaggcctttagatcccatgcacacagaactgctatacagagtatctgaagatactggtcgatctcctgcttcagattggatggaattatggcgagaatatcatcatccgtcgttcgaggccgtgcgtaggagcatagttctctcgcgtctagcgttcgagcaatcgacgagagcaaaaattgatgagtcagatcttagtctgatccggtcttatttgccgggacgccagaccctattcctatcacacggcacccttcaggagatcaatcttgctatccttggcgatctgagcgtgcaggcccccaaagatatccggcttgcaaatttgcatcggcctgttactattatagatatgccagactgcaccggctattctttggccaagtccgtaatccatctcgctgcaaaggaagctggtgccgatgtcttgcatctgcgagctgcggatatcgcacatatcgtgggaatctatcttagccaagacgtaacaagaacccccggtgacatatcccttatgggatacaaggcggcagaaaatgcaagtagaatcaagtatccccaacaacgtcaagaagaacaggacgcgggtgaattcttgaacatccctgtttccattacagtacgcggccagaggtcacgcgatgaaatgagacggcaaactgtctcaatggatgagtacctactgaactcaggtacgcgtgggaaaagcgatgagctttgggaggagatgaagatcaatgctgccttagacgaactcgttcattcagccgatttggacggggccgaacaaaaaccacttcttgttcatattcacgatttcacctcattagaaatggatccagactatggctcggcaatcattgctaaacttcgaaagattgttgacgcactatggacaacaagccgaaaagttgcacttgttgggacctgctcgtctaaagatacttcaaacatctacagaaagactctggcaggtttggagaagacggaccgagtaattcgcctttctacagagagagatatctcggcaattcggcagagtctagacgagactgacaggcgagacgctctccgtgagaatgacgagaatctactcagggtacttcaatcaatgtccgaagcaagcaccacagtccaagcacctgttacgagcactcttggattaagcgagaaagtgacacttgataggcgtggtcgttggcctaatttatcagataggcttcagccaatcaacatattacccttgaccgagatacatcgcatcgccaccactatgtttgcgttagccacaaggcgtgacgacaaaatcttgaattatgaccattttgaggcagccatgaccttactgtcgaagtctcagctggacaggaatgcgtccgtatttggtgttagagactctaatggctcaagtcgtaatccttcccagacgaattcatcggccgcgcaaagaaacaatccttaccaggaaaaccacgaagagaagcttctctctggaatggtgaaagctgaggatttacgcacgacattcaaagatatacacgcgcccaaagagacacttgattcgatcaaaatgcttacgacgctatctctcgttcgtcccgaagccttctcgtacggagtcttagccagcgataggatccctggttgtcttctctacggtccgccaggtacgggtaagacgttgcttgcaaaagcagtagctaaggagagcggcgcaaacatgatcgaagtcagcggtgcgtctataaatgccatgtgggtaggcgaaagcgagaagaacgtgcgtgctttattccgactagcgaagaaaaaagagcctatggtcatattcatcgatgaggctgatgcgctacttggcgctcgtggtgctggtcgggatagtggcggtaggagacagacgataaaccagttcttgcgcgaatgggatggcatggataggatgaaggccttcatcatggttgcgacgaatcggccgtttgatctcgatgaggctgttctcagacgtctcccgcggaagatcttggttgatttgcctcttgaggctgatcgtgctgcgatcttgaagatacatctcaaggatgagcagctcgatgacaccgtgtctcttgaagacctcgctaaacagactccgctgtattctggctcggatcttaagaatatgtgcgttgcggctgctatggcggctgtgaaagaggaacttgatgcttttgaggctcatgaagggcccgaggagtatgtctgggctcagaaacgagttctgaataagaggcactttgataaaggactcaaggagatcggcgccagtgtctccgaggatatggagacgttgactgccataagaaagttcgatcagagatatggagatggaaaggaaaagaaaaagaggaagggtatgggctttgaggttgtgcctgaagctaaagattcggagggcgcgagagttaggaaagcgccttctccttgatgggggttttggggatgtacaatatgctgtactatagtatatacccggctactggcttttggtagaagagtaggctaagcagtgtgtttaccactacttactccccaaggagagctggtgttttagaggtggtagttcaatagacagcatttgaaagagtcaggtcatgtcttatgatgaagcggctctgggtacgtcatatcttcaagaagtttataaactcattcattaacctcgagacatagttgagagagatttccaccgtcatttcgtcctgtattgggttctctagctgttgccaacaattgaacattacgcaatagtaggctcgtagaaccgttttcactctcaaatcattgtatcaatgaagatagtaagactacgaagcgctctacgaagagattgtaagtgcatcatgagccagtagatggtggtgagcttgaatgtttgtgtgtggggtcgatcatctccttctacgaccgtgttttcgtagactcggcactttcatgtcaccgcgtccaacagctaagattgcaaatgcgttgtttcttgctatttttcttctcacatatgcagacttaacggtacgtagctctccaatcaatacagagttccttgaacaacttcacattgcccatactatagggc

SEQ ID NO: 26092 - DNA, 6423 bp, Muscodor strobelii
  misc_feature: SGI cDNA ID NO. 568915
  misc_feature: Encodes the peptide sequence at SEQ ID NO 26093
atggccacatggaaggagcttggcgaggtgccagattcggaagacgaaggcggctgggatagcagtcaagagtctcttcacgatctcccctcgccaccacatatcagtcaagatgcgccccacgatgcagataatgcgaggtttacagatgcgaatgtcgacagcgttgaaagagcgaccatttgggacgtccctcactcatctcagagcctagacgaggcacctgatgtccacaacctggaggactcaaatataacactgatatcatatacgcctcccgctctgctagagtcgccacctcccccaccgtctgttgagagtcttagcgacattgacatcactgaacatttggacgacaacgatactttgactctgccagactacgaagcgtcgctcccacagcccacgctcaatcctccgatagacgaacatgaagccccactttcacagaatgatacaccagtctcacctccacgtatcaatttcgaagtccagattccttctgctgttctggacattgcgcagcttgaggccgagaacttccagcgaggacgatcatttcgaccgcgaaagccaattcaggagcatccgtatcttctggaaaatgttcaatatagcaagaccctaaaatctcacggtctacgacccgtgcgcatgcagattgaggaagagagaagaaagcgtcaagaagaagattctcaagagcaggattacgaagaagatagtcagctcacggacaagaataccggcaacgtagagactgaagaaagtcaggagctaggcccattggaccctggaagtgatgtagaactccaagcactatcagacgatggagagccatcaccgtctccgctatctcgcgtaacaacgcctgtcgccaatttgggaagctccgaagacgaagacgacgatctaccggatactgcagacatagacaagtggagaaagaaattgactgcacaaaaaactcgcaagcgccaacactcagtagcagtcgtctcgaagaagaagcttgtgaaatatacgaattcttctcggccaatggatgatactcttgctttaccacgagtagaggatatcttcgacattcctgcctcgccgccccagacaagcccgactgctctgatcgccacgccgatggctgccctgaaccgaatgggccccgcgtccgtcgctattttgaccccgaagccaagtagtaacttttcatcaagaatgcacagtcctgcacctgcaaacgaacatagcgacctggttgatctgacaacgctcgagaatgaggacgatagcgacaaacaagtctcagaaaactccggtagcgaatcagatgagcagatacggcgtattgcgaaaagaatgcgcaaagtgctaccagcatcttgggttcgtcttgatcagcaatcatccacaaggaagaaaaagcctgctccgcgccaaaagagtccagatgcgtcgcctaagaagactccgaggagaggcgtggctcagcgtcgggttttatcccctcaccctggtctcgagaatgccatgtttcttgacgattctgatgcgtcggatatgactatccggctggatgagccgaatcattcgcctcagaatctccctttccccctttttgaggacgatgcggtgtccatagctgaagaagatcatattgatcagatgctaccgggtgctaaaagacgtagcaccggcgcaagcgggttaccaagaaagcgaagaaaaggcgaacaagcaactttccaaggccacccaaggcagcaaatccgtcaacagcgtattacgggtcttcttggtcgaacagactcaagcgtgaaacaagggcagcctaaacagccgccaaaagctaaggcacctacacaagggacacgcaaacggaacgctaagagaaaggtgaggactcctcctccgcctcggcttagtatcgtggatgttgtagagccaaatgcccccgctttcatccggatcgctgctcgtactgcaggtaaacgaagagatctaggccgttcaagcccaactaacaaaatgatcatgctcgcgacccgcacggatactattgatgcaggagaaatccttggaaactggagaggagggtctatcaaaccaagagaccaaagtgctctactagcccgatcacggccacggcaaacaagattgacagatacgagaccttcaaatccagtagtccgagtggcgaatcctagcaaaaaccagaacggtagccttggcacaagtcgtttctctcaacctcgtcgattcataaagcaaattagcatggatgagtttgtggctacgggaatacacagcggacaaatgcaagatgtcgagccacataaaacattgcctaggccaaaggagggagaccaagcttcgactcggccagctcagctcgaaatggagggagatgtgcacaaccgccaaacgtttgtaagacgcaagaaagcactagacgcattatatcgacagtcgaaacaccaattatcaacccctcaagatgtacacttggaacaattcgtcgagaggattcctgaaaatacggaggtacctcgagctgcaacggcttattcatctgacagcactactcactcgaaaagacctatgaaggggaggagactccgtaggaaacagtttcgccctcaaaacgtggatgtttcggcgcctcagttcagccatgccaacgatcccttaccgcaccagtctgatcctgtcgtcatcgtcgaaggtgttgaaattgcacaagcagagcagaacggaaaactattgggtcttgctccttttggcactcactacactcaacactttgaggtcttcccgctagagcagggcatattctttcaacaaagcactctgcttgggagcaacaggttgtccaatgctttgaacactgaattcaaacgcgatctcagccaccctcgagatcagtgcacgtttatgctcggcgaacaagtgcttcgttggggtatttgggatgcacaagtatcatcagatttgggaattgtttcagactggatggtcgataagctggaagcgtctgaccctgactatttggcaggaaggatttcagtacaagctgctgagttcatcttaacctatctgcaagatcatatcagtttcggtgaactaggaaacaccaacttttttgctagccgggtcattgaggttgtggaaattttcgagcgacgaatcaaagatttctccggcaattcaagatcaagaaatcgatgtatggtcgaggtgatgacccgggttttactttgcactgtgcaaacttggcgtatctgtcagagcctcaactctctttccgaagtatttaagcttgaggagcttttgaagcgcctggcatcaagtgcagctaaaaagcttgttgaaataggattcacagatattcgacatatgtacgcacgcttgcaacaagcttcacttcgcgagaaaggcattggggatgaacaatttgtcgtggaagggtgggtcactctaattcgaagccttcagagcctaggtttgccgcgggctgggttctgggatatcgtttcctcagcaattttccaccctgctgcggagaagacctttgacgctactgtcctcgaacaagcctggcaaagtctgtttacgctgctgcctctgggcgaatttgacgacactggcgtcgcaacaccaggaatccgacatactgtgcccttggaaggctgggtgcttccgcaacgtttgttgcgtcgtgtgttccagctatacaaaaataatcatcgacaggccccaggtttcaacgactacgttcgggctctggttggtcgatgtcattaccttgtcgagcaatggggatggcgaaaatccaactcgatattagggatgatatttgatttcttcgctgcccaagatctgcataatctgcgcaacgaggaggtttatcaatcgcctctcttcctagagcagctttctgggcagccatcgcttgcgacatccccagacgaccgatgttttcatatctttctcaagcttgtcgccttatccatcactcgccttaggaagtatggacagaacaaggaggtcaggaacatcgtcgctcgccttcttcctaaccataataggcaatttgaaaaggggatggctacgcaagagtctgaactagctgctctacgcaatcatcacgatcttctttgtacccttttctgggcagcgcctccggaaatacggccctctatccaaagcatcgaaggtttagtggtacttggcagctctcacaaagaagcatgtctaatcaacgttcgcgcctggagtcgactatcgcgatttatcgttgccggtttcgaagatatatcgttgtatcagccctttgctaactggcaaaagaatattttccgccaagtcttagaacagtacttgtctgtggaaacggaagtcaagcagcaacttcaaggaatgtccgcagaagcgtgcagaaatattaccgaggagcaaaggaataatgtgatcaacagaaacaagaaagtggccttggacatattgcatttctcgatgaaggcattttcagaagttctgcggtgtaccaaaacaataaacgcggcttcatttgttctaaaccattatccactcgaagagatagtcacccgtctctcattctcgtctgccaaatcggattggggtatcttgcaagtcttcatagagattattgactgttacctgaaaaaaatcaacgaagctgcagctcccgaacctcaagagggccatcttcgacacgaagaagatgctcttcttgaacgaaaactcgccgctcctgtcatgtctttagtccgcaatctagtgcacatggcacaccaagcattcgcagctagtgaacacaccctccgtgtcgaacaggctactgtgcttgctggtaagcttgcgacacgacttgtttctgctcagctcgcgaaacctcgtcaattcttcctatcgggcaaataccgcatatttcaagaagcctcaaaacccattgctacacctgcgcgcaaatttgtttgccttttcatagctaccatgctaggcggaagagttgctgctctcgaggaccttcaaacgacgtccctagattttatgttaagcgaattagtaaaaccgtcgaattatctagcatacgagaacatacttgctcaagtcatgaaacaatcaggcgaaatgcatctacagaacatagctgtggaagaaggcaagcatcctaactatgtctcaaatcgaaaaatgttcaactatctactcgtctcaatgaggaacacgattcgaagagcggagccaaaccaaaagcagttgctacagacaaagtattccaaagggttacggtccgtgatggaacaaataaaggtcgatctaaagtctatgactttcaactcaagcgaacacctcaactacgtcgaatttgttcggtcgatcatcacgatcattcgatcacaggatctctgtcctatcgacactttcttctaccagatcagccaggaatactccccttcgaaacaagatcctcggctccaaacagccggcattttatcttggggcatcaaattggaagaaggtgaccgctcggccatctatggtctgttctacttgctgttcccgagtttcaagattgcgctcgcgaatggggagcttgagagtgagcggatgatcctcagcagaggtatgaagcagacccaggttttcaactttatgctcggtacaatgattcccgctatcatcaagactgtcacgccgataccccagagctgggttctgttggatacttacatcgaagcggtcgacgaacgactttcgagaccggcttttcatcgacaattcatggaagatagtctgatggatctcctggtacttcataacgtggtactaaatagcgcgaaagaactgcaaatgaaggatgtctttgagatgaaggctgaagatgtgatggttctgatgctggggatgaaggctctgaatgttctttcatcagcgaccaaagcggttctcttcaacgagcgagaaagcgaaattgcaacgatgattggacagacgagaacagaaatcagtgagtttgcgcgagccgctgatgaataccttgaggatctctgcgaaggagaagacacaatagggatgcttgacgcgagtcgattgttcaagggagtctgtctaacgaaaccaaacgcggaagtccaagttgagaggttcgcaaatcatatggtgaaggacatacaagagaattgggtgttcaccgatgaaagagccacggtcaaagcaccggccagaccccaagcgacgcagagtatgggatcgaaagtcaagaggtgggagaaagaagagctggtttggggactgtgggaacagatcagaaggtggggtgatgctaatgatgttacgatgagggaaaagggacatgagaggcgtattggtgctttgatggatgagtttgggttgttttag

SEQ ID NO: 26093 - protein, 2140 aa, Muscodor strobelii
  misc_feature: SGI Peptide ID NO. 568915
  misc_feature (1184)..(1465): Pfam Id: PF09462 Pfam Desc: Mus7-like DNA-repair protein
  misc_feature (1)..(2111): NCBI GI: 256729216 Blast Desc: NECHADRAFT_105114 [Nectria haematococca mpVI 77-13-4]
  misc_feature (185)..(2069): NCBI GI: 171690236 Blast Desc: protein product [Podospora anserina] gi|170945066|emb|CAP71177.1| protein product [Podospora anserina]
  misc_feature (1)..(2113): NCBI GI: 145608350 Blast Desc: MGG_12761 [Magnaporthe grisea 70-15] gi|145015828|gb|EDK00318.1| MGG_12761 [Magnaporthe grisea 70-15]
  misc_feature (1)..(2103): NCBI GI: 46116952 Blast Desc: FG04318.1 [Gibberella zeae PH-1]
  misc_feature (185)..(2118): NCBI GI: 85110417 Blast Desc: NCU05458 [Neurospora crassa OR74A] gi|16416068|emb|CAD01114.1| conserved [Neurospora crassa] gi|28925130|gb|EAA34213.1| [Neurospora crassa OR74A]
  misc_feature (185)..(2113): NCBI GI: 261354871 Blast Desc: conserved [Verticillium albo-atrum VaMs.102]
  misc_feature (1191)..(2012): NCBI GI: 116204761 Blast Desc: CHGG_10264 [Chaetomium globosum CBS 148.51] gi|88176392|gb|EAQ83860.1| CHGG_10264 [Chaetomium globosum CBS 148.51]
  misc_feature (1)..(1566): NCBI GI: 156055944 Blast Desc: SS1G_05324 [Sclerotinia sclerotiorum 1980] gi|154703108|gb|EDO02847.1| SS1G_05324 [Sclerotinia sclerotiorum 1980]
  misc_feature (184)..(1926): NCBI GI: 154281717 Blast Desc: [Ajellomyces capsulatus NAm1] gi|150411850|gb|EDN07238.1| [Ajellomyces capsulatus NAm1]
  misc_feature (141)..(1915): NCBI GI: 258565453 Blast Desc: [Uncinocarpus reesii 1704] gi|237907172|gb|EEP81573.1| [Uncinocarpus reesii 1704]
MATWKELGEVPDSEDEGGWDSSQESLHDLPSPPHISQDAPHDADNARFTDANVDSVERATIWDVPHSSQSLDEAPDVHNLEDSNITLISYTPPALLESPPPPPSVESLSDIDITEHLDDNDTLTLPDYEASLPQPTLNPPIDEHEAPLSQNDTPVSPPRINFEVQIPSAVLDIAQLEAENFQRGRSFRPRKPIQEHPYLLENVQYSKTLKSHGLRPVRMQIEEERRKRQEEDSQEQDYEEDSQLTDKNTGNVETEESQELGPLDPGSDVELQALSDDGEPSPSPLSRVTTPVANLGSSEDEDDDLPDTADIDKWRKKLTAQKTRKRQHSVAVVSKKKLVKYTNSSRPMDDTLALPRVEDIFDIPASPPQTSPTALIATPMAALNRMGPASVAILTPKPSSNFSSRMHSPAPANEHSDLVDLTTLENEDDSDKQVSENSGSESDEQIRRIAKRMRKVLPASWVRLDQQSSTRKKKPAPRQKSPDASPKKTPRRGVAQRRVLSPHPGLENAMFLDDSDASDMTIRLDEPNHSPQNLPFPLFEDDAVSIAEEDHIDQMLPGAKRRSTGASGLPRKRRKGEQATFQGHPRQQIRQQRITGLLGRTDSSVKQGQPKQPPKAKAPTQGTRKRNAKRKVRTPPPPRLSIVDVVEPNAPAFIRIAARTAGKRRDLGRSSPTNKMIMLATRTDTIDAGEILGNWRGGSIKPRDQSALLARSRPRQTRLTDTRPSNPVVRVANPSKNQNGSLGTSRFSQPRRFIKQISMDEFVATGIHSGQMQDVEPHKTLPRPKEGDQASTRPAQLEMEGDVHNRQTFVRRKKALDALYRQSKHQLSTPQDVHLEQFVERIPENTEVPRAATAYSSDSTTHSKRPMKGRRLRRKQFRPQNVDVSAPQFSHANDPLPHQSDPVVIVEGVEIAQAEQNGKLLGLAPFGTHYTQHFEVFPLEQGIFFQQSTLLGSNRLSNALNTEFKRDLSHPRDQCTFMLGEQVLRWGIWDAQVSSDLGIVSDWMVDKLEASDPDYLAGRISVQAAEFILTYLQDHISFGELGNTNFFASRVIEVVEIFERRIKDFSGNSRSRNRCMVEVMTRVLLCTVQTWRICQSLNSLSEVFKLEELLKRLASSAAKKLVEIGFTDIRHMYARLQQASLREKGIGDEQFVVEGWVTLIRSLQSLGLPRAGFWDIVSSAIFHPAAEKTFDATVLEQAWQSLFTLLPLGEFDDTGVATPGIRHTVPLEGWVLPQRLLRRVFQLYKNNHRQAPGFNDYVRALVGRCHYLVEQWGWRKSNSILGMIFDFFAAQDLHNLRNEEVYQSPLFLEQLSGQPSLATSPDDRCFHIFLKLVALSITRLRKYGQNKEVRNIVARLLPNHNRQFEKGMATQESELAALRNHHDLLCTLFWAAPPEIRPSIQSIEGLVVLGSSHKEACLINVRAWSRLSRFIVAGFEDISLYQPFANWQKNIFRQVLEQYLSVETEVKQQLQGMSAEACRNITEEQRNNVINRNKKVALDILHFSMKAFSEVLRCTKTINAASFVLNHYPLEEIVTRLSFSSAKSDWGILQVFIEIIDCYLKKINEAAAPEPQEGHLRHEEDALLERKLAAPVMSLVRNLVHMAHQAFAASEHTLRVEQATVLAGKLATRLVSAQLAKPRQFFLSGKYRIFQEASKPIATPARKFVCLFIATMLGGRVAALEDLQTTSLDFMLSELVKPSNYLAYENILAQVMKQSGEMHLQNIAVEEGKHPNYVSNRKMFNYLLVSMRNTIRRAEPNQKQLLQTKYSKGLRSVMEQIKVDLKSMTFNSSEHLNYVEFVRSIITIIRSQDLCPIDTFFYQISQEYSPSKQDPRLQTAGILSWGIKLEEGDRSAIYGLFYLLFPSFKIALANGELESERMILSRGMKQTQVFNFMLGTMIPAIIKTVTPIPQSWVLLDTYIEAVDERLSRPAFHRQFMEDSLMDLLVLHNVVLNSAKELQMKDVFEMKAEDVMVLMLGMKALNVLSSATKAVLFNERESEIATMIGQTRTEISEFARAADEYLEDLCEGEDTIGMLDASRLFKGVCLTKPNAEVQVERFANHMVKDIQENWVFTDERATVKAPARPQATQSMGSKVKRWEKEELVWGLWEQIRRWGDANDVTMREKGHERRIGALMDEFGLF

SEQ ID NO: 26094 - DNA, 6766 bp, Muscodor strobelii
  misc_feature: SGI EST ID NO. CUFF.61556.0
  misc_feature: Variant of the nucleotide sequence at SEQ ID NO 26092
cacagcaattcttcgaagtgaacaccgccatgaccgtttacgacacatgaagttgactttggcgatgcatcgcaagctcaatggccacatggaaggagcttggcgaggtgccagattcggaagacgaaggcggctgggatagcagtcaagagtctcttcacgatctcccctcgccaccacatatcagtcaagatgcgccccacgatgcagataatgcgaggtttacagatgcgaatgtcgacagcgttgaaagagcgaccatttgggacgtccctcactcatctcagagcctagacgaggcacctgatgtccacaacctggaggactcaaatataacactgatatcatatacgcctcccgctctgctagagtcgccacctcccccaccgtctgttgagagtcttagcgacattgacatcactgaacatttggacgacaacgatactttgactctgccagactacgaagcgtcgctcccacagcccacgctcaatcctccgatagacgaacatgaagccccactttcacagaatgatacaccagtctcacctccacgtatcaatttcgaagtccagattccttctgctgttctggacattgcgcagcttgaggccgagaacttccagcgaggacgatcatttcgaccgcgaaagccaattcaggagcatccgtatcttctggaaaatgttcaatatagcaagaccctaaaatctcacggtctacgacccgtgcgcatgcagattgaggaagagagaagaaagcgtcaagaagaagattctcaagagcaggattacgaagaagatagtcagctcacggacaagaataccggcaacgtagagactgaagaaagtcaggagctaggcccattggaccctggaagtgatgtagaactccaagcactatcagacgatggagagccatcaccgtctccgctatctcgcgtaacaacgcctgtcgccaatttgggaagctccgaagacgaagacgacgatctaccggatactgcagacatagacaagtggagaaagaaattgactgcacaaaaaactcgcaagcgccaacactcagtagcagtcgtctcgaagaagaagcttgtgaaatatacgaattcttctcggccaatggatgatactcttgctttaccacgagtagaggatatcttcgacattcctgcctcgccgccccagacaagcccgactgctctgatcgccacgccgatggctgccctgaaccgaatgggccccgcgtccgtcgctattttgaccccgaagccaagtagtaacttttcatcaagaatgcacagtcctgcacctgcaaacgaacatagcgacctggttgatctgacaacgctcgagaatgaggacgatagcgacaaacaagtctcagaaaactccggtagcgaatcagatgagcagatacggcgtattgcgaaaagaatgcgcaaagtgctaccagcatcttgggttcgtcttgatcagcaatcatccacaaggaagaaaaagcctgctccgcgccaaaagagtccagatgcgtcgcctaagaagactccgaggagaggcgtggctcagcgtcgggttttatcccctcaccctggtctcgagaatgccatgtttcttgacgattctgatgcgtcggatatgactatccggctggatgagccgaatcattcgcctcagaatctccctttccccctttttgaggacgatgcggtgtccatagctgaagaagatcatattgatcagatgctaccgggtgctaaaagacgtagcaccggcgcaagcgggttaccaagaaagcgaagaaaaggcgaacaagcaactttccaaggccacccaaggcagcaaatccgtcaacagcgtattacgggtcttcttggtcgaacagactcaagcgtgaaacaagggcagcctaaacagccgccaaaagctaaggcacctacacaagggacacgcaaacggaacgctaagagaaaggtgaggactcctcctccgcctcggcttagtatcgtggatgttgtagagccaaatgcccccgctttcatccggatcgctgctcgtactgcaggtaaacgaagagatctaggccgttcaagcccaactaacaaaatgatcatgctcgcgacccgcacggatactattgatgcaggagaaatccttggaaactggagaggagggtctatcaaaccaagagaccaaagtgctctactagcccgatcacggccacggcaaacaagattgacagatacgagaccttcaaatccagtagtccgagtggcgaatcctagcaaaaaccagaacggtagccttggcacaagtcgtttctctcaacctcgtcgattcataaagcaaattagcatggatgagtttgtggctacgggaatacacagcggacaaatgcaagatgtcgagccacataaaacattgcctaggccaaaggagggagaccaagcttcgactcggccagctcagctcgaaatggagggagatgtgcacaaccgccaaacgtttgtaagacgcaagaaagcactagacgcattatatcgacagtcgaaacaccaattatcaacccctcaagatgtacacttggaacaattcgtcgagaggattcctgaaaatacggaggtacctcgagctgcaacggcttattcatctgacagcactactcactcgaaaagacctatgaaggggaggagactccgtaggaaacagtttcgccctcaaaacgtggatgtttcggcgcctcagttcagccatgccaacgatcccttaccgcaccagtctgatcctgtcgtcatcgtcgaaggtgttgaaattgcacaagcagagcagaacggaaaactattgggtcttgctccttttggcactcactacactcaacactttgaggtcttcccgctagagcagggcatattctttcaacaaagcactctgcttgggagcaacaggttgtccaatgctttgaacactgaattcaaacgcgatctcagccaccctcgagatcagtgcacgtttatgctcggcgaacaagtgcttcgttggggtatttgggatgcacaagtatcatcagatttgggaattgtttcagactggatggtcgataagctggaagcgtctgaccctgactatttggcaggaaggatttcagtacaagctgctgagttcatcttaacctatctgcaagatcatatcagtttcggtgaactaggaaacaccaacttttttgctagccgggtcattgaggttgtggaaattttcgagcgacgaatcaaagatttctccggcaattcaagatcaagaaatcgatgtatggtcgaggtgatgacccgggttttactttgcactgtgcaaacttggcgtatctgtcagagcctcaactctctttccgaagtatttaagcttgaggagcttttgaagcgcctggcatcaagtgcagctaaaaagcttgttgaaataggattcacagatattcgacatatgtacgcacgcttgcaacaagcttcacttcgcgagaaaggcattggggatgaacaatttgtcgtggaagggtgggtcactctaattcgaagccttcagagcctaggtttgccgcgggctgggttctgggatatcgtttcctcagcaattttccaccctgctgcggagaagacctttgacgctactgtcctcgaacaagcctggcaaagtctgtttacgctgctgcctctgggcgaatttgacgacactggcgtcgcaacaccaggaatccgacatactgtgcccttggaaggctgggtgcttccgcaacgtttgttgcgtcgtgtgttccagctatacaaaaataatcatcgacaggccccaggtttcaacgactacgttcgggctctggttggtcgatgtcattaccttgtcgagcaatggggatggcgaaaatccaactcgatattagggatgatatttgatttcttcgctgcccaagatctgcataatctgcgcaacgaggaggtttatcaatcgcctctcttcctagagcagctttctgggcagccatcgcttgcgacatccccagacgaccgatgttttcatatctttctcaagcttgtcgccttatccatcactcgccttaggaagtatggacagaacaaggaggtcaggaacatcgtcgctcgccttcttcctaaccataataggcaatttgaaaaggggatggctacgcaagagtctgaactagctgctctacgcaatcatcacgatcttctttgtacccttttctgggcagcgcctccggaaatacggccctctatccaaagcatcgaaggtttagtggtacttggcagctctcacaaagaagcatgtctaatcaacgttcgcgcctggagtcgactatcgcgatttatcgttgccggtttcgaagatatatcgttgtatcagccctttgctaactggcaaaagaatattttccgccaagtcttagaacagtacttgtctgtggaaacggaagtcaagcagcaacttcaaggaatgtccgcagaagcgtgcagaaatattaccgaggagcaaaggaataatgtgatcaacagaaacaagaaagtggccttggacatattgcatttctcgatgaaggcattttcagaagttctgcggtgtaccaaaacaataaacgcggcttcatttgttctaaaccattatccactcgaagagatagtcacccgtctctcattctcgtctgccaaatcggattggggtatcttgcaagtcttcatagagattattgactgttacctgaaaaaaatcaacgaagctgcagctcccgaacctcaagagggccatcttcgacacgaagaagatgctgttatgcttcttgaacgaaaactcgccgctcctgtcatgtctttagtccgcaatctagtgcacatggcacaccaagcattcgcagctagtgaacacaccctccgtgtcgaacaggctactgtgcttgctggtaagcttgcgacacgacttgtttctgctcagctcgcgaaacctcgtcaattcttcctatcgggcaaataccgcatatttcaagaagcctcaaaacccattgctacacctgcgcgcaaatttgtttgccttttcatagctaccatgctaggcggaagagttgctgctctcgaggaccttcaaacgacgtccctagattttatgttaagcgaattagtaaaaccgtcgaattatctagcatacgagaacatacttgctcaagtcatgaaacaatcaggcgaaatgcatctacagaacatagctgtggaagaaggcaagcatcctaactatgtctcaaatcgaaaaatgttcaactatctactcgtctcaatgaggaacacgattcgaagagcggagccaaaccaaaagcagttgctacagacaaagtattccaaagggttacggtccgtgatggaacaaataaaggtcgatctaaagtctatgactttcaactcaagcgaacacctcaactacgtcgaatttgttcggtcgatcatcacgatcattcgatcacaggatctctgtcctatcgacactttcttctaccagatcagccaggaatactccccttcgaaacaagatcctcggctccaaacagccggcattttatcttggggcatcaaattggaagaaggtgaccgctcggccatctatggtctgttctacttgctgttcccgagtttcaagattgcgctcgcgaatggggagcttgagagtgagcggatgatcctcagcagaggtatgaagcagacccaggttttcaactttatgctcggtacaatgattcccgctatcatcaagactgtcacgccgataccccagagctgggttctgttggatacttacatcgaagcggtcgacgaacgactttcgagaccggcttttcatcgacaattcatggaagatagtctgatggatctcctggtacttcataacgtggtactaaatagcgcgaaagaactgcaaatgaaggatgtctttgagatgaaggctgaagatgtgatggttctgatgctggggatgaaggctctgaatgttctttcatcagcgaccaaagcggttctcttcaacgagcgagaaagcgaaattgcaacgatgattggacagacgagaacagaaatcagtgagtttgcgcgagccgctgatgaataccttgaggatctctgcgaaggagaagacacaatagggatgcttgacgcgagtcgattgttcaagggagtctgtctaacgaaaccaaacgcggaagtccaagttgagaggttcgcaaatcatatggtgaaggacatacaagagaattgggtgttcaccgatgaaagagccacggtcaaagcaccggccagaccccaagcgacgcagagtatgggatcgaaagtcaagaggtgggagaaagaagagctggtttggggactgtgggaacagatcagaaggtggggtgatgctaatgatgttacgatgagggaaaagggacatgagaggcgtattggtgctttgatggatgagtttgggttgttttagggcattgcatatcattgcataacgttgcattggcgtggcatggcgttgtgggtgcatgagagtgtgtaaatgatttatatatctgcatattgtttgtcaagagattgtgcttgagggtgcttttcgtgtgttagtgatctgctgtctatgatatacatcgcgagcgtgattagatgtaaagctaagattgtattttgcgagcttggtagagcttatgtcgggtttctagtataaagtagtgacatggcaggtatcaa

SEQ ID NO: 26095 - DNA, 504 bp, Muscodor strobelii
  misc_feature: SGI cDNA ID NO. 568916
  misc_feature: Reduced expression when VOC is produced
  misc_feature: Encodes the peptide sequence at SEQ ID NO 26096
atgatgcgcacatcgacctcgctcatgcgcgctgcccggaccagcagcatgcgcaccgtcgtctcccgagctgcctccacacacgccatctccaaccctaccctcgccaacattgagaagagatgggaaggcatgcccgccggtgagcaggccgagctgtggatggctctccgcgaccgcatgaaggagaactgggccgacctgactgtccaggagaagaaggctgcctactggattgccttcggtgcacacggcccccgtgcccaggccccggccgacgagggccgcaaggtcgctctctacactgccatcggtgttctggtcagcttggccctcttcagcacaatgcgcgccttcgccggccctgccccaagcaccatgaacagggagtacgaggaggcttccaacgagtacctcatcaaccaacgctccgaccccatgaccggtatctcttccgaaggctactccggcaagggccaaatccagtctccccccaagcactaa

SEQ ID NO: 26096 - protein, 167 aa, Muscodor strobelii
  misc_feature: SGI Peptide ID NO. 568916
  misc_feature (23)..(164): Pfam Id: PF02936 Pfam Desc: Cytochrome c oxidase subunit IV
  misc_feature (7)..(164): NCBI GI: 116204763 Blast Desc: cytochrome c oxidase polypeptide V, mitochondrial precursor [Chaetomium globosum CBS 148.51] gi|88176393|gb|EAQ83861.1| cytochrome c oxidase polypeptide V,
  misc_feature (7)..(164): NCBI GI: 68137991 Blast Desc: mitochondrial cytochrome c oxidase subunit V [Chaetomium globosum]
  misc_feature (1)..(165): NCBI GI: 39942216 Blast Desc: MGG_03188 [Magnaporthe grisea 70-15] gi|145015829|gb|EDK00319.1| MGG_03188 [Magnaporthe grisea 70-15]
  misc_feature (1)..(166): NCBI GI: 154298245 Blast Desc: cytochrome c oxidase subunit V [Botryotinia fuckeliana B05.10] gi|150858153|gb|EDN33345.1| cytochrome c oxidase subunit V [Botryotinia fuckeliana B05.10]
  misc_feature (1)..(167): NCBI GI: 261354868 Blast Desc: cytochrome c oxidase polypeptide V [Verticillium albo-atrum VaMs.102]
  misc_feature (7)..(164): NCBI GI: 171690240 Blast Desc: protein product [Podospora anserina] gi|170945068|emb|CAP71179.1| protein product [Podospora anserina]
  misc_feature (7)..(164): NCBI GI: 7161891 Blast Desc: cytochrome c oxidase subunit V [Podospora anserina]
  misc_feature (1)..(164): NCBI GI: 85110415 Blast Desc: cytochrome c oxidase subunit V [Neurospora crassa OR74A] gi|117091|sp|P06810.2|COX5_NEUCR RecName: Full=Cytochrome c oxidase polypeptide 5, mitochondrial; AltName: Full=Cytochrome
  misc_feature (1)..(166): NCBI GI: 156050419 Blast Desc: SS1G_07796 [Sclerotinia sclerotiorum 1980] gi|154692197|gb|EDN91935.1| SS1G_07796 [Sclerotinia sclerotiorum 1980]
  misc_feature (1)..(166): NCBI GI: 46116946 Blast Desc: FG04315.1 [Gibberella zeae PH-1]
  misc_feature (1)..(164): SWISSPROT Homolog: EC 1.9.3.1 Cytochrome-c oxidase
  misc_feature: Useful for introducing or modulating the production of volatile compounds
MMRTSTSLMRAARTSSMRTVVSRAASTHAISNPTLANIEKRWEGMPAGEQAELWMALRDRMKENWADLTVQEKKAAYWIAFGAHGPRAQAPADEGRKVALYTAIGVLVSLALFSTMRAFAGPAPSTMNREYEEASNEYLINQRSDPMTGISSEGYSGKGQIQSPPKH

SEQ ID NO: 26097 - DNA, 3999 bp, Muscodor strobelii
  misc_feature: SGI EST ID NO. CUFF.62112.2
  misc_feature: Variant of the nucleotide sequence at SEQ ID NO 26095
cacagctgggcaatttgaggttccacccatcatacgacgaactggagcgattggggagtcctcgacgagtcttttttcctgcctactgccactgccaaacacgcaccctcactattgtatcaccacgtccgcccgcgacacccaactcgacaaccgatctcaattggaccaatctcccctcctttagcttctcgacgataacaccgatctcctccgtttccgacttctccccttccactcctcgactctccttcaagatgatgcgcacatcgacctcgctcatgcgcgctgcccggaccagcagcatgcgcaccgtcgtctcccgagctgcctccacacacgccatctccaaccctaccctcgccaacattgagaagagatgggaaggcatgcccgccggtgagcaggccgagctgtggatggctctccgcgaccgcatgaaggagaactgggccgacctgactgtccaggagaagaaggctgcctactggattgccttcggtgcacacggcccccgtgcccaggccccggccgacgagggccgcaaggtcgctctctacactgccatcggtgttctggtcagcttggccctcttcagcacaatgcgcgccttcgccggccctgccccaagcaccatgaacagggagtacgaggaggcttccaacgagtacctcatcaaccaacgctccgaccccatgaccggtatctcttccgaaggctactccggcaagggccaaatccagtctccccccaagcactaaagataccaatcatcctcgccatgaccccgccgataccactcacgctatttccaccctgccctttcgatttcctttgtctttagagaaaccaagaaagcccaaaagaaatccaaaattcccagagatgaaacgattggacccctccaacccgtggccttgtacaataacaataccgacttgcgagccttagacaaccagcgatgcggaagaacctctcccactcctgttgctgccatgcgatctattccctgggagagatgtgacgccgagaggagggccgtgtgggaaaaggagtgatggatagcagagctaggcgacggggctaggtgaccaaaaagacaagataaaaacatcataagcattgcctatctgtcggggcgttttgtaaatatgtacaagaggaaatttctacaccgttcagcatcagccattcatcccgttgatctcttactgcaagagctgcgtgagccacgggtgttgtcttctaacttatggcttggtctcacaatactgggcagcttggtgaaccatttgagttgagtacggggcgtacagtcttcctaccctcccactttaactctctgtcatcgtaagaagataacaaatcgatcaaccttcgaaaatgctgcgaacaactccatccccatctcttcacatgacgcctcaacttcgcactctgactcaaattcaccaagttcctattatcaagcaaacacataaaagtaccactcgcgctatgatcaacgcatataaccatatccaatcatgataaatatattcatattcacaatgccataactatatacgttcccctccccagagcatcctatcgcagccatccactcataaatatataagacaaatatccataccaccaatcaccacacagcatgcagcccatagggacaacaaaaagccttgcaaaaacgcctatgcaatgccataatcaccaaacagaacaatctcctcaacaccagacaccacgtaacgcccaccttcctacttaaacccagtcaatggtatcatcgtccttagaagctcctcgatgtccggaggtatgattgggcttctccttatgtcaggcaccactttgaccggcctcgcgaaaactgcccaagctcgtatttccaacctcgggcagtggcgcccatggatcgttttcggccgtcagtccatcttcatccctcacccttctcagtacctcaaagcgtccgtccttgccgaagtactgcactttctcctcgccttttactgccttctccgtgactaacacgtatggcgtgggagcatcaaacatgggctcggctagtatacgctccatctccatcttcagtcctctcgcccctgtccttgctttctctgctctttcggcgactgcttccagtgccttcttggtgatgaatagcttggaggggtatgtttcaaatagtgctgtatactgcgctaccaatgaatttcgaggttcggtcaagatccgcagcagatcggtgcgtgagagtggcgaaagggcgacgatattatgcacacgaccaatgagttcgggtatgaagccaaagccttggagatcttctggtgtggtgagatcgagagcagtgagcttcgatgtatgttcgacgtttgcgggaatgtgagggaggtgggcgaatagtttgggcgcgagatcatgtgtaccgtctgcggatttgttgcgtaattccgagccgaatcccattgtcgacttggagacccggttcaagatcactttatcgagaccgacgaaagcaccgcacatgacgaagagaatgttgcttgtatcgatggtgtactggtcgactttacccgaaggtgggggagcggactgagggccagaggtggaggtattagatccagctccggtgtagtttgtggtgatcgggctcgcggagcgagacgaggacgaccggttgtccttgacattgatggtgactttggtgccttcgaccagtttcagcagtgcttgctgcacaccttcacctcctacgtctcttccgttcgtagtctcccgtttggcaatcttgtcgaactcgtccagaaccacaatcccatgctcggtagctctgatgtcgtaatttgactcgatcaacagccgttcgatgcatgtttccacgtcctggccgatgtagccggcttgtgtaaaagagttacagtcgcatatcgtaaagggaacgttgatcttctgacttaatgttctattcacattgttagcataacagtatcaacgaacgagaccgtgtgcacggtagtcgtggtcttactcgaggatatatgtcttgcccacaccagttggtccaagtagtaatatgttactcttatcgattttgacagccggttgccgattctcgtcttcgggtacgtagaaatcgaccttcttctcgttttgctgccactcttggtgcattttttgtattgaatcgtaatgtccgggatattcatctgctatgcatggtcaatacttgtgcccggaaagatcgggtacctctcctcacggaccttcaagtgcatgtggctcgcgttcacgattgttcctatcacgggcgacagcctgacgcatgagtttctcgtctctctttcgctcctcctcttcctgatgatgccgcaggcggacgttctggtagtggttgaagatgacggaagagatggtcttcttggcacggtcctggcctactacgtactcgtctactcgcttcttcaggtctctgggatagaactgcggcactccaaaggagctcttattaaacatgggccctcggccctcctcgttgggatcataactgctggtgaagccagagttgaagtcggatgttctacgtggggcagtgcgtaggaccggggtggtcgagagggattgacggcgggattttggggcagtgatggcgagggacgaggcccgtggccttacgaaggaggtgatcatgatggcagataatagatgtcagcctcccggctcgaacaagacagcagctcggtcacaccaccgggatcatgggtgagcgttgaagcagatagctggctcgggggtcggacagcggatgcggtgggagagcaagtcagcgtaatcgttagacacaatacataattggttcttataatgccgtcggtctgttcagggaatcgcgtgatttaattaaagtacaatatctgtcatgaacctttgaagatgttgactctccgggtgatagttcgaggtcagaagctctgtgatagagccgtcgggtttctc

SEQ ID NO: 26098 - DNA, 1734 bp, Muscodor strobelii
  misc_feature: SGI cDNA ID NO. 568917
  misc_feature: Encodes the peptide sequence at SEQ ID NO 26099
atgatcacctccttcgtaaggccacgggcctcgtccctcgccatcactgccccaaaatcccgccgtcaatccctctcgaccaccccggtcctacgcactgccccacgtagaacatccgacttcaactctggcttcaccagcagttatgatcccaacgaggagggccgagggcccatgtttaataagagctcctttggagtgccgcagttctatcccagagacctgaagaagcgagtagacgagtacgtagtaggccaggaccgtgccaagaagaccatctcttccgtcatcttcaaccactaccagaacgtccgcctgcggcatcatcaggaagaggaggagcgaaagagagacgagaaactcatgcgtcaggctgtcgcccgtgataggaacaatcgtgaacgcgagccacatgcacttgaagcagatgaatatcccggacattacgattcaatacaaaaaatgcaccaagagtggcagcaaaacgagaagaaggtcgatttctacgtacccgaagacgagaatcggcaaccggctgtcaaaatcgataagagtaacatattactacttggaccaactggtgtgggcaagacatatatcctcgaaacattaagtcagaagatcaacgttccctttacgatatgcgactgtaactcttttacacaagccggctacatcggccaggacgtggaaacatgcatcgaacggctgttgatcgagtcaaattacgacatcagagctaccgagcatgggattgtggttctggacgagttcgacaagattgccaaacgggagactacgaacggaagagacgtaggaggtgaaggtgtgcagcaagcactgctgaaactggtcgaaggcaccaaagtcaccatcaatgtcaaggacaaccggtcgtcctcgtctcgctccgcgagcccgatcaccacaaactacaccggagctggatctaatacctccacctctggccctcagtccgctcccccaccttcgggtaaagtcgaccagtacaccatcgatacaagcaacattctcttcgtcatgtgcggtgctttcgtcggtctcgataaagtgatcttgaaccgggtctccaagtcgacaatgggattcggctcggaattacgcaacaaatccgcagacggtacacatgatctcgcgcccaaactattcgcccacctccctcacattcccgcaaacgtcgaacatacatcgaagctcactgctctcgatctcaccacaccagaagatctccaaggctttggcttcatacccgaactcattggtcgtgtgcataatatcgtcgccctttcgccactctcacgcaccgatctgctgcggatcttgaccgaacctcgaaattcattggtagcgcagtatacagcactatttgaaacatacccctccaagctattcatcaccaagaaggcactggaagcagtcgccgaaagagcagagaaagcaaggacaggggcgagaggactgaagatggagatggagcgtatactagccgagcccatgtttgatgctcccacgccatacgtgttagtcacggagaaggcagtaaaaggcgaggagaaagtgcagtacttcggcaaggacggacgctttgaggtactgagaagggtgagggatgaagatggactgacggccgaaaacgatccatgggcgccactgcccgaggttggaaatacgagcttgggcagttttcgcgaggccggtcaaagtggtgcctga

SEQ ID NO: 26099 - protein, 577 aa, Muscodor strobelii
  misc_feature: SGI Peptide ID NO. 568917
  misc_feature (182)..(433): Pfam Id: PF07724 Pfam Desc: ATPase family associated with various cellular activities (AAA)
  misc_feature (182)..(291): Pfam Id: PF07724 Pfam Desc: ATPase family associated with various cellular activities (AAA)
  misc_feature (338)..(433): Pfam Id: PF07724 Pfam Desc: ATPase family associated with various cellular activities (AAA)
  misc_feature (186)..(221): Pfam Id: PF07728 Pfam Desc: ATPase family associated with various cellular activities (AAA)
  misc_feature (36)..(577): NCBI GI: 46116944 Blast Desc: FG04314.1 [Gibberella zeae PH-1]
  misc_feature (21)..(536): NCBI GI: 171690260 Blast Desc: protein product [Podospora anserina] gi|170945078|emb|CAP71189.1| protein product [Podospora anserina]
  misc_feature (2)..(534): NCBI GI: 116204749 Blast Desc: CHGG_10258 [Chaetomium globosum CBS 148.51] gi|88176386|gb|EAQ83854.1| CHGG_10258 [Chaetomium globosum CBS 148.51]
  misc_feature (20)..(577): NCBI GI: 7801087 Blast Desc: related to MCX1 protein [Neurospora crassa]
  misc_feature (23)..(577): NCBI GI: 145608352 Blast Desc: MGG_03187 [Magnaporthe grisea 70-15] gi|145015830|gb|EDK00320.1| MGG_03187 [Magnaporthe grisea 70-15]
  misc_feature (3)..(577): NCBI GI: 261354870 Blast Desc: ATP-dependent Clp protease ATP-binding subunit clpX [Verticillium albo-atrum VaMs.102]
  misc_feature (203)..(577): NCBI GI: 164424835 Blast Desc: NCU05427 [Neurospora crassa OR74A] gi|157070682|gb|EAA34014.2| NCU05427 [Neurospora crassa OR74A]
  misc_feature (4)..(555): NCBI GI: 225554601 Blast Desc: ATP-dependent Clp protease ATP-binding subunit clpX [Ajellomyces capsulatus G186AR]
  misc_feature (4)..(555): NCBI GI: 240276945 Blast Desc: ATP-dependent Clp protease ATP-binding subunit [Ajellomyces capsulatus H143]
  misc_feature (39)..(555): NCBI GI: 119182495 Blast Desc: CIMG_06272 [Coccidioides immitis RS]
MITSFVRPRASSLAITAPKSRRQSLSTTPVLRTAPRRTSDFNSGFTSSYDPNEEGRGPMFNKSSFGVPQFYPRDLKKRVDEYVVGQDRAKKTISSVIFNHYQNVRLRHHQEEEERKRDEKLMRQAVARDRNNREREPHALEADEYPGHYDSIQKMHQEWQQNEKKVDFYVPEDENRQPAVKIDKSNILLLGPTGVGKTYILETLSQKINVPFTICDCNSFTQAGYIGQDVETCIERLLIESNYDIRATEHGIVVLDEFDKIAKRETTNGRDVGGEGVQQALLKLVEGTKVTINVKDNRSSSSRSASPITTNYTGAGSNTSTSGPQSAPPPSGKVDQYTIDTSNILFVMCGAFVGLDKVILNRVSKSTMGFGSELRNKSADGTHDLAPKLFAHLPHIPANVEHTSKLTALDLTTPEDLQGFGFIPELIGRVHNIVALSPLSRTDLLRILTEPRNSLVAQYTALFETYPSKLFITKKALEAVAERAEKARTGARGLKMEMERILAEPMFDAPTPYVLVTEKAVKGEEKVQYFGKDGRFEVLRRVRDEDGLTAENDPWAPLPEVGNTSLGSFREAGQSGA

SEQ ID NO: 26100 - DNA, 4229 bp, Muscodor strobelii
  misc_feature: SGI EST ID NO. CUFF.62113.1
  misc_feature: Variant of the nucleotide sequence at SEQ ID NO 26098
gagaaacccgacggctctatcacagagcttctgacctcgaactatcacccggagagtcaacatcttcaaaggttcatgacagatattgtactttaattaaatcacgcgattccctgaacagaccgacggcattataagaaccaattatgtattgtgtctaacgattacgctgacttgctctcccaccgcatccgctgtccgacccccgagccagctatctgcttcaacgctcacccatgatcccggtggtgtgaccgagctgctgtcttgttcgagccgggaggctgacatctattatctgccatcatgatcacctccttcgtaaggccacgggcctcgtccctcgccatcactgccccaaaatcccgccgtcaatccctctcgaccaccccggtcctacgcactgccccacgtagaacatccgacttcaactctggcttcaccagcagttatgatcccaacgaggagggccgagggcccatgtttaataagagctcctttggagtgccgcagttctatcccagagacctgaagaagcgagtagacgagtacgtagtaggccaggaccgtgccaagaagaccatctcttccgtcatcttcaaccactaccagaacgtccgcctgcggcatcatcaggaagaggaggagcgaaagagagacgagaaactcatgcgtcaggctgtcgcccgtgataggaacaatcgtgaacgcgagccacatgcacttgaagatgaatatcccggacattacgattcaatacaaaaaatgcaccaagagtggcagcaaaacgagaagaaggtcgatttctacgtacccgaagacgagaatcggcaaccggctgtcaaaatcgataagagtaacatattactacttggaccaactggtgtgggcaagacatatatcctcgaaacattaagtcagaagatcaacgttccctttacgatatgcgactgtaactcttttacacaagccggctacatcggccaggacgtggaaacatgcatcgaacggctgttgatcgagtcaaattacgacatcagagctaccgagcatgggattgtggttctggacgagttcgacaagattgccaaacgggagactacgaacggaagagacgtaggaggtgaaggtgtgcagcaagcactgctgaaactggtcgaaggcaccaaagtcaccatcaatgtcaaggacaaccggtcgtcctcgtctcgctccgcgagcccgatcaccacaaactacaccggagctggatctaatacctccacctctggccctcagtccgctcccccaccttcgggtaaagtcgaccagtacaccatcgatacaagcaacattctcttcgtcatgtgcggtgctttcgtcggtctcgataaagtgatcttgaaccgggtctccaagtcgacaatgggattcggctcggaattacgcaacaaatccgcagacggtacacatgatctcgcgcccaaactattcgcccacctccctcacattcccgcaaacgtcgaacatacatcgaagctcactgctctcgatctcaccacaccagaagatctccaaggctttggcttcatacccgaactcattggtcgtgtgcataatatcgtcgccctttcgccactctcacgcaccgatctgctgcggatcttgaccgaacctcgaaattcattggtagcgcagtatacagcactatttgaaacatacccctccaagctattcatcaccaagaaggcactggaagcagtcgccgaaagagcagagaaagcaaggacaggggcgagaggactgaagatggagatggagcgtatactagccgagcccatgtttgatgctcccacgccatacgtgttagtcacggagaaggcagtaaaaggcgaggagaaagtgcagtacttcggcaaggacggacgctttgaggtactgagaagggtgagggatgaagatggactgacggccgaaaacgatccatgggcgccactgcccgaggttggaaatacgagcttgggcagttttcgcgaggccggtcaaagtggtgcctgacataaggagaagcccaatcatacctccggacatcgaggagcttctaaggacgatgataccattgactgggtttaagtaggaaggtgggcgttacgtggtgtctggtgttgaggagattgttctgtttggtgattatggcattgcataggcgtttttgcaaggctttttgttgtccctatgggctgcatgctgtgtggtgattggtggtatggatatttgtcttatatatttatgagtggatggctgcgataggatgctctggggaggggaacgtatatagttatggcattgtgaatatgaatatatttatcatgattggatatggttatatgcgttgatcatagcgcgagtggtacttttatgtgtttgcttgataataggaacttggtgaatttgagtcagagtgcgaagttgaggcgtcatgtgaagagatggggatggagttgttcgcagcattttcgaaggttgatcgatttgttatcttcttacgatgacagagagttaaagtgggagggtaggaagactgtacgccccgtactcaactcaaatggttcaccaagctgcccagtattgtgagaccaagccataagttagaagacaacacccgtggctcacgcagctcttgcagtaagagatcaacgggatgaatggctgatgctgaacggtgtagaaatttcctcttgtacatatttacaaaacgccccgacagataggcaatgcttatgatgtttttatcttgtctttttggtcacctagccccgtcgcctagctctgctatccatcactccttttcccacacggccctcctctcggcgtcacatctctcccagggaatagatcgcatggcagcaacaggagtgggagaggttcttccgcatcgctggttgtctaaggctcgcaagtcggtattgttattgtacaaggccacgggttggaggggtccaatcgtttcatctctgggaattttggatttcttttgggctttcttggtttctctaaagacaaaggaaatcgaaagggcagggtggaaatagcgtgagtggtatcggcggggtcatggcgaggatgattggtatctttagtgcttggggggagactggatttggcccttgccggagtagccttcggaagagataccggtcatggggtcggagcgttggttctgtaatgcatgtgtgagcttgtgggcatgagagtcaggacagacgataggatgcttacgatgaggtactcgttggaagcctcctcgtactccctgttcatggtgcttggggcagggccggcgaaggcgcgcattgtgctgaagagggccaagctgaccagaacaccgatggcagtgtagagagcgaccttgcggccctcgtcggccggggcctgggcacgggggccgtgtgcaccgaaggcaatccagtaggctgtagtagatagagtgttagttatgccgaagattgtggtgatgtggtgatgtgatgataatgatggcatggatagcttcagatgtggattctctggctgagaggtgggtccactctgacaggagaccatgacttgtggccagtcgcggctccagcagcactcaattgacgtcgacagtcatcgtgaagctccgaggaagctcagctaagacatggccgagtcgcaagtatatgtatcacgggtatttgtccgaggaaatggagcggtgcggtgacctaccagccttcttctcctggacagtcaggtcggcccagttctccttcatgcggtcgcggagagccatccacagctcggcctgctcaccggcgggcatgccttcccatctcttctcaatgttggcgagggtagggttggagatggcgtgtgtggaggcagctcgggagacgacggtgcgcatgctgctggtccgggcagcgcgcatgagcgaggtcgatgtgcgcatcatcttgaaggagagtcgaggagtggaaggggagaagtcggaaacggaggagatcggtgttatcgtcgagaagctaaaggaggggagattggtccaattgagatcggttgtcgagttgggtgtcgcgggcggacgtggtgatacaatagtgagggtgcgtgtttggcagtggcagtaggcaggaaaaaagactcgtcgaggactccccaatcgctccagttcgtcgtatgatgggtggaacctcaaattgcccagctgtgattggccaatcacc

SEQ ID NO: 26101 - DNA, 1731 bp, Muscodor strobelii
  misc_feature: SGI cDNA ID NO. 568918
  misc_feature: Encodes the peptide sequence at SEQ ID NO 26102
atgatcacctccttcgtaaggccacgggcctcgtccctcgccatcactgccccaaaatcccgccgtcaatccctctcgaccaccccggtcctacgcactgccccacgtagaacatccgacttcaactctggcttcaccagcagttatgatcccaacgaggagggccgagggcccatgtttaataagagctcctttggagtgccgcagttctatcccagagacctgaagaagcgagtagacgagtacgtagtaggccaggaccgtgccaagaagaccatctcttccgtcatcttcaaccactaccagaacgtccgcctgcggcatcatcaggaagaggaggagcgaaagagagacgagaaactcatgcgtcaggctgtcgcccgtgataggaacaatcgtgaacgcgagccacatgcacttgaagatgaatatcccggacattacgattcaatacaaaaaatgcaccaagagtggcagcaaaacgagaagaaggtcgatttctacgtacccgaagacgagaatcggcaaccggctgtcaaaatcgataagagtaacatattactacttggaccaactggtgtgggcaagacatatatcctcgaaacattaagtcagaagatcaacgttccctttacgatatgcgactgtaactcttttacacaagccggctacatcggccaggacgtggaaacatgcatcgaacggctgttgatcgagtcaaattacgacatcagagctaccgagcatgggattgtggttctggacgagttcgacaagattgccaaacgggagactacgaacggaagagacgtaggaggtgaaggtgtgcagcaagcactgctgaaactggtcgaaggcaccaaagtcaccatcaatgtcaaggacaaccggtcgtcctcgtctcgctccgcgagcccgatcaccacaaactacaccggagctggatctaatacctccacctctggccctcagtccgctcccccaccttcgggtaaagtcgaccagtacaccatcgatacaagcaacattctcttcgtcatgtgcggtgctttcgtcggtctcgataaagtgatcttgaaccgggtctccaagtcgacaatgggattcggctcggaattacgcaacaaatccgcagacggtacacatgatctcgcgcccaaactattcgcccacctccctcacattcccgcaaacgtcgaacatacatcgaagctcactgctctcgatctcaccacaccagaagatctccaaggctttggcttcatacccgaactcattggtcgtgtgcataatatcgtcgccctttcgccactctcacgcaccgatctgctgcggatcttgaccgaacctcgaaattcattggtagcgcagtatacagcactatttgaaacatacccctccaagctattcatcaccaagaaggcactggaagcagtcgccgaaagagcagagaaagcaaggacaggggcgagaggactgaagatggagatggagcgtatactagccgagcccatgtttgatgctcccacgccatacgtgttagtcacggagaaggcagtaaaaggcgaggagaaagtgcagtacttcggcaaggacggacgctttgaggtactgagaagggtgagggatgaagatggactgacggccgaaaacgatccatgggcgccactgcccgaggttggaaatacgagcttgggcagttttcgcgaggccggtcaaagtggtgcctga

SEQ ID NO: 26102 - protein, 576 aa, Muscodor strobelii
  misc_feature: SGI Peptide ID NO. 568918
  misc_feature (181)..(432): Pfam Id: PF07724 Pfam Desc: ATPase family associated with various cellular activities (AAA)
  misc_feature (181)..(290): Pfam Id: PF07724 Pfam Desc: ATPase family associated with various cellular activities (AAA)
  misc_feature (337)..(432): Pfam Id: PF07724 Pfam Desc: ATPase family associated with various cellular activities (AAA)
  misc_feature (185)..(220): Pfam Id: PF07728 Pfam Desc: ATPase family associated with various cellular activities (AAA)
  misc_feature (36)..(576): NCBI GI: 46116944 Blast Desc: FG04314.1 [Gibberella zeae PH-1]
  misc_feature (21)..(535): NCBI GI: 171690260 Blast Desc: protein product [Podospora anserina] gi|170945078|emb|CAP71189.1| protein product [Podospora anserina]
  misc_feature (2)..(533): NCBI GI: 116204749 Blast Desc: CHGG_10258 [Chaetomium globosum CBS 148.51] gi|88176386|gb|EAQ83854.1| CHGG_10258 [Chaetomium globosum CBS 148.51]
  misc_feature (20)..(576): NCBI GI: 7801087 Blast Desc: related to MCX1 protein [Neurospora crassa]
  misc_feature (23)..(576): NCBI GI: 145608352 Blast Desc: MGG_03187 [Magnaporthe grisea 70-15] gi|145015830|gb|EDK00320.1| MGG_03187 [Magnaporthe grisea 70-15]
  misc_feature (3)..(576): NCBI GI: 261354870 Blast Desc: ATP-dependent Clp protease ATP-binding subunit clpX [Verticillium albo-atrum VaMs.102]
  misc_feature (202)..(576): NCBI GI: 164424835 Blast Desc: NCU05427 [Neurospora crassa OR74A] gi|157070682|gb|EAA34014.2| NCU05427 [Neurospora crassa OR74A]
  misc_feature (4)..(554): NCBI GI: 240276945 Blast Desc: ATP-dependent Clp protease ATP-binding subunit [Ajellomyces capsulatus H143]
  misc_feature (4)..(554): NCBI GI: 225554601 Blast Desc: ATP-dependent Clp protease ATP-binding subunit clpX [Ajellomyces capsulatus G186AR]
  misc_feature (39)..(554): NCBI GI: 119182495 Blast Desc: CIMG_06272 [Coccidioides immitis RS]
MITSFVRPRASSLAITAPKSRRQSLSTTPVLRTAPRRTSDFNSGFTSSYDPNEEGRGPMFNKSSFGVPQFYPRDLKKRVDEYVVGQDRAKKTISSVIFNHYQNVRLRHHQEEEERKRDEKLMRQAVARDRNNREREPHALEDEYPGHYDSIQKMHQEWQQNEKKVDFYVPEDENRQPAVKIDKSNILLLGPTGVGKTYILETLSQKINVPFTICDCNSFTQAGYIGQDVETCIERLLIESNYDIRATEHGIVVLDEFDKIAKRETTNGRDVGGEGVQQALLKLVEGTKVTINVKDNRSSSSRSASPITTNYTGAGSNTSTSGPQSAPPPSGKVDQYTIDTSNILFVMCGAFVGLDKVILNRVSKSTMGFGSELRNKSADGTHDLAPKLFAHLPHIPANVEHTSKLTALDLTTPEDLQGFGFIPELIGRVHNIVALSPLSRTDLLRILTEPRNSLVAQYTALFETYPSKLFITKKALEAVAERAEKARTGARGLKMEMERILAEPMFDAPTPYVLVTEKAVKGEEKVQYFGKDGRFEVLRRVRDEDGLTAENDPWAPLPEVGNTSLGSFREAGQSGA

SEQ ID NO: 26103 - DNA, 4229 bp, Muscodor strobelii; identical to SEQ ID NO: 26100
  misc_feature: SGI EST ID NO. CUFF.62113.1
  misc_feature: Variant of the nucleotide sequence at SEQ ID NO 26101

SEQ ID NO: 26104 - DNA, 2133 bp, Muscodor strobelii
  misc_feature: SGI cDNA ID NO. 568919
  misc_feature: Reduced expression when VOC is produced
  misc_feature: Encodes the peptide sequence at SEQ ID NO 26105
atggaccccgtagcagatcaatccgccaacgcgctgtcttccgatcccgttgcgggaattcccaacgatggcacaggtgtcgttcagcttgacccatatctctcgcccttcaaggatgctctgaagagaagatatgccaaagcacaagactggatcaagaagatcgatgacacggaaggagggattgaaaaattttccagaggcactgaagtatttgggttcaatgtcgacaaggacaacaacatcatctaccgagaatgggctcccaacgccgttttcgcctctcttgttggagacttcaatcattgggatattaagagtcaccccatgaagcagaacgagtatggtgtatgggagattattgttcccgcggtcaatggagagcctgcgatcccacacaactcgaaggtcaagatatcgatggagaccagatcagctgagcggatcgacagactaccagcatggatcaaatacgttactcaagatctcactgtgtccccggcctatgacgctagattttggaatccaccagagtctgagaaatataaattcaagcaccctcggccaaagaagcccttgagtgcacgggtatacgaagctcatgtgggtatctcatctcctgagctacgtgtcaccacattcaaagaattcaccaagagcatgctaccaagaataaagaaccttgggtacaacgtgattcagctgatggcaatcatggagcacgcatactacgccagttttggttaccaagtcaataacttcttcgccgcgagtagccgttatggcacaccggaagatcttaaggagctgattgacactgctcacggcctaggcttggtcgttctcctagatgtcgtgcatagccatgcttcgaagaacgttcttgacggactgaaccactttgacggttccgatcatctctatttccatgaaggcgcaagaggtcgtcacgagcagtgggatagcagaattttcaactatggacaccatgaagtcatgagattcttgctcagcaacttgagattctggatggatgagttccatttcgatggatttcgctttgatggcgtgacgagtatgctctatcaccatcatggtattggaaccggtttctctggtggttaccatgaatatttcggccccgatgtcgacgaggaagccgtggtttacatgatgatcgcaaacgagatgcttcacaatctctatcctgagagcattactgttgccgaagacgtctctgggatgccggctctctgtctaccgttatcactaggaggagttggatttgactaccgattggcaatggctatccccgatatgtggatcaagatcttgaaagagaaaagagatgaagactgggacatcggcaatatctgtttcactcttaccaatcgccggcatggggaaaagacaattgcatactgcgagagtcacgatcaagcgcttgttggcgataagacactactcatgcatctctgcgacgccgaactttacacaaatatgtcctacctatcaccaatgacgcccgttatcgcacggggtatggcgctacacaagatgatccgtcttctcacgcacggtctcggtggcgagggctatctcaactttgaaggcaacgaattcggtcatcccgaatggctcgacttcccgcgtgaagggaaccagaactccttctggtacgctcgacgacaactcaacctcaccgacgacgatctcctccgatacaaagatctcaacgagttcgatcgacaaatgaacctgacagaggacgcttacgggtggctacacgcagagcaagcctacattagcctcaagaacgaaaacgacaaggtcattatctttgagcgcgcaggctgcgtctttgtattcaatttcaatgccacgcagagtttcactgattatagaatcgggatcgaggttcccggtacttacaagatcgtgttagatactgatacgaaagaagttggtggttttgcgcgagttgacccggctacgagattcttcaccacgcctatggagtggaatggcaggaagaattggacgcatatctaccttcctgcgaggagtgctttggtaagttttctggtgaactatttgacatatatgggcttggggaagctaacggacgaatag

SEQ ID NO: 26105 - protein, 710 aa, Muscodor strobelii
  misc_feature: SGI Peptide ID NO. 568919
  misc_feature (601)..(696): Pfam Id: PF02806 Pfam Desc: Alpha amylase, C-terminal all-beta domain
  misc_feature (208)..(518): Pfam Id: PF00128 Pfam Desc: Alpha amylase, catalytic domain
  misc_feature (71)..(156): Pfam Id: PF02922 Pfam Desc: Isoamylase N-terminal domain
  misc_feature (225)..(286): Pfam Id: PF00128 Pfam Desc: Alpha amylase, catalytic domain
  misc_feature (1)..(692): NCBI GI: 256729414 Blast Desc: glycoside hydrolase family 13 [Nectria haematococca mpVI 77-13-4]
  misc_feature (1)..(700): NCBI GI: 46116942 Blast Desc: FG04313.1 [Gibberella zeae PH-1]
  misc_feature (1)..(691): NCBI GI: 164424837 Blast Desc: 1,4-alpha-glucan branching enzyme [Neurospora crassa OR74A] gi|16416077|emb|CAB91480.2| branching enzyme (be1) [Neurospora crassa] gi|157070683|gb|EAA34016.2| 1,4-alpha-glucan
  misc_feature (8)..(699): NCBI GI: 156050415 Blast Desc: SS1G_07794 [Sclerotinia sclerotiorum 1980] gi|154692195|gb|EDN91933.1| SS1G_07794 [Sclerotinia sclerotiorum 1980]
  misc_feature (20)..(692): NCBI GI: 39942212 Blast Desc: MGG_03186 [Magnaporthe grisea 70-15] gi|145015831|gb|EDK00321.1| MGG_03186 [Magnaporthe grisea 70-15]
  misc_feature (1)..(703): NCBI GI: 171690262 Blast Desc: protein product [Podospora anserina] gi|170945079|emb|CAP71190.1| protein product [Podospora anserina]
  misc_feature (1)..(656): NCBI GI: 261354869 Blast Desc: 1,4-alpha-glucan-branching enzyme [Verticillium albo-atrum VaMs.102]
  misc_feature (23)..(692): NCBI GI: 212532265 Blast Desc: glycogen branching enzyme GbeA, [Penicillium marneffei ATCC 18224] gi|210071653|gb|EEA25742.1| glycogen branching enzyme GbeA, [Penicillium marneffei ATCC 18224]
  misc_feature (23)..(693): NCBI GI: 242775252 Blast Desc: glycogen branching enzyme GbeA, [Talaromyces stipitatus ATCC 10500] gi|218722225|gb|EED21643.1| glycogen branching enzyme GbeA, [Talaromyces stipitatus ATCC 10500]
  misc_feature (13)..(692): NCBI GI: 169786013 Blast Desc: [Aspergillus oryzae RIB40] gi|85701343|sp|Q96VA4.1|GLGB_ASPOR RecName: Full=1,4-alpha-glucan-branching enzyme; AltName: enzyme glycogen
  misc_feature (13)..(692): SWISSPROT Homolog: EC 2.4.1.18 1,4-alpha-glucan branching enzyme
  misc_feature: Useful for introducing or modulating the production of volatile compounds
MDPVADQSANALSSDPVAGIPNDGTGVVQLDPYLSPFKDALKRRYAKAQDWIKKIDDTEGGIEKFSRGTEVFGFNVDKDNNIIYREWAPNAVFASLVGDFNHWDIKSHPMKQNEYGVWEIIVPAVNGEPAIPHNSKVKISMETRSAERIDRLPAWIKYVTQDLTVSPAYDARFWNPPESEKYKFKHPRPKKPLSARVYEAHVGISSPELRVTTFKEFTKSMLPRIKNLGYNVIQLMAIMEHAYYASFGYQVNNFFAASSRYGTPEDLKELIDTAHGLGLVVLLDVVHSHASKNVLDGLNHFDGSDHLYFHEGARGRHEQWDSRIFNYGHHEVMRFLLSNLRFWMDEFHFDGFRFDGVTSMLYHHHGIGTGFSGGYHEYFGPDVDEEAVVYMMIANEMLHNLYPESITVAEDVSGMPALCLPLSLGGVGFDYRLAMAIPDMWIKILKEKRDEDWDIGNICFTLTNRRHGEKTIAYCESHDQALVGDKTLLMHLCDAELYTNMSYLSPMTPVIARGMALHKMIRLLTHGLGGEGYLNFEGNEFGHPEWLDFPREGNQNSFWYARRQLNLTDDDLLRYKDLNEFDRQMNLTEDAYGWLHAEQAYISLKNENDKVIIFERAGCVFVFNFNATQSFTDYRIGIEVPGTYKIVLDTDTKEVGGFARVDPATRFFTTPMEWNGRKNWTHIYLPARSALVSFLVNYLTYMGLGKLTDE

SEQ ID NO: 26106 - DNA, 4607 bp, Muscodor strobelii
  misc_feature: SGI EST ID NO. CUFF.62030.0
  misc_feature: Variant of the nucleotide sequence at SEQ ID NO 26104
ttgtgctccagatgataactaatcgggcctactaccaatcaatcctgtccctcatatcgaacatgagacttgagatacctcaacttttgggtgcagggatcgcctgtgatgtaaaaaagattgccccacgacgtcattcgacatctgcgccatccagagctacattcgtctcctcattctgcagatagaaagcgcgatggtatagaaatatagagccaacgtttgcctcgcatctcttccataaagccataaatactacatgacgaggtagaagacctcatatcgttttcgcacgtcttgctgctcgtccacttcaaacaattcaagattcgaatctcaatagacccgctcttgtggtagcttgataggggagctcttaacttagggcgacgcggggagcttcgaccatcccaatctcgcccaaagcttggttgatgatattcgcgtctctctctctcgttaacaattctcactcagcctggtgatttgcaatatggaccccgtagcagatcaatccgccaacgcgctgtcttccgatcccgttgcgggaattcccaacgatggcacaggtgtcgttcagcttgacccatatctctcgcccttcaaggatgctctgaagagaagatatgccaaagcacaagactggatcaagaagatcgatgacacggaaggagggattgaaaaattttccagaggcactgaagtatttgggttcaatgtcgacaaggacaacaacatcatctaccgagaatgggctcccaacgccgttttcgcctctcttgttggagacttcaatcattgggatattaagagtcaccccatgaagcagaacgagtatggtgtatgggagattattgttcccgcggtcaatggagagcctgcgatcccacacaactcgaaggtcaagatatcgatggagaccagatcagctgagcggatcgacagactaccagcatggatcaaatacgttactcaagatctcactgtgtccccggcctatgacgctagattttggaatccaccagagtctgagaaatataaattcaagcaccctcggccaaagaagcccttgagtgcacgggtatacgaagctcatgtgggtatctcatctcctgagctacgtgtcaccacattcaaagaattcaccaagagcatgctaccaagaataaagaaccttgggtacaacgtgattcagctgatggcaatcatggagcacgcatactacgccagttttggttaccaagtcaataacttcttcgccgcgagtagccgttatggcacaccggaagatcttaaggagctgattgacactgctcacggcctaggcttggtcgttctcctagatgtcgtgcatagccatgcttcgaagaacgttcttgacggactgaaccactttgacggttccgatcatctctatttccatgaaggcgcaagaggtcgtcacgagcagtgggatagcagaattttcaactatggacaccatgaagtcatgagattcttgctcagcaacttgagattctggatggatgagttccatttcgatggatttcgctttgatggcgtgacgagtatgctctatcaccatcatggtattggaaccggtttctctggtggttaccatgaatatttcggccccgatgtcgacgaggaagccgtggtttacatgatgatcgcaaacgagatgcttcacaatctctatcctgagagcattactgttgccgaagacgtctctgggatgccggctctctgtctaccgttatcactaggaggagttggatttgactaccgattggcaatggctatccccgatatgtggatcaagatcttgaaagagaaaagagatgaagactgggacatcggcaatatctgtttcactcttaccaatcgccggcatggggaaaagacaattgcatactgcgagagtcacgatcaagcgcttgttggcgataagacactactcatgcatctctgcgacgccgaactttacacaaatatgtcctacctatcaccaatgacgcccgttatcgcacggggtatggcgctacacaagatgatccgtcttctcacgcacggtctcggtggcgagggctatctcaactttgaaggcaacgaattcggtcatcccgaatggctcgacttcccgcgtgaagggaaccagaactccttctggtacgctcgacgacaactcaacctcaccgacgacgatctcctccgatacaaagatctcaacgagttcgatcgacaaatgaacctgacagaggacgcttacgggtggctacacgcagagcaagcctacattagcctcaagaacgaaaacgacaaggtcattatctttgagcgcgcaggctgcgtctttgtattcaatttcaatgccacgcagagtttcactgattatagaatcgggatcgaggttcccggtacttacaagatcgtgttagatactgatacgaaagaagttggtggttttgcgcgagttgacccggctacgagattcttcaccacgcctatggagtggaatggcaggaagaattggacgcatatctaccttcctgcgaggagtgctttggtattggctcttgagtcgaatgtttctcagaactcataaggcgaaggctatcggacttttgagcgagctatggtataacatgttagcggaagcaggttttcctttttgtcacgaattaaatagatagacgtcaaaacgcgataatataaatggtattcaggtatacccatgttctgctcatctcgtacgacgaattcggcactccagccctagagatattacatcctctactcgataagccactcttcaagctcaacgcccatgcttcttcccacacctctaacaacttcccatccaacattgaccctccactttgcacttctgtctaaatccgcccctcctgcagcaccgccaactctaacaagcaatctcaagctgacaagcgtagcgatcgccatccctacatctccatcaacaccacgttttacatcttcccctccatccatccactcccgtttcgtagcaacgtaaattgcaaccatgcgttcaaggacaaaaacaccgggaccgaggagtttcctcgctatgcgacgatgttttggttttctccccctggaactagctcccgtgcccgtggcagtacccgagaccccgcctcgacgccgtcgtttggcggcagaagcatgccatgtggagaatagcgtgacgtcgaatcttggagcgttgtgtgatgctaggtatgcggcgagtagtagatgtttagccgtaggcggtaaaagagccgataaatccgtcgtgctggagcctttcttctctaccagaccattcgtggaagagggtttcttgacgcgttggatacctggttcgaggatcgattcgtcttggaagtatgcccgggacgcgatgagcagtttgctgaattcgcgcgctttgtgcgttcctgctgctacgggggcggtgaagcgtggccagagggttgcgcagcattgttggagacggggtagggtccgggctgcgggcgcggcgagggagtcgtggactgctgctacgaagcgggtgtagaggtcgtgcgtttcttgcgtcgttgtgtttggtagggatgcgggggggtcgagggagaggattgtgaggtattgggatttggtgtaggctgggaagtggatgtgttgcggtgctgagattcggaggagtgaggttaggggtgttgttaggatgaagattgttgttaggtttggcatctaggagtgtgttagctgttatttcttgtcttctttcttatatagtgacaagtagtttaaaacatacaatctcagacaaccttgcgagagccggaagcaatgtaggcggcgcatcacgctgacgatcaatgccatcaaacactaagacgaacctccagcccggctctcgctctacatatttcaagagctttgatagctcaacggtgagagctgctagtgtctcgcaacgtcccgttggtgtctcgttctgaagcgcatcgctcactagtccgacagttcgctcgaacaagtgtcgcgccgtcacacattccggggacttgacgatggcgtagctcaagtcagagttcggttcgttggagagtgtttcaagcagttggcttgtaatagcagttttgcccgtggcttcggtgccgtggataatgatgttgcggcatggcgcaattcgtgggtggacaaatgttgttaaggcattgatctgggcttcacggcatgggaagctcgtgaagagtgatgccaggagctcatctgggagcttgaaaatcgatgccatatcggcgcacgcaacgggctgcctcaacgaggtcgtcttcttgtcaccaagacgtctcgaggcgaactttgctaacgtaatcaataataagacaaaccccgaattgactttcaggcatcatcattcggaattattattctgacatcgtctcaattctgccgctgcgcctactcattcgcgataccgacgtgcaggtagctctgctcgtcgcgctatgcaggtgagacgtgctgtaaggcctaacctaaactagaatgaaaccgcgcgcaaatgagcttcaacccactttcgtgggaccgatgtaggatcgtcg

SEQ ID NO: 26107 - DNA, 2112 bp, Muscodor strobelii
  misc_feature: SGI cDNA ID NO. 568920
  misc_feature: Encodes the peptide sequence at SEQ ID NO 26108
atggaccccgtagcagatcaatccgccaacgcgctgtcttccgatcccgttgcgggaattcccaacgatggcacaggtgtcgttcagcttgacccatatctctcgcccttcaaggatgctctgaagagaagatatgccaaagcacaagactggatcaagaagatcgatgacacggaaggagggattgaaaaattttccagaggcactgaagtatttgggttcaatgtcgacaaggacaacaacatcatctaccgagaatgggctcccaacgccgttttcgcctctcttgttggagacttcaatcattgggatattaagagtcaccccatgaagcagaacgagtatggtgtatgggagattattgttcccgcggtcaatggagagcctgcgatcccacacaactcgaaggtcaagatatcgatggagaccagatcagctgagcggatcgacagactaccagcatggatcaaatacgttactcaagatctcactgtgtccccggcctatgacgctagattttggaatccaccagagtctgagaaatataaattcaagcaccctcggccaaagaagcccttgagtgcacgggtatacgaagctcatgtgggtatctcatctcctgagctacgtgtcaccacattcaaagaattcaccaagagcatgctaccaagaataaagaaccttgggtacaacgtgattcagctgatggcaatcatggagcacgcatactacgccagttttggttaccaagtcaataacttcttcgccgcgagtagccgttatggcacaccggaagatcttaaggagctgattgacactgctcacggcctaggcttggtcgttctcctagatgtcgtgcatagccatgcttcgaagaacgttcttgacggactgaaccactttgacggttccgatcatctctatttccatgaaggcgcaagaggtcgtcacgagcagtgggatagcagaattttcaactatggacaccatgaagtcatgagattcttgctcagcaacttgagattctggatggatgagttccatttcgatggatttcgctttgatggcgtgacgagtatgctctatcaccatcatggtattggaaccggtttctctggtggttaccatgaatatttcggccccgatgtcgacgaggaagccgtggtttacatgatgatcgcaaacgagatgcttcacaatctctatcctgagagcattactgttgccgaagacgtctctgggatgccggctctctgtctaccgttatcactaggaggagttggatttgactaccgattggcaatggctatccccgatatgtggatcaagatcttgaaagagaaaagagatgaagactgggacatcggcaatatctgtttcactcttaccaatcgccggcatggggaaaagacaattgcatactgcgagagtcacgatcaagcgcttgttggcgataagacactactcatgcatctctgcgacgccgaactttacacaaatatgtcctacctatcaccaatgacgcccgttatcgcacggggtatggcgctacacaagatgatccgtcttctcacgcacggtctcggtggcgagggctatctcaactttgaaggcaacgaattcggtcatcccgaatggctcgacttcccgcgtgaagggaaccagaactccttctggtacgctcgacgacaactcaacctcaccgacgacgatctcctccgatacaaagatctcaacgagttcgatcgacaaatgaacctgacagaggacgcttacgggtggctacacgcagagcaagcctacattagcctcaagaacgaaaacgacaaggtcattatctttgagcgcgcaggctgcgtctttgtattcaatttcaatgccacgcagagtttcactgattatagaatcgggatcgaggttcccggtacttacaagatcgtgttagatactgatacgaaagaagttggtggttttgcgcgagttgacccggctacgagattcttcaccacgcctatggagtggaatggcaggaagaattggacgcatatctaccttcctgcgaggagtgctttggtattggctcttgagtcgaatgtttctcagaactcataa

SEQ ID NO: 26108 - protein, 703 aa, Muscodor strobelii
  misc_feature: SGI Peptide ID NO. 568920
  misc_feature (601)..(696): Pfam Id: PF02806 Pfam Desc: Alpha amylase, C-terminal all-beta domain
  misc_feature (208)..(518): Pfam Id: PF00128 Pfam Desc: Alpha amylase, catalytic domain
  misc_feature (71)..(156): Pfam Id: PF02922 Pfam Desc: Isoamylase N-terminal domain
  misc_feature (225)..(286): Pfam Id: PF00128 Pfam Desc: Alpha amylase, catalytic domain
  misc_feature (1)..(702): NCBI GI: 256729414 Blast Desc: glycoside hydrolase family 13 [Nectria haematococca mpVI 77-13-4]
  misc_feature (1)..(703): NCBI GI: 46116942 Blast Desc: FG04313.1 [Gibberella zeae PH-1]
  misc_feature (1)..(691): NCBI GI: 164424837 Blast Desc: 1,4-alpha-glucan branching enzyme [Neurospora crassa OR74A] gi|16416077|emb|CAB91480.2| branching enzyme (be1) [Neurospora crassa] gi|157070683|gb|EAA34016.2| 1,4-alpha-glucan
  misc_feature (8)..(699): NCBI GI: 156050415 Blast Desc: SS1G_07794 [Sclerotinia sclerotiorum 1980] gi|154692195|gb|EDN91933.1| SS1G_07794 [Sclerotinia sclerotiorum 1980]
  misc_feature (20)..(696): NCBI GI: 39942212 Blast Desc: MGG_03186 [Magnaporthe grisea 70-15] gi|145015831|gb|EDK00321.1| MGG_03186 [Magnaporthe grisea 70-15]
  misc_feature (1)..(702): NCBI GI: 171690262 Blast Desc: protein product [Podospora anserina] gi|170945079|emb|CAP71190.1| protein product [Podospora anserina]
  misc_feature (23)..(699): NCBI GI: 212532265 Blast Desc: glycogen branching enzyme GbeA, [Penicillium marneffei ATCC 18224] gi|210071653|gb|EEA25742.1| glycogen branching enzyme GbeA, [Penicillium marneffei ATCC 18224]
  misc_feature (1)..(656): NCBI GI: 261354869 Blast Desc: 1,4-alpha-glucan-branching enzyme [Verticillium albo-atrum VaMs.102]
  misc_feature (23)..(694): NCBI GI: 242775252 Blast Desc: glycogen branching enzyme GbeA, [Talaromyces stipitatus ATCC 10500] gi|218722225|gb|EED21643.1| glycogen branching enzyme GbeA, [Talaromyces stipitatus ATCC 10500]
  misc_feature (13)..(699): NCBI GI: 121713466 Blast Desc: 1,4-alpha-glucan branching enzyme [Aspergillus clavatus NRRL 1] gi|119402497|gb|EAW12918.1| 1,4-alpha-glucan branching enzyme [Aspergillus clavatus NRRL 1]
  misc_feature (13)..(699): SWISSPROT Homolog: EC 2.4.1.18 1,4-alpha-glucan branching enzyme
MDPVADQSANALSSDPVAGIPNDGTGVVQLDPYLSPFKDALKRRYAKAQDWIKKIDDTEGGIEKFSRGTEVFGFNVDKDNNIIYREWAPNAVFASLVGDFNHWDIKSHPMKQNEYGVWEIIVPAVNGEPAIPHNSKVKISMETRSAERIDRLPAWIKYVTQDLTVSPAYDARFWNPPESEKYKFKHPRPKKPLSARVYEAHVGISSPELRVTTFKEFTKSMLPRIKNLGYNVIQLMAIMEHAYYASFGYQVNNFFAASSRYGTPEDLKELIDTAHGLGLVVLLDVVHSHASKNVLDGLNHFDGSDHLYFHEGARGRHEQWDSRIFNYGHHEVMRFLLSNLRFWMDEFHFDGFRFDGVTSMLYHHHGIGTGFSGGYHEYFGPDVDEEAVVYMMIANEMLHNLYPESITVAEDVSGMPALCLPLSLGGVGFDYRLAMAIPDMWIKILKEKRDEDWDIGNICFTLTNRRHGEKTIAYCESHDQALVGDKTLLMHLCDAELYTNMSYLSPMTPVIARGMALHKMIRLLTHGLGGEGYLNFEGNEFGHPEWLDFPREGNQNSFWYARRQLNLTDDDLLRYKDLNEFDRQMNLTEDAYGWLHAEQAYISLKNENDKVIIFERAGCVFVFNFNATQSFTDYRIGIEVPGTYKIVLDTDTKEVGGFARVDPATRFFTTPMEWNGRKNWTHIYLPARSALVLALESNVSQNS

SEQ ID NO: 26109 - DNA, 4607 bp, Muscodor strobelii; identical to SEQ ID NO: 26106
  misc_feature: SGI EST ID NO. CUFF.62030.0
  misc_feature: Variant of the nucleotide sequence at SEQ ID NO 26107

SEQ ID NO: 26110 - DNA, 1434 bp, Muscodor strobelii
  misc_feature: SGI cDNA ID NO. 568921
  misc_feature: Encodes the peptide sequence at SEQ ID NO 26111
atggcatcgattttcaagctcccagatgagctcctggcatcactcttcacgagcttcccatgccgtgaagcccagatcaatgccttaacaacatttgtccacccacgaattgcgccatgccgcaacatcattatccacggcaccgaagccacgggcaaaactgctattacaagccaactgcttgaaacactctccaacgaaccgaactctgacttgagctacgccatcgtcaagtccccggaatgtgtgacggcgcgacacttgttcgagcgaactgtcggactagtgagcgatgcgcttcagaacgagacaccaacgggacgttgcgagacactagcagctctcaccgttgagctatcaaagctcttgaaatatgtagagcgagagccgggctggaggttcgtcttagtgtttgatggcattgatcgtcagcgtgatgcgccgcctacattgcttccggctctcgcaaggttgtctgagattatgccaaacctaacaacaatcttcatcctaacaacacccctaacctcactcctccgaatctcagcaccgcaacacatccacttcccagcctacaccaaatcccaatacctcacaatcctctccctcgacccccccgcatccctaccaaacacaacgacgcaagaaacgcacgacctctacacccgcttcgtagcagcagtccacgactccctcgccgcgcccgcagcccggaccctaccccgtctccaacaatgctgcgcaaccctctggccacgcttcaccgcccccgtagcagcaggaacgcacaaagcgcgcgaattcagcaaactgctcatcgcgtcccgggcatacttccaagacgaatcgatcctcgaaccaggtatccaacgcgtcaagaaaccctcttccacgaatggtctggtagagaagaaaggctccagcacgacggatttatcggctcttttaccgcctacggctaaacatctactactcgccgcatacctagcatcacacaacgctccaagattcgacgtcacgctattctccacatggcatgcttctgccgccaaacgacggcgtcgaggcggggtctcgggtactgccacgggcacgggagctagttccagggggagaaaaccaaaacatcgtcgcatagcgaggaaactcctcggtcccggtgtttttgtccttgaacgcatggttgcaatttacgttgctacgaaacgggagtggatggatggaggggaagatgtaaaacgtggtgttgatggagatgtagggatggcgatcgctacgcttgtcagcttgagattgcttgttagagttggcggtgctgcaggaggggcggatttagacagaagtgcaaagtggagggtcaatgttggatgggaagttgttagaggtgtgggaagaagcatgggcgttgagcttgaagagtggcttatcgagtag

SEQ ID NO: 26111 - protein, 477 aa, Muscodor strobelii
  misc_feature: SGI Peptide ID NO. 568921
  misc_feature (1)..(477): NCBI GI: 46116952 Blast Desc: FG04318.1 [Gibberella zeae PH-1]
  misc_feature (1)..(477): NCBI GI: 256729216 Blast Desc: NECHADRAFT_105114 [Nectria haematococca mpVI 77-13-4]
  misc_feature (3)..(477): NCBI GI: 85074647 Blast Desc: NCU05433 [Neurospora crassa OR74A] gi|16416076|emb|CAB91476.2| related to origin recognition complex subunit 5 [Neurospora crassa] gi|28924928|gb|EAA34020.1| crassa
  misc_feature (4)..(477): NCBI GI: 171690250 Blast Desc: protein product [Podospora anserina] gi|170945073|emb|CAP71184.1| protein product [Podospora anserina]
  misc_feature (67)..(477): NCBI GI: 145608356 Blast Desc: MGG_03184 [Magnaporthe grisea 70-15] gi|145015833|gb|EDK00323.1| MGG_03184 [Magnaporthe grisea 70-15]
  misc_feature (1)..(289): NCBI GI: 116204739 Blast Desc: CHGG_10253 [Chaetomium globosum CBS 148.51] gi|88176381|gb|EAQ83849.1| CHGG_10253 [Chaetomium globosum CBS 148.51]
  misc_feature (38)..(477): NCBI GI: 156050399 Blast Desc: SS1G_07786 [Sclerotinia sclerotiorum 1980] gi|154692187|gb|EDN91925.1| SS1G_07786 [Sclerotinia sclerotiorum 1980]
  misc_feature (1)..(477): NCBI GI: 154298215 Blast Desc: BC1G_11952 [Botryotinia fuckeliana B05.10] gi|150858138|gb|EDN33330.1| BC1G_11952 [Botryotinia fuckeliana B05.10]
  misc_feature (7)..(475): NCBI GI: 259489450 Blast Desc: TPA: origin recognition complex subunit Orc5, (AFU_orthologue; AFUA_1G02500) [Aspergillus nidulans FGSC A4]
  misc_feature (7)..(475): NCBI GI: 255950608 Blast Desc: Pc22g21760 [Penicillium chrysogenum Wisconsin 54-1255] gi|211593088|emb|CAP99464.1| Pc22g21760 [Penicillium chrysogenum Wisconsin 54-1255]
MASIFKLPDELLASLFTSFPCREAQINALTTFVHPRIAPCRNIIIHGTEATGKTAITSQLLETLSNEPNSDLSYAIVKSPECVTARHLFERTVGLVSDALQNETPTGRCETLAALTVELSKLLKYVEREPGWRFVLVFDGIDRQRDAPPTLLPALARLSEIMPNLTTIFILTTPLTSLLRISAPQHIHFPAYTKSQYLTILSLDPPASLPNTTTQETHDLYTRFVAAVHDSLAAPAARTLPRLQQCCATLWPRFTAPVAAGTHKAREFSKLLIASRAYFQDESILEPGIQRVKKPSSTNGLVEKKGSSTTDLSALLPPTAKHLLLAAYLASHNAPRFDVTLFSTWHASAAKRRRRGGVSGTATGTGASSRGRKPKHRRIARKLLGPGVFVLERMVAIYVATKREWMDGGEDVKRGVDGDVGMAIATLVSLRLLVRVGGAAGGADLDRSAKWRVNVGWEVVRGVGRSMGVELEEWLIE

SEQ ID NO: 26112 - DNA, 3956 bp, Muscodor strobelii
  misc_feature: SGI EST ID NO. CUFF.62031.1
  misc_feature: Variant of the nucleotide sequence at SEQ ID NO 26110
cctacatcggtcccacgaaagtgggttgaagctcatttgcgcgcggtttcattctagtttaggttaggccttacagcacgtctcacctgcatagcgcgacgagcagagctacctgcacgtcggtatcgcgaatgagtaggcgcagcggcagaattgagacgatgtcagaataataattccgaatgatgatgcctgaaagtcaattcggggtttgtcttattattgattacgttagcaaagttcgcctcgagacgtcttggtgacaagaagacgacctcgttgaggcagcccgttgcgtgcgccgatatggcatcgattttcaagctcccagatgagctcctggcatcactcttcacgagcttcccatgccgtgaagcccagatcaatgccttaacaacatttgtccacccacgaattgcgccatgccgcaacatcattatccacggcaccgaagccacgggcaaaactgctattacaagccaactgcttgaaacactctccaacgaaccgaactctgacttgagctacgccatcgtcaagtccccggaatgtgtgacggcgcgacacttgttcgagcgaactgtcggactagtgagcgatgcgcttcagaacgagacaccaacgggacgttgcgagacactagcagctctcaccgttgagctatcaaagctcttgaaatatgtagagcgagagccgggctggaggttcgtcttagtgtttgatggcattgatcgtcagcgtgatgcgccgcctacattgcttccggctctcgcaaggttgtctgagattatgccaaacctaacaacaatcttcatcctaacaacacccctaacctcactcctccgaatctcagcaccgcaacacatccacttcccagcctacaccaaatcccaatacctcacaatcctctccctcgacccccccgcatccctaccaaacacaacgacgcaagaaacgcacgacctctacacccgcttcgtagcagcagtccacgactccctcgccgcgcccgcagcccggaccctaccccgtctccaacaatgctgcgcaaccctctggccacgcttcaccgcccccgtagcagcaggaacgcacaaagcgcgcgaattcagcaaactgctcatcgcgtcccgggcatacttccaagacgaatcgatcctcgaaccaggtatccaacgcgtcaagaaaccctcttccacgaatggtctggtagagaagaaaggctccagcacgacggatttatcggctcttttaccgcctacggctaaacatctactactcgccgcatacctagcatcacacaacgctccaagattcgacgtcacgctattctccacatggcatgcttctgccgccaaacgacggcgtcgaggcggggtctcgggtactgccacgggcacgggagctagttccagggggagaaaaccaaaacatcgtcgcatagcgaggaaactcctcggtcccggtgtttttgtccttgaacgcatggttgcaatttacgttgctacgaaacgggagtggatggatggaggggaagatgtaaaacgtggtgttgatggagatgtagggatggcgatcgctacgcttgtcagcttgagattgcttgttagagttggcggtgctgcaggaggggcggatttagacagaagtgcaaagtggagggtcaatgttggatgggaagttgttagaggtgtgggaagaagcatgggcgttgagcttgaagagtggcttatcgagtagaggatgtaatatctctagggctggagtgccgaattcgtcgtacgagatgagcagaacatgggtatacctgaataccatttatattatcgcgttttgacgtctatctatttaattcgtgacaaaaaggaaaacctgcttccgctaacatgttataccatagctcgctcaaaagtccgatagccttcgccttatgagttctgagaaacattcgactcaagagccaatacctattcgtccgttagcttccccaagcccatatatgtcaaatagttcaccagaaaacttaccaaagcactcctcgcaggaaggtagatatgcgtccaattcttcctgccattccactccataggcgtggtgaagaatctcgtagccgggtcaactcgcgcaaaaccaccaacttctttcgtatcagtatctaacacgatcttgtaagtaccgggaacctcgatcccgattctataatcagtgaaactctgcgtggcattgaaattgaatacaaagacgcagcctgcgcgctcaaagataatgaccttgtcgttttcgttcttgaggctaatgtaggcttgctctgcgtgtagccacccgtaagcgtcctctgtcaggttcatttgtcgatcgaactcgttgagatctttgtatcggaggagatcgtcgtcggtgaggttgagttgtcgtcgagcgtaccagaaggagttctggttcccttcacgcgggaagtcgagccattcgggatgaccgaattcgttgccttcaaagttgagatagccctcgccaccgagaccgtgcgtgagaagacggatcatcttgtgtagcgccataccccgtgcgataacgggcgtcattggtgataggtaggacatatttgtgtaaagttcggcgtcgcagagatgcatgagtagtgtcttatcgccaacaagcctgcaaatgaagttagctccgtgatgtcctctcggaacggtggacccacgcttgatcgtgactctcgcagtatgcaattgtcttttccccatgccggcgattggtaagagtgaaacagatattgccgatgtcccagtcttcatctcttttctctttcaagatcttgatccacatatcggggatagccattgccaatcggtagtcaaatccaactcctcctagtgataacggtagacagagagccggcatcccagagacgtcttcggcaacagtaatgctctcaggatagagattgtgaagcatctcgtttgcgatcatcatgtaaaccacggcttcctcgtcgacatcggggccgaaatattcatggtaaccaccagagaaaccgctgttgaaattagcatcactattgtgttcgcgacagaaataagataaaactcacgttccaataccatgatggtgatagagcatactcgtcacgccatcaaagcgaaatccatcgaaatggaactcatccatccagaatctcaagttgctgagcaagaatctcatgacttcatggtgtccatagttgaaaattctgctatcccactgctcgtgacgacctcttgcgccttcatggaaatagagatgatcggaaccgtcaaagtggttcagtccgtcaagaacgttcttcgaagcatggctatgcacgacatctaggagaacgaccaagcctaggccgtgagcagtgtcaatcagctccttaagatcttccggtgtgccataacggctactcgcggcgaagaagttattgacttggtaaccaaaactggcgtagtatgcgtgctccatgattgccatcagctgaatcacgttgtacccaaggttctttattcttggtagcatgctcttggtgaattctttgaatgtggtgacacgtagctcaggagatgagatacccacatgagcttcgtatacccgtgcactcaagggcttctttggccgagggtgcttgaatttatatttctcagactctggtggattccaaaatctagcgtcataggccggggacacagtgagatcttgagtaacgtatttgatccatgctggtagtctgtcgatccgctcagctgatctggtctccatcgatatctatatgacaaatgtgggttagggtcgaaaatcgatccaaattatcatagccataccttgaccttcgagttgtgtgggatcgcaggctctccattgaccgcgggaacaataatctcccatacaccatactcgttctgcttcatggggtgactcttaatatcccaatg

SEQ ID NO: 26113 - DNA, 1539 bp, Muscodor strobelii
  misc_feature: SGI cDNA ID NO. 568922
  misc_feature: Encodes the peptide sequence at SEQ ID NO 26114
atggaagaattagatcttgatctggacttggatcctgccttcgacttgacttttgatacggatcttcccagctttgctatcaatgatgtccccgccgattccccaattccatcaaccgagaatgcaagccagaacgccgacgaagactcaggggctaccactcacaaaccattctaccctaagaaacctcaccgcaaatctcgtgctggttgtcgacaatgtaagaaacgcaaagtaaagtgcgatgaggccaagccagcttgcacggcatgtactcttcggaaggagaagtgtgaatatcccaattctccggcttcaacgggcaagtcatctgcgagcagccccgaaaagagctcgcttgctctccgatcccgctcgccaacaccggatccatcaatattcgggggttatggtttcgagcccaccactgtccctgtcattgcagaacctatattcaagcccgaagatagagatggtgtcgacatgaagatgctatggttctacaacacttatgctttccagtcattctccgtgaacactaacttctcacaaatcattgactacgctctcaaagtcaaagtcatcgaacatgccttccagtctcctttccttatggatacgctcatgggcttatcggcattgcatctcaattcgttaggtcagcctatcccgcagcacaagtcggccgcctaccagtcacgggcgttcgaaggttatcggagcgccatagagaaggccagtcctgatgattatcctgccctgttgggctgctcgttgttcatgatcgcattgagtagtcagaactttaggggaccgaaccgaaaacgactcttcattattgaatggatacacatctggcgtggcattggtctgatcatcgaactcatctcgccacgagctgtccaggactccggtcttgccgttttgttctatcggcctccaattgacccggagaagtcaatggagtatattcctaataatctcttgtttatgatctcgtcaatcaaatacggagacggtgattatgaacaccaaaaggagtattatgactttctcaagatccttggctcgttatatcaagagcttaagcaatacgggttcggaccagttcttaatctgcgcgttatcacattcttcagcttctttccgaggattatgctgccacttgctagacaacttcgaccgcgtgtcttaatcatcattgcccattggttatgtttcgtcaaatgcgcagagccaggtgcatggtggatgaaagggctcatgccaacaatggatgacatctgcgacgaacttggcgacgaatgggaacacctgttgcgggttcctagattgatcatgcagactgaagatcatgtgaaaatggcccgaattctcattgacaacgatgactggacacccggagaggtggatttgttcaaaaaccgcgacccgagaataagaaacggacttcggctaatcactgtgagtgactacctatcgcgaccgacgacgacaggagatctagccgagaaattagagaaatggacggtgaagtga

SEQ ID NO: 26114 - protein, 512 aa, Muscodor strobelii
  misc_feature: SGI Peptide ID NO. 568922
  misc_feature (69)..(107): Pfam Id: PF00172 Pfam Desc: Fungal Zn(2)-Cys(6) binuclear cluster domain
  misc_feature (31)..(468): NCBI GI: 256729213 Blast Desc: NECHADRAFT_47731 [Nectria haematococca mpVI 77-13-4]
  misc_feature (40)..(467): NCBI GI: 46116938 Blast Desc: FG04311.1 [Gibberella zeae PH-1]
  misc_feature (56)..(467): NCBI GI: 39942206 Blast Desc: MGG_03183 [Magnaporthe grisea 70-15] gi|145015835|gb|EDK00325.1| MGG_03183 [Magnaporthe grisea 70-15]
  misc_feature (56)..(465): NCBI GI: 116204741 Blast Desc: CHGG_10254 [Chaetomium globosum CBS 148.51] gi|88176382|gb|EAQ83850.1| CHGG_10254 [Chaetomium globosum CBS 148.51]
  misc_feature (50)..(465): NCBI GI: 256724280 Blast Desc: NECHADRAFT_53539 [Nectria haematococca mpVI 77-13-4]
  misc_feature (51)..(466): NCBI GI: 171690252 Blast Desc: protein product [Podospora anserina] gi|170945074|emb|CAP71185.1| protein product [Podospora anserina]
  misc_feature (58)..(460): NCBI GI: 154298213 Blast Desc: BC1G_11951 [Botryotinia fuckeliana B05.10] gi|150858137|gb|EDN33329.1| BC1G_11951 [Botryotinia fuckeliana B05.10]
  misc_feature (160)..(460): NCBI GI: 156050397 Blast Desc: SS1G_07785 [Sclerotinia sclerotiorum 1980] gi|154692186|gb|EDN91924.1| SS1G_07785 [Sclerotinia sclerotiorum 1980]
  misc_feature (60)..(436): NCBI GI: 238506353 Blast Desc: C6 transcription factor, [Aspergillus flavus NRRL3357] gi|220689091|gb|EED45442.1| C6 transcription factor, [Aspergillus flavus NRRL3357]
  misc_feature (61)..(445): NCBI GI: 238508026 Blast Desc: conserved [Aspergillus flavus NRRL3357] gi|220688733|gb|EED45085.1| conserved [Aspergillus flavus NRRL3357]
MEELDLDLDLDPAFDLTFDTDLPSFAINDVPADSPIPSTENASQNADEDSGATTHKPFYPKKPHRKSRAGCRQCKKRKVKCDEAKPACTACTLRKEKCEYPNSPASTGKSSASSPEKSSLALRSRSPTPDPSIFGGYGFEPTTVPVIAEPIFKPEDRDGVDMKMLWFYNTYAFQSFSVNTNFSQIIDYALKVKVIEHAFQSPFLMDTLMGLSALHLNSLGQPIPQHKSAAYQSRAFEGYRSAIEKASPDDYPALLGCSLFMIALSSQNFRGPNRKRLFIIEWIHIWRGIGLIIELISPRAVQDSGLAVLFYRPPIDPEKSMEYIPNNLLFMISSIKYGDGDYEHQKEYYDFLKILGSLYQELKQYGFGPVLNLRVITFFSFFPRIMLPLARQLRPRVLIIIAHWLCFVKCAEPGAWWMKGLMPTMDDICDELGDEWEHLLRVPRLIMQTEDHVKMARILIDNDDWTPGEVDLFKNRDPRIRNGLRLITVSDYLSRPTTTGDLAEKLEKWTVK

SEQ ID NO: 26115 - DNA, 3868 bp, Muscodor strobelii
  misc_feature: SGI EST ID NO. CUFF.61573.0
  misc_feature: Variant of the nucleotide sequence at SEQ ID NO 26113
gggaaacccaccaagcccaattgactacagcgtctccagcgcctcaacgcagagtaatgtcaagtcctgatcctactgctactccatatctgctgtacaacatcactcttctgtcattatctctgagctcatcgaattaaaagaccattgaggcctccgcagtcattaggacgcattcgagttctctcgaaactatattggattgacttggcaactctcaggtcgcctgctatcagacctaagtgttgtgttccagattctctcgctccacacttctgatagaatcaagtgacgtccttatgtcagcttcatgacctacataccaggctctggtgaaacatggaagaattagatcttgatctggacttggatcctgccttcgacttgacttttgatacggatcttcccagctttgctatcaatgatgtccccgccgattccccaattccatcaaccgagaatgcaagccagaacgccgacgaagactcaggggctaccactcacaaaccattctaccctaagaaacctcaccgcaaatctcgtgctggttgtcgacaatgtaagaaacgcaaagtaaagtgcgatgaggccaagccagcttgcacggcatgtactcttcggaaggagaagtgtgaatatcccaattctccggcttcaacgggcaagtcatctgcgagcagccccgaaaagagctcgcttgctctccgatcccgctcgccaacaccggatccatcaatattcgggggttatggtttcgagcccaccactgtccctgtcattgcagaacctatattcaagcccgaagatagagatggtgtcgacatgaagatgctatggttctacaacacttatgctttccagtcattctccgtgaacactaacttctcacaaatcattgactacgctctcaaagtcaaagtcatcgaacatgccttccagtctcctttccttatggatacgctcatgggcttatcggcattgcatctcaattcgttaggtcagcctatcccgcagcacaagtcggccgcctaccagtcacgggcgttcgaaggttatcggagcgccatagagaaggccagtcctgatgattatcctgccctgttgggctgctcgttgttcatgatcgcattgagtagtcagaactttaggggaccgaaccgaaaacgactcttcattattgaatggatacacatctggcgtggcattggtctgatcatcgaactcatctcgccacgagctgtccaggactccggtcttgccgttttgttctatcggcctccaattgacccggagaagtcaatggagtatattcctaataatctcttgtttatgatctcgtcaatcaaatacggagacggtgattatgaacaccaaaaggagtattatgactttctcaagatccttggctcgttatatcaagagcttaagcaatacgggttcggaccagttcttaatctgcgcgttatcacattcttcagcttctttccgaggattatgctgccacttgctagacaacttcgaccgcgtgtcttaatcatcattgcccattggttatgtttcgtcaaatgcgcagagccaggtgcatggtggatgaaagggctcatgccaacaatggatgacatctgcgacgaacttggcgacgaatgggaacacctgttgcgggttcctagattgatcatgcagactgaagatcatgtgaaaatggcccgaattctcattgacaacgatgactggacacccggagaggtggatttgttcaaaaaccgcgacccgagaataagaaacggacttcggctaatcactgtgagtgactacctatcgcgaccgacgacgacaggagatctagccgagaaattagagaaatggacggtgaagtgaccaggctgacctgtttgatgcaccagaacgacggagaagaagtgtcccttgcgaacggtcagtggatgttcaagcaaagaaaaatcacttggccggaggaatcagtgctgcaaccaacacctgatgttgaccttcaaagcgaaaaattcctacttggtagtagcctagtctacaagcctgccacggaatctgcagcatcacctgttggatcaactccatctagtggtggcctgtctacgcctagtggacattcagcatcgccgaagtcaccatctccttgacgaaagagatctgcagtcttggtgaaaattctctgacaaagtcacagacccgtttctcacaggcttccatcttcagaggatctgagaaaaacatcacgtcgaaggcgcaatatttgttcgttctctgagtcacaaccttgtattattatgaggtgctgtgctccaaactgtcatgattgaagcattaccaactattccacatgatcatatatacagatggaccctcagaggacgtcgtgtttcggtcatgagagccctcttggagcttacaagagtccgaaccagatctcactagcagtcaaattcgccggaacactatgtcctaccccttgcgcgtagataccctggacatggtctccataattgcttgttgtgtatccggactgtggcgagttcgatgcggtgctggttgctgtttgtgagacattaaacactccagtccactgcttgatctcttcttggtagttctgcggcgcaagcgtagtgtccgcacttccatgccacacttgcatctttggtcgtggcccgtcgtagcctggatacatgttcaacacgacttgtttccactgatccgcgctagctttggacgagccgccactgcatgagttgttccactggtcgacgccgcccgaagagctgacgaagcaacccgccgccacaccgctatatagtgatacagcgttgatgagctccggatacgtagcagctagaacgttggacatcattgcgccgctcgaaccgccagtgacatagacgcgggaggcatctgcgctgtacgttttgatggcatacacaatcatattggcgatggcctgggaatctcctccgccaaggtgcgagagggaggactttgacgagacatcccagcaagttccactatttggcgagcttggccagattgtgatatagcctttcgagtcagacccttgcttccatggtattttactattcgtgaaataggattgcgcagaagactggcaagaatggatcacgactacgagcggcggattcgcgaccacattgtcgggcttgtacacccacctgagtgttttcatcagcagccgccttcaaacggacaaacatttttcatgagtcattgcgacaaggagaacagttgacaagattgggtaccaacatacatctgggctttagaagtcgcattgttctcgtaattcgaaacctgcgtcagagacgcggcctgggcgattgtggcgaagacaagtgaggagaacagcatctccaaccaaatttttcgatgatacttgtatatatatatgtacttaagaagcaagatatactatgcacattgacttcgaaagcgaaacttcacgtcagattcctcgagccaagacatgctgtacttataccaaacccaacacggcgtcaaaccgccgatatacgtgaaaaaaacagaactattaatttcgtatagattactctctcgcctccctagatgtatgggtgccctggctgatgcggggagcggcttattgacgatgttatgtcggctaaagagaacaccatggaaccagcaatcaattgcccgttcacgagggtttcggttgtagatctaagtgcgtcactccatttcacgtagatcttcgaagtatcctggagtctggtctgcatttgatgaaccgatggcgcaggaactaatgactccaggtagactgtctgatgtttgggaaaatgatcttggcgtggtgttg

SEQ ID NO: 26116 - DNA, 873 bp, Muscodor strobelii
  misc_feature: SGI cDNA ID NO. 568923
  misc_feature: Encodes the peptide sequence at SEQ ID NO 26117
atgctgttctcctcacttgtcttcgccacaatcgcccaggccgcgtctctgacgcaggtttcgaattacgagaacaatgcgacttctaaagcccagatgtgggtgtacaagcccgacaatgtggtcgcgaatccgccgctcgtagtcgtgatccattcttgccagtcttctgcgcaatcctatttcacgaatagtaaaataccatggaagcaagggtctgactcgaaaggctatatcacaatctggccaagctcgccaaatagtggaacttgctgggatgtctcgtcaaagtcctccctctcgcaccttggcggaggagattcccaggccatcgccaatatgattgtgtatgccatcaaaacgtacagcgcagatgcctcccgcgtctatgtcactggcggttcgagcggcgcaatgatgtccaacgttctagctgctacgtatccggagctcatcaacgctgtatcactatatagcggtgtggcggcgggttgcttcgtcagctcttcgggcggcgtcgaccagtggaacaactcatgcagtggcggctcgtccaaagctagcgcggatcagtggaaacaagtcgtgttgaacatgtatccaggctacgacgggccacgaccaaagatgcaagtgtggcatggaagtgcggacactacgcttgcgccgcagaactaccaagaagagatcaagcagtggactggagtgtttaatgtctcacaaacagcaaccagcaccgcatcgaactcgccacagtccggatacacaacaagcaattatggagaccatgtccagggtatctacgcgcaaggggtaggacatagtgttccggcgaatttgactgctagtgagatctggttcggactcttgtaa

SEQ ID NO: 26117 - protein, 290 aa, Muscodor strobelii
  misc_feature: SGI Peptide ID NO. 568923
  misc_feature (1)..(289): NCBI GI: 169616750 Blast Desc: SNOG_11550 [Phaeosphaeria nodorum SN15] gi|111060138|gb|EAT81258.1| SNOG_11550 [Phaeosphaeria nodorum SN15]
  misc_feature (14)..(289): NCBI GI: 171690266 Blast Desc: protein product [Podospora anserina] gi|170945081|emb|CAP71192.1| protein product [Podospora anserina]
  misc_feature (15)..(289): NCBI GI: 116196984 Blast Desc: CHGG_05090 [Chaetomium globosum CBS 148.51] gi|88181003|gb|EAQ88471.1| CHGG_05090 [Chaetomium globosum CBS 148.51]
  misc_feature (16)..(289): NCBI GI: 169624630 Blast Desc: SNOG_15575 [Phaeosphaeria nodorum SN15] gi|111055830|gb|EAT76950.1| SNOG_15575 [Phaeosphaeria nodorum SN15]
  misc_feature (12)..(289): NCBI GI: 85091898 Blast Desc: NCU04870 [Neurospora crassa OR74A] gi|28920527|gb|EAA29891.1| NCU04870 [Neurospora crassa OR74A]
  misc_feature (5)..(289): NCBI GI: 171676782 Blast Desc: protein product [Podospora anserina] gi|170936458|emb|CAP61115.1| protein product [Podospora anserina]
  misc_feature (9)..(289): NCBI GI: 121698961 Blast Desc: acetyl xylan esterase, [Aspergillus clavatus NRRL 1] gi|119396003|gb|EAW06435.1| acetyl xylan esterase, [Aspergillus clavatus NRRL 1]
  misc_feature (14)..(289): NCBI GI: 119485504 Blast Desc: acetyl xylan esterase, [Neosartorya fischeri NRRL 181] gi|119410342|gb|EAW20289.1| acetyl xylan esterase, [Neosartorya fischeri NRRL 181]
  misc_feature (14)..(289): NCBI GI: 70983864 Blast Desc: acetyl xylan esterase [Aspergillus fumigatus Af293] gi|66845084|gb|EAL85420.1| acetyl xylan esterase, [Aspergillus fumigatus Af293]
  misc_feature (14)..(289): NCBI GI: 74697396 Blast Desc: AXE1_PENPU RecName: Full=Acetylxylan esterase 1; AltName: Full=AXE I; Flags: Precursor gi|22135562|gb|AAM93261.1| acetyl xylan esterase [Penicillium purpurogenum]
  misc_feature (14)..(289): SWISSPROT Homolog: EC 3.1.1.72 Acetylxylan esterase
MLFSSLVFATIAQAASLTQVSNYENNATSKAQMWVYKPDNVVANPPLVVVIHSCQSSAQSYFTNSKIPWKQGSDSKGYITIWPSSPNSGTCWDVSSKSSLSHLGGGDSQAIANMIVYAIKTYSADASRVYVTGGSSGAMMSNVLAATYPELINAVSLYSGVAAGCFVSSSGGVDQWNNSCSGGSSKASADQWKQVVLNMYPGYDGPRPKMQVWHGSADTTLAPQNYQEEIKQWTGVFNVSQTATSTASNSPQSGYTTSNYGDHVQGIYAQGVGHSVPANLTASEIWFGLL

SEQ ID NO: 26118 - DNA, 546 bp, Muscodor strobelii
  misc_feature: SGI cDNA ID NO. 568924
  misc_feature: Encodes the peptide sequence at SEQ ID NO 26119
atggccacacaaggacgtagctcatccgaaatcccggactcgggacagcctgccaatacgccggcgacggcgcgcgaagtgagcctcccgccgaatgtctcgatctacacagggcctagtaacgcacagcttctccgcgccagcctctttactcgactagtaacgacagtccaagactcggcacaattgtccgccgctttgggatcggagagcgatgccttttgccatcagcatcagaacgttgtgctcatcttcgacgaggatctagacactcatcacgagcacttccgccaggtatgcttgcagctcaagaagcacggtgacctgggattggagtacggccggtgcatatttgacgtcgcgacctctctggaggctgggttccaaatggatcagctgcagggcggcgctgttatggtcgttgatcttcaagactacgacgacgatgacagcgatgacgatgatgaggaagacgaagccagcctcctggctgcattgggagagccgattagcggtgctgtagggtctgaggcctcgcagtcttga

SEQ ID NO: 26119 - protein, 181 aa, Muscodor strobelii
  misc_feature: SGI Peptide ID NO. 568924
  misc_feature (14)..(143): NCBI GI: 256730029 Blast Desc: NECHADRAFT_101084 [Nectria haematococca mpVI 77-13-4]
  misc_feature (29)..(143): NCBI GI: 46126459 Blast Desc: FG07607.1 [Gibberella zeae PH-1]
  misc_feature (32)..(141): NCBI GI: 261357981 Blast Desc: [Verticillium albo-atrum VaMs.102]
MATQGRSSSEIPDSGQPANTPATAREVSLPPNVSIYTGPSNAQLLRASLFTRLVTTVQDSAQLSAALGSESDAFCHQHQNVVLIFDEDLDTHHEHFRQVCLQLKKHGDLGLEYGRCIFDVATSLEAGFQMDQLQGGAVMVVDLQDYDDDDSDDDDEEDEASLLAALGEPISGAVGSEASQS

SEQ ID NO: 26120 - DNA, 1191 bp, Muscodor strobelii
  misc_feature: SGI EST ID NO. CUFF.61592.1
  misc_feature: Variant of the nucleotide sequence at SEQ ID NO 26118
tccacatcccggtcctaccataaacaacctggtccacagcgtagaactggacacataatggccacacaaggacgtagctcatccgaaatcccggactcgggacagcctgccaatacgccggcgacggcgcgcgaagtgagcctcccgccgaatgtctcgatctacacagggcctagtaacgcacagcttctccgcgccagcctctttactcgactagtaacgacagtccaagactcggcacaattgtccgccgctttgggatcggagagcgatgccttttgccatcagcatcagaacgttgtgctcatcttcgacgaggatctagacactcatcacgagcacttccgccaggtatgcttgcagctcaagaagcacggtgacctgggattggagtacggccggtgcatatttgacgtcgcgacctctctggaggctgggttccaaatggatcagctgcagggcggcgcttggtcgttgatcttcaagactacgacgacgatgacagcgatgacgatgatgaggaagacgaagccagcctcctggctgcattgggagagccgattagcggtgctgtagggtctgaggcctcgcagtcttgagcaatcatcagtcaccagtgagaatcacaatgcactctcttggtaatgccaatatgatcaagtcgatatttggaccaagctggtgatcatggacggctccagggcaatacagtaggttgcacccactagtcactggatgtctcctaagtccaggcatgcaaggccatcgctagaggatttgctcaatatcgagggtcaatgtccatgccgaccgtccgtgttccgaatgagcaattagcgtatcagtgcttcgagccgagcgtaggcgggtaccttgaaatgatggtcgaattcgtggacgagtcaagaagtgtaaaatgcaagaattccggggttccggcatatgtcatggatcatcatatcactcgcatatggccatgttcccataaataatggggatcaagaaggatatgcctctctagcgatctggcttgggtccgtcgcaactggctagagggtcgaatatcccaaacgtcgcaactacctcctccttgggttgaaggtcgcggatacgccatatacaacgagtacactgttcgtgcctacaccccagaataggtcacctgaaacccaaaatcaaaatatcgtattt

SEQ ID NO: 26121 - DNA, 1131 bp, Muscodor strobelii
  misc_feature: SGI cDNA ID NO. 568925
  misc_feature: Encodes the peptide sequence at SEQ ID NO 26122
atggagtctagtgcacttccaacccgaaattccaacgttgcgcccggcttactgccagttactaagactccgcgatgggctttcacaaagaagtatagatcgctgtgggcaagaaggatcggcgagttttcagcattcaagagtcatgtacaggcaaagaccgccttcattgccatggatgtcgaatcatgcccagacggatccatcaccgaaattggcatggcacatctgccacatataggccatcagaagccgaccgatatcaagaaatttgctgaagaacacaacgttgagtttggctgtttgacatttcgccaacagaaagagccaagagtggaaagagagaacttcaaatggagttgtagaggaacgtctgtacaggaggttgacatcggctcagccgagggcaaagtaattgagttctttgatcgcgttagagagctttccggtctccaacatatcacagttattggctttgccatgcatgcagagttcatggcattttttggtcaaatgccggccatcatcacgcatatatcttcctggatcgacatacagcccattatctgggaagtggacagaatagccgaggcgtcatcagactttattctaggtgggctaccttcgatatctgtgtctttggcagggtttggatttgaaaagggataccaacctacgagcttcagacacagtgcaagcaatgatgctgtccgcatcctagctctattcacttgcctggctcacacaccatcttgtgggttcaaactgggtctacaacaacacctcgccgagcgagcacaaactattcgacagggcaagaaagcagtcagacagaagcggaaagggacgaaactgaaaagtacaaagctgatcttcgatcgctaccagttcaaggctattctccgtatggtggacagaaaatgccccggtcctgagctggatagccctcgaaagcttcaagaatttttcagcgaatataacattgtagctattggtcacgatgggccacataacggtggtcaccctccaaggcgagatacacgggaaaagaataaggagaacttgaacaagatgacagaggatgggctcgggctggactttattagtaacatggaagctatgtcagtatag

SEQ ID NO: 26122 - protein, 376 aa, Muscodor strobelii
  misc_feature: SGI Peptide ID NO. 568925
  misc_feature (82)..(253): NCBI GI: 85096723 Blast Desc: NCU07131 [Neurospora crassa OR74A] gi|28921801|gb|EAA31078.1| [Neurospora crassa OR74A]
MESSALPTRNSNVAPGLLPVTKTPRWAFTKKYRSLWARRIGEFSAFKSHVQAKTAFIAMDVESCPDGSITEIGMAHLPHIGHQKPTDIKKFAEEHNVEFGCLTFRQQKEPRVERENFKWSCRGTSVQEVDIGSAEGKVIEFFDRVRELSGLQHITVIGFAMHAEFMAFFGQMPAIITHISSWIDIQPIIWEVDRIAEASSDFILGGLPSISVSLAGFGFEKGYQPTSFRHSASNDAVRILALFTCLAHTPSCGFKLGLQQHLAERAQTIRQGKKAVRQKRKGTKLKSTKLIFDRYQFKAILRMVDRKCPGPELDSPRKLQEFFSEYNIVAIGHDGPHNGGHPPRRDTREKNKENLNKMTEDGLGLDFISNMEAMSV

SEQ ID NO: 26123 - DNA, 1659 bp, Muscodor strobelii
  misc_feature: SGI cDNA ID NO. 568926
  misc_feature: Encodes the peptide sequence at SEQ ID NO 26124
atggctttatggacggacatatgcttgccgcctttaaggtgccataggccactgtctcaacttacggcttggtcgcttgaaacgacattagatacagcgattgctgttgttgatttgtcgatcgacctgatacataatcttcgacactttatctcgcccaacccacgatcaacgaaaaagcaggatatcgctgctttcgaaaagctagtcagcacacaaataacctctttgcagactttactggagtctcaacataagtacgcgttcgtgggcttcgatgttgagtttttgcgagaggagagagctgccacagaggtaggactcgcactcttgacagacttgagtcctgtgccagagtgtaacacagacggatggaggacacttgattcgtttgtgaaactcacatctgtcaaggcagtgtcgatcaagatcaatggtcgacatcaattcaaatcgaatcagcaggacgctatgggtcgtacagctaggtttgaacggtcggcattcggagaagaatcctacgtcgatttagagggtcttgagtcggcgattcgggatgccatacgcatcttgcgcagccaggccggatccaaacgtcttattttgactggattctctctctctgatgatttcaaagctatgaagcgagacttccctgggattgcaagggagtttgagggatatgttgatgtttctcaattacaagacacactagcggattcttatccgcctcgtcgcagccccggtgttgcaataagtgcacgactattcaaaattcgttgcttctcaccgcgatacagctgggacacgtcgtcacagctttactatgtacatagaaagagcaatgtatatcacaatgcggcaaacgacgccgtccgaacattagcccttttgcacgccctgccacatatttcaactgctatgttataccgattgaggcaaaagcagaagtcgccacgagaaacatcctacgcgccgtatcaccggacgcgataccctcccgaagatagtgtagttattctacgcccgaggaaaggtctcttgcctcctgaattgcgctcgcaagaacgtatcagcgagtttcttcaaccatatcgcgactacgatccatacgaagtgggaggctatggtcatggtgatcgagtttgggtcaaattcgtcgacgcggcaggtccaccgatctttctacgcgacatgcataactattttttcgatcaggagatggacatacggtcagggctcgacgaccaagaattgagaaagcagcgtgaggaatatggagagaaggttcgtctagttacgcgcggagaacggcgtcgacagaatacccggaaaagaacagaacgtgagatagcagacaggatgatacatgaagagctacaatttaggccgatgtgcaacaacgacaacaagaatttgtgtaggtggcaaaaaggagaacgtgaaatagccgactggatgctgcaagcatcgcatggaatcattgacgatttacaatccatcctaatgggcaacaacaaagacgaagattttcgtcattctttcgatctcaacatattgttcaaagaatcgcgtcgatccaacattatggaagcgtgtgacgatgggagtcccttgaacttggaagggatgtttgaccttgctgattctgagctgtaa

SEQ ID NO: 26124 - protein, 552 aa, Muscodor strobelii
  misc_feature: SGI Peptide ID NO. 568926
MALWTDICLPPLRCHRPLSQLTAWSLETTLDTAIAVVDLSIDLIHNLRHFISPNPRSTKKQDIAAFEKLVSTQITSLQTLLESQHKYAFVGFDVEFLREERAATEVGLALLTDLSPVPECNTDGWRTLDSFVKLTSVKAVSIKINGRHQFKSNQQDAMGRTARFERSAFGEESYVDLEGLESAIRDAIRILRSQAGSKRLILTGFSLSDDFKAMKRDFPGIAREFEGYVDVSQLQDTLADSYPPRRSPGVAISARLFKIRCFSPRYSWDTSSQLYYVHRKSNVYHNAANDAVRTLALLHALPHISTAMLYRLRQKQKSPRETSYAPYHRTRYPPEDSVVILRPRKGLLPPELRSQERISEFLQPYRDYDPYEVGGYGHGDRVWVKFVDAAGPPIFLRDMHNYFFDQEMDIRSGLDDQELRKQREEYGEKVRLVTRGERRRQNTRKRTEREIADRMIHEELQFRPMCNNDNKNLCRWQKGEREIADWMLQASHGIIDDLQSILMGNNKDEDFRHSFDLNILFKESRRSNIMEACDDGSPLNLEGMFDLADSEL

SEQ ID NO: 26125 - DNA, 298 bp, Muscodor strobelii
  misc_feature: SGI EST ID NO. CUFF.61589.0
  misc_feature: Variant of the nucleotide sequence at SEQ ID NO 26123
aaggtctcttgcctcctgaattgcgctcgcaagaacgtatcagcgagtttcttcaaccatatcgcgactacgatccatacgaagtgggaggctatggtcatggtgatcgagtttgggtcaaattcgtcgacgcggcaggtccaccgatctttctacgcgacatgcataactattttttcgatcaggagatggacatacggtcagggctcgacgaccaagaattgagaaagcagcgtgaggaatatggagagaaggttcgtctagttacgcgcggagaacggcgtcgacagaatacccg

SEQ ID NO: 26126 - DNA, 897 bp, Muscodor strobelii
  misc_feature: SGI cDNA ID NO. 568927
  misc_feature: Encodes the peptide sequence at SEQ ID NO 26127
atgaagctatctgcaatcgccctctgcggggtgccctctgccatggccgttgccataggccaattgtcggacgagaatcccgccgtttgggcaaatgcgaagccaacgcttgaagaattaacgggctcttctagtcttgaggcgcgacagacgggttggaatcctccatccaacctggtaactcccctgaagcaagtatgggaccattgcttgagcacgtactccaatggtctctatgggttcaagaactacggatgggatcagatcagagctacttcggggaaaatcaacgtttgcgtgcgctgggaatcctctgcaacagtgacagaagctcagcgagctcaagttgcgtccaattatgcagcgcaataccagaattggttcaaatggctctatggctatgataacttcccctacagcaacattagcgtgaatgtggtaggatgggctgtcaaggacaagagtctcctacagggttcaacatcaggcatcacggtctacacggacaaagatagtgcaggcgcaccgcagtgtgccgaggcttgtggtcgcttcttccatcaagacggcaactatgcatcatgtgccggcggctccgcggctcactacgatcactccttgtggttgacggacgggttcggcggcggggcgggtggtgactggggacagaggatcggccgggagtacttcatgggcgcacttggccagaccaatatccacatcttggagcacgagatgggacataccttcggcttggatgacttttatgactggctacctaccggtgtcaccagtttcatcatgaacgcaggctcagcaacgcaaatcacggacttcgatggctggatgcttagaaactggtggtacgagctgtcacgcaaccgtggatggcagtaa

SEQ ID NO: 26127 - protein, 298 aa, Muscodor strobelii
  misc_feature: SGI Peptide ID NO. 568927
  misc_feature (3)..(297): NCBI GI: 256720263 Blast Desc: NECHADRAFT_56215 [Nectria haematococca mpVI 77-13-4]
  misc_feature (49)..(298): NCBI GI: 46127251 Blast Desc: FG08003.1 [Gibberella zeae PH-1]
  misc_feature (1)..(298): NCBI GI: 256735650 Blast Desc: NECHADRAFT_75717 [Nectria haematococca mpVI 77-13-4]
  misc_feature (1)..(295): NCBI GI: 119485747 Blast Desc: NFIA_099550 [Neosartorya fischeri NRRL 181] gi|119410372|gb|EAW20319.1| conserved [Neosartorya fischeri NRRL 181]
  misc_feature (51)..(292): NCBI GI: 169775603 Blast Desc: [Aspergillus oryzae RIB40] gi|238502233|ref|XP_002382350.1| conserved [Aspergillus flavus NRRL3357] gi|83771003|dbj|BAE61135.1| protein product oryzae]
  misc_feature (53)..(291): NCBI GI: 67900758 Blast Desc: AN7366.2 [Aspergillus nidulans FGSC A4] gi|40742547|gb|EAA61737.1| AN7366.2 [Aspergillus nidulans FGSC A4] gi|259483277|tpe|CBF78532.1| TPA: conserved [Aspergillus FGSC
  misc_feature (49)..(293): NCBI GI: 256728268 Blast Desc: NECHADRAFT_18623 [Nectria haematococca mpVI 77-13-4]
  misc_feature (11)..(297): NCBI GI: 159898190 Blast Desc: cellulose-binding family II protein [Herpetosiphon aurantiacus ATCC 23779] gi|159891229|gb|ABX04309.1| cellulose-binding family II [Herpetosiphon aurantiacus ATCC
  misc_feature (53)..(297): NCBI GI: 270499323 Blast Desc: cellulose-binding family II [Micromonospora aurantiaca ATCC 27029] gi|270323930|gb|EFA34843.1| cellulose-binding family II [Micromonospora aurantiaca ATCC 27029]
  misc_feature (53)..(296): NCBI GI: 256782281 Blast Desc: cellulose-binding family II protein [Streptomyces hygroscopicus ATCC 53653]
MKLSAIALCGVPSAMAVAIGQLSDENPAVWANAKPTLEELTGSSSLEARQTGWNPPSNLVTPLKQVWDHCLSTYSNGLYGFKNYGWDQIRATSGKINVCVRWESSATVTEAQRAQVASNYAAQYQNWFKWLYGYDNFPYSNISVNVVGWAVKDKSLLQGSTSGITVYTDKDSAGAPQCAEACGRFFHQDGNYASCAGGSAAHYDHSLWLTDGFGGGAGGDWGQRIGREYFMGALGQTNIHILEHEMGHTFGLDDFYDWLPTGVTSFIMNAGSATQITDFDGWMLRNWWYELSRNRGWQ

SEQ ID NO: 26128 - DNA, 1518 bp, Muscodor strobelii
  misc_feature: SGI EST ID NO. CUFF.61607.0
  misc_feature: Variant of the nucleotide sequence at SEQ ID NO 26126
gcaacattggagagccatgctcaaattcaaatgatcttcctggtagtactccaggattcgttgggatttacccatttcgtggcggctgcttcatcccgtgcgattattattatatagggttctcgggagcccgagttctcttgatccagatgtcgtttccgcccgggtcgcgcaattgtgctaggaagccaatctcaaagccgccgcaatgaagctatctgcaatcgccctctgcggggtgccctctgccatggccgttgccataggccaattgtcggacgagaatcccgccgtttgggcaaatgcgaagccaacgcttgaagaattaacgggctcttctagtcttgaggcgcgacagacgggttggaatcctccatccaacctggtaactcccctgaagcaagtatgggaccattgcttgagcacgtactccaatggtctctatgggttcaagaactacggatgggatcagatcagagctacttcggggtaagaccgatacttcataacgacaactcaagactctaacatttgcgcacaggaaaatcaacgtttgcgtgcgctgggaatcctctgcaacagtgacagaagctcagcgagctcaagttgcgtccaattatgcagcgcaataccagaattggttcaaatggctctatggctatgataacttcccctacagcaacattagcgtgaatgtggtaggatgggctgtcaaggacaagagtctcctacagggttcaacatcaggcatcacggtctacacggacaaagatagtgcaggcgcaccgcagtgtgccgaggcttgtggtcgcttcttccatcaagacggcaactatgcatcatgtgccggcggctccgcggctcactacgatcactccttgtggttgacggacgggttcggcggcggggcgggtggtgactggggacagaggatcggccgggagtacttcatgggcgcacttggccagaccaatatccacatcttggagcacgagatgggacataccttcggcttggatgacttttatgactggctacctaccggtgtcaccagtttcatcatgaacgcaggctcagcaacgcaaatcacggacttcgatggctggatgcttagaaactggtggtacgagctgtcacgcaaccgtggatggcagtaaatctgtggcgccgaagacaatgttgctcgatggccggtctgttgtataggtatccatataccaacaattgaaacaactagtcatccgatatctcccatctcaatatgcgcgggcgcgagactcgtctaagtctttcttgtactgtcagcatatgaagatgctgaatctgcgaaggtatgcgatgcaaatgaggtgcacgagttctgccactattgcggatcgcgtgtttcccttctggtcaaccgagatgaattctgtccgcatccccaggcctgcgacgtactaggttagcgtagtaaactgtcgtcactattcacatcactcacagtcatgagtaaccaagctaacacctcgacactca

SEQ ID NO: 26129 - DNA, 1344 bp, Muscodor strobelii
  misc_feature: SGI cDNA ID NO. 568928
  misc_feature: Elevated expression when VOC is produced
  misc_feature: Encodes the peptide sequence at SEQ ID NO 26130
atgcgattcattaacacaaccaccttcgaacgggagcaccgacaacaaggcgggtctcatcaagatgtgtatgccatcctgtcgcatcgctggcttgattatgagatcgaatacgaagatttggacactcacgttcaggacttgagatcgggaacgccatcttcgccaaaggtcgagaaaattcgcggcgcgtgtgctgtcgcacgcgcgaaaggaatagagtggctttggatggacacgtgttgcatcaacaagaagaatgacgccagagaatattccgaggctatcaactctatgttcggttggtatcggaattccaagttgtgcatcaccgttctgcaagatgtgaagcattcaggtggtgaagtgaggacaatggggaaaatgctgttcgatactggacatgaagacaacttgtctgagtggttctctaggggttggacgcttcaggagctattagcaccacgcgagatggaattttatgacatggagtggaagtacattggcacgaggagagagctagcgagtgccctttccgccgctactaacatcgatgcggaattcttgaccggcgacaaggaccttagtgaagcttctatcgctatgaggatgagctggatgtctgagcgggagacgaagtatcccgaggacatggcatatagtatgatcggtatatttaacgtgaacctgcctttgatctacggcgaaggcggacctcgtgcatttcgccgcctgcaagaaaccctgctctcaagccctttcatggacgaatcactatttgcttggaagatgcctcatgtggatgctgggaggcaatgcgacgtgatgatggcaggcttcgaaccggggcaatggggtctgctcgctggctctgtgaaatggttccgggattctggagatattcaggtcgactcgttaaacgcgcaagcccgtcagttcaggctgacgcctaagggcattcaaggtcctattcgccagaaacagaaaagagatgcgacagtctgggcctggactacggtggtagtggtactcgttgtcacctttccgttcgccaactgcctcttgcggggattgttcgaaaggaaggcaaaagatccctatcccttcacattgaattgtttcagggtcgacgagcaggggaagcgtgcgaatgtggtgattgttttcggtccggtgaacgttggcaaagttctcatcaacgagactttgccggacgggaaaattgttcaagcgccatacgtcgagtgcaagaggatcaaatgcgccgaggcattagactttggcaagaagcacatcacttaccttggggatggaattatttttcaacctcggcccggccattaa

SEQ ID NO: 26130 - protein, 447 aa, Muscodor strobelii
  misc_feature: SGI Peptide ID NO. 568928
  misc_feature (24)..(151): Pfam Id: PF06985 Pfam Desc: Heterokaryon incompatibility protein (HET)
  misc_feature (24)..(111): Pfam Id: PF06985 Pfam Desc: Heterokaryon incompatibility protein (HET)
  misc_feature (1)..(392): NCBI GI: 46119876 Blast Desc: FG04807.1 [Gibberella zeae PH-1]
  misc_feature (24)..(299): NCBI GI: 256728051 Blast Desc: NECHADRAFT_83471 [Nectria haematococca mpVI 77-13-4]
  misc_feature (1)..(268): NCBI GI: 261360908 Blast Desc: HET domain-containing protein [Verticillium albo-atrum VaMs.102]
  misc_feature (1)..(301): NCBI GI: 46139697 Blast Desc: FG11363.1 [Gibberella zeae PH-1]
  misc_feature (24)..(301): NCBI GI: 238493477 Blast Desc: conserved [Aspergillus flavus NRRL3357] gi|220696469|gb|EED52811.1| conserved [Aspergillus flavus NRRL3357]
  misc_feature (1)..(301): NCBI GI: 46139565 Blast Desc: FG11297.1 [Gibberella zeae PH-1]
  misc_feature (1)..(321): NCBI GI: 164425178 Blast Desc: NCU06304 [Neurospora crassa OR74A] gi|157070820|gb|EAA33330.2| conserved [Neurospora crassa OR74A]
  misc_feature (1)..(266): NCBI GI: 46107392 Blast Desc: FG00579.1 [Gibberella zeae PH-1]
  misc_feature (1)..(321): NCBI GI: 169770123 Blast Desc: [Aspergillus oryzae RIB40] gi|83767390|dbj|BAE57529.1| protein product [Aspergillus oryzae]
  misc_feature (18)..(262): NCBI GI: 116205926 Blast Desc: CHGG_02256 [Chaetomium globosum CBS 148.51] gi|88182853|gb|EAQ90321.1| CHGG_02256 [Chaetomium globosum CBS 148.51]
  misc_feature: Useful for introducing or modulating the production of volatile compounds
MRFINTTTFEREHRQQGGSHQDVYAILSHRWLDYEIEYEDLDTHVQDLRSGTPSSPKVEKIRGACAVARAKGIEWLWMDTCCINKKNDAREYSEAINSMFGWYRNSKLCITVLQDVKHSGGEVRTMGKMLFDTGHEDNLSEWFSRGWTLQELLAPREMEFYDMEWKYIGTRRELASALSAATNIDAEFLTGDKDLSEASIAMRMSWMSERETKYPEDMAYSMIGIFNVNLPLIYGEGGPRAFRRLQETLLSSPFMDESLFAWKMPHVDAGRQCDVMMAGFEPGQWGLLAGSVKWFRDSGDIQVDSLNAQARQFRLTPKGIQGPIRQKQKRDATVWAWTTVVVVLVVTFPFANCLLRGLFERKAKDPYPFTLNCFRVDEQGKRANVVIVFGPVNVGKVLINETLPDGKIVQAPYVECKRIKCAEALDFGKKHITYLGDGIIFQPRPGH

SEQ ID NO: 26131 - DNA, 1684 bp, Muscodor strobelii
  misc_feature: SGI EST ID NO. CUFF.61598.0
  misc_feature: Variant of the nucleotide sequence at SEQ ID NO 26129
attcgaatcaatctcaagatgagatggcgaatctaaatatgagcgcgcccgtcgcgtctccgtcttttggctctttggcctactattctccggttccattttcagtaaagggagatcgcgacgaggagcacgagactggcggatcgcgagacaaagcatgcgattcattaacacaaccaccttcgaacgggagcaccgacaacaaggcgggtctcatcaagatgtgtatgccatcctgtcgcatcgctggcttgattatgagatcgaatacgaagatttggacactcacgttcaggacttgagatcgggaacgccatcttcgccaaaggtcgagaaaattcgcggcgcgtgtgctgtcgcacgcgcgaaaggaatagagtggctttggatggacacgtgttgcatcaacaagaagaatgacgccagagaatattccgaggctatcaactctatgttcggttggtatcggaattccaagttgtgcatcaccgttctgcaagatgtgaagcattcaggtggtgaagtgaggacaatggggaaaatgctgttcgatactggacatgaagacaacttgtctgagtggttctctaggggttggacgcttcaggagctattagcaccacgcgagatggaattttatgacatggagtggaagtacattggcacgaggagagagctagcgagtgccctttccgccgctactaacatcgatgcggaattcttgaccggcgacaaggaccttagtgaagcttctatcgctatgaggatgagctggatgtctgagcgggagacgaagtatcccgaggacatggcatatagtatgatcggtatatttaacgtgaacctgcctttgatctacggcgaaggcggacctcgtgcatttcgccgcctgcaagaaaccctgctctcaagccctttcatggacgaatcactatttgcttggaagatgcctcatgtggatgctgggaggcaatgcgacgtgatgatggcaggcttcgaaccggggcaatggggtctgctcgctggctctgtgaaatggttccgggattctggagatattcaggtcgactcgttaaacgcgcaagcccgtcagttcaggctgacgcctaagggcattcaaggtcctattcgccagaaacagaaaagagatgcgacagtctgggcctggactacggtggtagtggtactcgttgtcacctttccgttcgccaactgcctcttgcggggattgttcgaaaggaaggcaaaagatccctatcccttcacattgaattgtttcagggtcgacgagcaggggaagcgtgcgaatgtggtgattgttttcggtccggtgaacgttggcaaagttctcatcaacgagactttgccggacgggaaaattgttcaagcgccatacgtcgagtgcaagaggatcaaatgcgccgaggcattagactttggcaagaagcacatcacttaccttggggatggaattatttttcaacctcggcccggccattaatttgcttgaggtagcggaataatcgaggggggaaggtgcaacctaggtagcgtcgaacgggaactgcgttgctgagcagccctaggcgcacggccaaggcaatacttcggaaggcgcattgaagtacataggtcattttaatcaggcagtaaccatcaaatcaattggtgcagtggttctggg

SEQ ID NO: 26132 - DNA, 393 bp, Muscodor strobelii
  misc_feature: SGI cDNA ID NO. 568929
  misc_feature: Encodes the peptide sequence at SEQ ID NO 26133
atgcgctcaagttcaatcgtgctattgacagcaaccgtctgtagcaaacaggaaagtgaagtgaaggtcgatggtgaagcgtggagttctgaagataagagacgatcagaagcgcatgttgcgcaggaaccaaatcttgagtcaacaagttacgggcgcggtgaacaagagaagcacatcattataacgccaacatctgcccacgagtcggaagcgaaaccaagagtcctgccagaggggacgcagcatgagaaacgtaagaccccgaaaaacaaggggaatcacacagatgaagacggcgatgatgatgataatggggtgggaagaggcatgacgatgcccatgtcattgatcatcggctttgcggtgcttgttggtgcgatgcagctatag

SEQ ID NO: 26133 - protein, 130 aa, Muscodor strobelii
  misc_feature: SGI Peptide ID NO. 568929
MRSSSIVLLTATVCSKQESEVKVDGEAWSSEDKRRSEAHVAQEPNLESTSYGRGEQEKHIIITPTSAHESEAKPRVLPEGTQHEKRKTPKNKGNHTDEDGDDDDNGVGRGMTMPMSLIIGFAVLVGAMQL

SEQ ID NO: 26134 - DNA, 413 bp, Muscodor strobelii
  misc_feature: SGI EST ID NO. CUFF.61601.0
  misc_feature: Variant of the nucleotide sequence at SEQ ID NO 26132
gcgcatgttgcgcaggaaccaaatcttgagtcaacaagttacgggcgcggtgaacaagagaagcacatcattataacgccaacatctgcccacgagtcggaagcgaaaccaagagtcctgccagaggggacgcagcatgagaaacgtaagaccccgaaaaacaaggggaatcacacagatgaagacggcgatgatgatgataatggggtgggaagaggcatgacgatgcccatgtcattgatcatcggctttgcggtgcttgttggtgcgatgcagctatagcaatgcgatagaaggcgaatgtattagtcttgtcagtggcgtattctagactgcaatatttcacagcattctttgtttgaatggtgtgcatcgcgtcgtttagcttttcgtcatacatgttagtgttctcc

SEQ ID NO: 26135 - DNA, 483 bp, Muscodor strobelii
  misc_feature: SGI cDNA ID NO. 568930
  misc_feature: Elevated expression when VOC is produced
  misc_feature: Encodes the peptide sequence at SEQ ID NO 26136
atgagactcttctcctctcagcaggttgcactcctcctcgcagctctatctatcactgctagcgccctcgagaatggtgcaccttccacaacagatgttgctccacctgacagtacggtcataaccggcggccagaccacagatcagacagacaccaccatagtctgtacggacaatgagcttgactgcacccagtcattcaatggaaccgatgatgtcagtcacaagggaggaaggggaggaggaagaggaagccgtggaggcggtggtggtcactcgggcgcattatccactcgtcctgatactatcatggtcttgggcatgagctctctaggtctgctcatgtggagcgctataactgagttttcttcactttttggttttggagttggcggcgcagtggtcatgagaaacatgggcatcggtgttatggctagcactcgtttcaagtcagagatcgctgaagatttcataagacaataa

SEQ ID NO: 26136 - protein, 160 aa, Muscodor strobelii
  misc_feature: SGI Peptide ID NO. 568930
  misc_feature: Useful for introducing or modulating the production of volatile compounds
MRLFSSQQVALLLAALSITASALENGAPSTTDVAPPDSTVITGGQTTDQTDTTIVCTDNELDCTQSFNGTDDVSHKGGRGGGRGSRGGGGGHSGALSTRPDTIMVLGMSSLGLLMWSAITEFSSLFGFGVGGAVVMRNMGIGVMASTRFKSEIAEDFIRQ

SEQ ID NO: 26137 - DNA, 774 bp, Muscodor strobelii
  misc_feature: SGI cDNA ID NO. 568931
  misc_feature: Encodes the peptide sequence at SEQ ID NO 26138
atgcctcctgccctttcaccatccactcatcagctacctggactgactgacatggatcttctgtctaggattgaaccatcccaaaggctgcgacgagccgtccatagcaatgatgccctgcttgtcaagcggatcatcacttcccatcctgacctcatacacaatccagaccacacctccacaggcctctccaactccaacctgcatcttgctgctagtctgggccacctgcaagtctgcaagaccctcgtgtcgcttgggcatgaagtcccgacacatgccctcaatgacaaccaccagactgctctgatgctggcagctgccaacggccacaccgaggtcgtccacttcctcgctgagagcgacccttccaccattctgcgatgtgacaaccgtggcagagatgccatcatggaagcgagtttaggcggtcacgacactgtactgcagattctacttacatatgcgccggagggagccgaagccgctgttcggaatgctgacatggacggcaacactgctcttcacttcgccagcagcaacggtcacctgctcgtacttcgcacacttctcgcagctggggcagacgccgacaagaaaaatgtctggagctggagcgctgttgcctacagtgcgactgtacaggccgaggtgtacttcaaaaacctggtagctgatgtcgaaaagaggaagcggtccaagcgcgagctcgaagatagcaagaaagctggaggtgtacgtctcatcgagccagaagcaaggaccccggattga

SEQ ID NO: 26138 - protein, 257 aa, Muscodor strobelii
  misc_feature: SGI Peptide ID NO. 568931
  misc_feature (170)..(202): Pfam Id: PF00023 Pfam Desc: Ankyrin repeat
  misc_feature (98)..(130): Pfam Id: PF00023 Pfam Desc: Ankyrin repeat
  misc_feature (23)..(250): NCBI GI: 46138825 Blast Desc: FG10927.1 [Gibberella zeae PH-1]
  misc_feature (23)..(252): NCBI GI: 116204017 Blast Desc: CHGG_09892 [Chaetomium globosum CBS 148.51] gi|88176020|gb|EAQ83488.1| CHGG_09892 [Chaetomium globosum CBS 148.51]
  misc_feature (24)..(250): NCBI GI: 261354747 Blast Desc: conserved [Verticillium albo-atrum VaMs.102]
  misc_feature (22)..(231): NCBI GI: 171679882 Blast Desc: protein product [Podospora anserina] gi|170939567|emb|CAP64794.1| protein product [Podospora anserina]
  misc_feature (11)..(250): NCBI GI: 154308667 Blast Desc: BC1G_07756 [Botryotinia fuckeliana B05.10] gi|150852707|gb|EDN27899.1| BC1G_07756 [Botryotinia fuckeliana B05.10]
  misc_feature (24)..(250): NCBI GI: 156050643 Blast Desc: SS1G_07909 [Sclerotinia sclerotiorum 1980] gi|154692309|gb|EDN92047.1| SS1G_07909 [Sclerotinia sclerotiorum 1980]
  misc_feature (51)..(244): NCBI GI: 145604739 Blast Desc: MGG_07879 [Magnaporthe grisea 70-15] gi|145012685|gb|EDJ97339.1| MGG_07879 [Magnaporthe grisea 70-15]
  misc_feature (71)..(243): NCBI GI: 85094997 Blast Desc: NCU06135 [Neurospora crassa OR74A] gi|28921455|gb|EAA30761.1| conserved [Neurospora crassa OR74A]
  misc_feature (18)..(231): NCBI GI: 169625312 Blast Desc: SNOG_15926 [Phaeosphaeria nodorum SN15] gi|111055644|gb|EAT76764.1| SNOG_15926 [Phaeosphaeria nodorum SN15]
  misc_feature (24)..(249): NCBI GI: 242813050 Blast Desc: ankyrin repeat domain protein, [Talaromyces stipitatus ATCC 10500] gi|218714426|gb|EED13849.1| ankyrin repeat domain protein, [Talaromyces stipitatus ATCC 10500]
MPPALSPSTHQLPGLTDMDLLSRIEPSQRLRRAVHSNDALLVKRIITSHPDLIHNPDHTSTGLSNSNLHLAASLGHLQVCKTLVSLGHEVPTHALNDNHQTALMLAAANGHTEVVHFLAESDPSTILRCDNRGRDAIMEASLGGHDTVLQILLTYAPEGAEAAVRNADMDGNTALHFASSNGHLLVLRTLLAAGADADKKNVWSWSAVAYSATVQAEVYFKNLVADVEKRKRSKRELEDSKKAGGVRLIEPEARTPD

SEQ ID NO: 26139 - DNA, 4389 bp, Muscodor strobelii
  misc_feature: SGI EST ID NO. CUFF.61747.1
  misc_feature: Variant of the nucleotide sequence at SEQ ID NO 26137
tgcccaggtcagaatgtgcctgccaagacaacgattacctggagctaccccgcaatcgacgacgcgtttggaaaagcttcagaaaccgcgttctagcttcttaactccacggcaacaacatcactttcgtcatcacctatcaagactttgctacgggccagcatgctgtatctcttcttcttcacaataagagtcgctacatacaaccatcaagaatacttgaaatgattaccgcgggtcatttctgatcgaggagatctgtcctcttgagcatagaacctcgacatgctagtgaaaagcgtcacccatacatcacatgacttcgttactcacttcagttaatctattgcttgcctggaagctttgtctttctcaaatctacaatgattgaaccatcccaaaggctgcgacgagccgtccatagcaatgatgccctgcttgtcaagcggatcatcacttcccatcctgacctcatacacaatccagaccacacctccacaggcctctccaactccaacctgcatcttgctgctagtctgggccacctgcaagtctgcaagaccctcgtgtcgcttgggcatgaagtcccgacacatgccctcaatgacaaccaccagactgctctgatgctggcagctgccaacggccacaccgaggtcgtccacttcctcgctgagagcgacccttccaccattctgcgatgtgacaaccgtggcagagatgccatcatggaagcgagtttaggcggtcacgacactgtactgcagattctacttacatatgcgccggagggagccgaagccgctgttcggaatgctgacatggacggcaacactgctcttcacttcgccagcagcaacggtcacctgctcgtacttcgcacacttctcgcagctggggcagacgccgacaagaaaaatgtctggagctggagcgctgttgcctacagtgcgactgtacaggccgaggtgtacttcaaaaacctggtagctgatgtcgaaaagaggaagcggtccaagcgcgagctcgaagatagcaagaaagctggaggtgtacgtctcatcgagccagaagcaaggaccccggattgatgagagatgatcgtatcacttgacaatcctggtagaacatctttgctgtctcccagcgcaagagcgactcatgcagagagctcagaagtttttatctcagacaatacgtctgctctactggaactatccaggtcgtcatcgcgggagaagcgcattgcttcccatgatgtcacaaaccgcatcacggccacacctatcattccaatctatactgacaagccatttgccccggtcctgtcacagtgtccccatcgagctagtgaaaagatgaatgcaaatgccggttcattttcgctgtcagttatcgcctatgacaaactgatacgtctcagtggcagcctgctatccaccaatgggaaatcacataccccgctcataattcccacgcggacccgaaaatttctgctcgtgggctggtcactgtgatatgaatcagttctgccgtcaatattagttgacaatcgggctttgctcgaccagaaggcaggcttctgaaggccacctacactgattcatgcctttactcatggtctttccctgaatagcggtacggataatccagtgatgctggatgtacaagagcattttctgtgtgggatgaattgattggacaagatgattggaatcatgggccatcaaataaggtcatccacccattaccgtgggtactgttgggatgccccttttatcccatcttggggctgttcgattgatggcagagtgaggagttgtcgcaccagatcagactaatttgtatggtgaatgtcttcggtattcgacacgctattgtctgaatcatatcatgattctgacagcagacagagtcactcatcttcaccttgtcggcggactattacagatataaggagtgggatctgctttccagagtccagtttccgactccctttgtcgtgcccttctccttcatacgcatcgtctatcattttcaatgatcattacatgtcgccagtccagtgacggcttgctctctatgctcagtgatactcaggcttaagagccatatatactatcatctatctattcagcaatcaatcagtctactgtgcattcattgtactatacaatcgtcgaccactccacacatcatcgtctgaacaaccacagtcgacattgtgcgtctaccatttgcaccttttctgttgtctgttgtccactgctggtgccttagctgcccagcctatcacaatctgctcccagggctgcggctggtgcctgggttgagtattcaatcttgtggatctgcatcactactcaccacccctgctgaacgtcacggttacactgggaccattgtttgtgtctttattcctccccattgccaccatccgtagctagtccgttggactggttaccggttactgtggcccaccgtggatcctgtttcgacacaaacaccacgagaatttccataccctgccacgaaactcctgacagctcaatacttctggatacatccttcccagtactcctgggcttggctgattgtcggcacattcgttgactctgacgacaacgaactctggagcattgagcttttcgtcggagtcttagctgagggagacagcttcgacgcattcttcgccacagatacggacatcactgaagacactggcgtagctcaacagtcccacgctgctactgaagacttcgactcgtactctcagccatcggccgacatctgctctctggagcatctcactttccagccacctaactacaccagcgccggtttcgacatctccgtctatccagcctacgtcgactcctctcatctgtcgcccgccatggccagctttggtggagttccggctgccggctggaatccccagttcggttacgacaatacccgatcgggccgcgctcctccccctgttctcgctcatcaacccggtgtctcctttcccgctcagcctggtcttccccctgtccaggcccctactgtccctggtgtccttgctccaggaatgattcacatgggaaacacaagtgtgcccgttaccaacctcggcccgatgctatttgccggccattacaacactggtatgcccggccatggagatgaccgtcccgctactggccatccctatatcgatccccacttccctggcatgaatgttgtcaacgcgacgggcggtgctggtctcgagcctggctacaactacctctggcacgacgatcatgccaaggttcacgtcttcactaccaagtcgcctccctggcgcgcttctggcgccaacctcccgtatgtccgcttctatgtccccaccaacacgaagatgggtgagctcatggaccgtctcggcgccaacaaccgcgagcccaagaagaaccgcatcgtcgaggtcatggagggtggcaacggcaattggtactccggtcccatctacaacggtgccgagctcgacgataccactaaggacctcaagtcgcttggttggaatcgcagctgctccggtatccgtggcaagcggccccccatctggatctgggtcaccaaggactaggggactagataccggctttgtttgtgctgacggagttgagatgattattgattactggcttacctggttgcatgttacggtttctttgctagatgtggcatctcattgtcttcgacgcattttcggcggccatttaaatgacgaatgatcatgatggcgtctcggcaatgggggatttcggagtttgtggtgtgtttatgacaaattgtgttcagtggtgggaactccatggcgttttcgattctgatgggggtggtttatggtgtttctatatgtattactagcagtctgggatacgggtacttttcctctgaatactgggcgaggccttgctacacgtagctacgccgaggacccctctgttgcgatatgtgttacggataggatggcatatagcgtagctcgatcaatatacacgagttacgcttatgtgatgccttccttgtgtttgtattcttgggggattatactgtgtccagattgccggcatgctcccgatttgcggatttgcggccgggccgcataactggctagacggcgggcagatttgtcgaccgccgtgagatttgacgacctagggccagaagaacgggattgattttagcggccgcttgggctttgatgagtgtggtgatcgcagtgattgaacatggtgatgagacaccatggggtgatgcgtatattgcgcttttctttcatgttttcctcctgtttttcctccccctttctttgtgtctgtctttctctctgccacacgcaatctgtcattgtca

SEQ ID NO: 26140 - DNA, 1275 bp, Muscodor strobelii
  misc_feature: SGI cDNA ID NO. 568932
  misc_feature: Elevated expression when VOC is produced
  misc_feature: Encodes the peptide sequence at SEQ ID NO 26141
atgatcattacatgtcgccagtccatccgttggactggttaccggttactgtggcccaccgtggatcctgtttcgacacaaacaccacgagaatttccataccctgccacgaaactcctgacagctcaatacttctggatacatccttcccagtactcctgggcttggctgattgtcggcacattcgttgactctgacgacaacgaactctggagcattgagcttttcgtcggagtcttagctgagggagacagcttcgacgcattcttcgccacagatacggacatcactgaagacactggcgtagctcaacagtcccacgctgctactgaagacttcgactcgtactctcagccatcggccgacatctgctctctggagcatctcactttccagccacctaactacaccagcgccggtttcgacatctccgtctatccagcctacgtcgactcctctcatctgtcgcccgccatggccagctttggtggagttccggctgccggctggaatccccagttcggttacgacaatacccgatcgggccgcgctcctccccctgttctcgctcatcaacccggtgtctcctttcccgctcagcctggtcttccccctgtccaggcccctactgtccctggtgtccttgctccaggaatgattcacatgggtatgccttactggaatactaattatactgcttaccatggttatcctcgttatagtcctgctgcttacaatactcctccaggaaacacaagtgtgcccgttaccaacctcggcccgatgctatttgccggccattacaacactggtatgcccggccatggagatgaccgtcccgctactggccatccctatatcgatccccacttccctggcatgaatgttgtcaacgcgacgggcggtgctggtctcgagcctggctacaactacctctggcacgacgatcatgccaaggttcacgtcttcactaccaagtcgcctccctggcgcgcttctggcgccaacctcccgtatgtccgcttctatgtccccaccaacacgaagatgggtgagctcatggaccgtctcggcgccaacaaccgcgagcccaagaagaaccgcatcgtcgaggtcatggagggtggcaacggcaattggtactccggtcccatctacaacggtgccgagctcgacgataccactaaggacctcaagtcgcttggttggaatcgcagctgctccggtatccgtggcaagcggccccccatctggatctgggtcaccaaggactag

SEQ ID NO: 26141 - protein, 424 aa, Muscodor strobelii
  misc_feature: SGI Peptide ID NO. 568932
  misc_feature (31)..(423): NCBI GI: 46138827 Blast Desc: FG10928.1 [Gibberella zeae PH-1]
  misc_feature (267)..(424): NCBI GI: 85095002 Blast Desc: NCU06136 [Neurospora crassa OR74A] gi|28921456|gb|EAA30762.1| [Neurospora crassa OR74A]
  misc_feature (167)..(423): NCBI GI: 256728872 Blast Desc: NECHADRAFT_40200 [Nectria haematococca mpVI 77-13-4]
  misc_feature (287)..(424): NCBI GI: 145604739 Blast Desc: MGG_07879 [Magnaporthe grisea 70-15] gi|145012685|gb|EDJ97339.1| MGG_07879 [Magnaporthe grisea 70-15]
  misc_feature (291)..(424): NCBI GI: 156042698 Blast Desc: SS1G_11147 [Sclerotinia sclerotiorum 1980] gi|154695533|gb|EDN95271.1| SS1G_11147 [Sclerotinia sclerotiorum 1980]
  misc_feature (291)..(424): NCBI GI: 154292339 Blast Desc: BC1G_14625 [Botryotinia fuckeliana B05.10] gi|150846200|gb|EDN21393.1| BC1G_14625 [Botryotinia fuckeliana B05.10]
  misc_feature (275)..(423): NCBI GI: 171679876 Blast Desc: protein product [Podospora anserina] gi|170939564|emb|CAP64791.1| protein product [Podospora anserina]
  misc_feature (31)..(82): NCBI GI: 145604739 Blast Desc: MGG_07879 [Magnaporthe grisea 70-15] gi|145012685|gb|EDJ97339.1| MGG_07879 [Magnaporthe grisea 70-15]
  misc_feature: Useful for introducing or modulating the production of volatile compounds
MIITCRQSIRWTGYRLLWPTVDPVSTQTPREFPYPATKLLTAQYFWIHPSQYSWAWLIVGTFVDSDDNELWSIELFVGVLAEGDSFDAFFATDTDITEDTGVAQQSHAATEDFDSYSQPSADICSLEHLTFQPPNYTSAGFDISVYPAYVDSSHLSPAMASFGGVPAAGWNPQFGYDNTRSGRAPPPVLAHQPGVSFPAQPGLPPVQAPTVPGVLAPGMIHMGMPYWNTNYTAYHGYPRYSPAAYNTPPGNTSVPVTNLGPMLFAGHYNTGMPGHGDDRPATGHPYIDPHFPGMNVVNATGGAGLEPGYNYLWHDDHAKVHVFTTKSPPWRASGANLPYVRFYVPTNTKMGELMDRLGANNREPKKNRIVEVMEGGNGNWYSGPIYNGAELDDTTKDLKSLGWNRSCSGIRGKRPPIWIWVTKD

SEQ ID NO: 26142 - DNA, 4389 bp, Muscodor strobelii; identical to SEQ ID NO: 26139
  misc_feature: SGI EST ID NO. CUFF.61747.1
  misc_feature: Variant of the nucleotide sequence at SEQ ID NO 26140

SEQ ID NO: 26143 - DNA, 1125 bp, Muscodor strobelii
  misc_feature: SGI cDNA ID NO. 568933
  misc_feature: Encodes the peptide sequence at SEQ ID NO 26144
atgtcatactggaacaaccccattctaccgcacgacgaagatcttccaagatacgacagtgatggagctgtccccttcaagtcacaggggacgcttggaaaaggaggcgccggaacagtggacaaggtcatcgatacgcgcaaacatgacaaccatgtctacgtgcgaaaaacatttgtggccaaagccgggaccaaactcacgccctatgatctcgtacaagtgaagctggagcttaaatcgattttgagattacaggacaatcctttcatcgtgaaagctatcactgcttacgaagtgggagaaggcaagttcagtgagggtcaagacgcagagctgctaggctctgagaaattagtcctcatcatggaccccgtggccagtcatggtgacctcgaccacttcatgaggcaatatcgagatccgaaccttgacattggcctggacgataccgcgactctgttgcgctccttcttcacattagcccatgccctcgattacatccactccaagggcatgatgcatcgcgacatcaagcctcacaattgccttgtccacaaaggcaatgcacttctcaccgatttcgggctatcacacatgtatagacgcggcgcgttcagatcatctggggaagtggatgagttcactcctcgctacgcagcgccggaagtgagaggccgcgatgtcagccccgatcgtaatcccaagactgatgtcttctctctcggctgcgtctttgtcgaagtggcagcgacgctcatggcaggcagatgcaaagttaacccatgggtaccggtcgggagcgggacaaatcaattcgggactcgcctcgagaatattcgagttgaaggccatgcagcaccgatcggttcttatagcgatagccctgagattattgcaaagggtcttttgatcgagtcccagaatacaggatactataccgagaaatgggtccacctcatgcacgtggtcataccaccgatgctgaagaagcagaaggaccttcgaccgacaactcaacaagtgctcaacgatgtgacggctttcaatactaagggatcaacggaagcaatttggaaggacatgggccgatatgagacaatggttcacgccgaagacgagtag

SEQ ID NO: 26144 - protein, 374 aa, Muscodor strobelii
  misc_feature: SGI Peptide ID NO. 568933
  misc_feature (26)..(250): Pfam Id: PF00069 Pfam Desc: Protein kinase domain
  misc_feature (18)..(253): NCBI GI: 169600253 Blast Desc: SNOG_02957 [Phaeosphaeria nodorum SN15] gi|111068568|gb|EAT89688.1| SNOG_02957 [Phaeosphaeria nodorum SN15]
  misc_feature (18)..(257): NCBI GI: 156030530 Blast Desc: SS1G_14489 [Sclerotinia sclerotiorum 1980] gi|154700880|gb|EDO00619.1| SS1G_14489 [Sclerotinia sclerotiorum 1980]
  misc_feature (9)..(257): NCBI GI: 116200450 Blast Desc: CHGG_10770 [Chaetomium globosum CBS 148.51] gi|88175484|gb|EAQ82952.1| CHGG_10770 [Chaetomium globosum CBS 148.51]
  misc_feature (8)..(253): NCBI GI: 169617217 Blast Desc: SNOG_11785 [Phaeosphaeria nodorum SN15] gi|160703363|gb|EAT80829.2| SNOG_11785 [Phaeosphaeria nodorum SN15]
  misc_feature (32)..(249): NCBI GI: 145544208 Blast Desc: [Paramecium tetraurelia strain d4-2] gi|124425607|emb|CAK90392.1| protein product [Paramecium tetraurelia]
  misc_feature (118)..(260): NCBI GI: 169620624 Blast Desc: SNOG_13515 [Phaeosphaeria nodorum SN15] gi|111057842|gb|EAT78962.1| SNOG_13515 [Phaeosphaeria nodorum SN15]
  misc_feature (31)..(249): NCBI GI: 145536662 Blast Desc: [Paramecium tetraurelia strain d4-2] gi|124421797|emb|CAK86656.1| protein product [Paramecium tetraurelia]
  misc_feature (20)..(251): NCBI GI: 118382027 Blast Desc: Protein kinase domain containing protein [Tetrahymena thermophila] gi|89305940|gb|EAS03928.1| Protein kinase domain containing protein [Tetrahymena thermophila SB210]
  misc_feature (111)..(279): NCBI GI: 196008351 Blast Desc: TRIADDRAFT_27553 [Trichoplax adhaerens] gi|190583060|gb|EDV23131.1| TRIADDRAFT_27553 [Trichoplax adhaerens]
  misc_feature (17)..(269): NCBI GI: 223993419 Blast Desc: [Thalassiosira pseudonana CCMP1335] gi|220977708|gb|EED96034.1| [Thalassiosira pseudonana CCMP1335]
  misc_feature (26)..(246): SWISSPROT Homolog: EC 2.7.11.1 Non-specific serine/threonine protein kinase
MSYWNNPILPHDEDLPRYDSDGAVPFKSQGTLGKGGAGTVDKVIDTRKHDNHVYVRKTFVAKAGTKLTPYDLVQVKLELKSILRLQDNPFIVKAITAYEVGEGKFSEGQDAELLGSEKLVLIMDPVASHGDLDHFMRQYRDPNLDIGLDDTATLLRSFFTLAHALDYIHSKGMMHRDIKPHNCLVHKGNALLTDFGLSHMYRRGAFRSSGEVDEFTPRYAAPEVRGRDVSPDRNPKTDVFSLGCVFVEVAATLMAGRCKVNPWVPVGSGTNQFGTRLENIRVEGHAAPIGSYSDSPEIIAKGLLIESQNTGYYTEKWVHLMHVVIPPMLKKQKDLRPTTQQVLNDVTAFNTKGSTEAIWKDMGRYETMVHAEDE

SEQ ID NO: 26145 - DNA, 525 bp, Muscodor strobelii
  misc_feature: SGI cDNA ID NO. 568934
  misc_feature: Elevated expression when VOC is produced
  misc_feature: Encodes the peptide sequence at SEQ ID NO 26146
atgacttctctctacgacattgttgttcccttcctcaccaatgctctcaacagcgagctacacctcatcggcaaagccgaggagctcgccaagaccaagggcgtctccctcgaggatatcttccattacaagctcaccgacgacatgtgggagctgagccaacaggtcaacatcatggccatgcacaccgctgccaccatcaagaagattaccggcaaggacgttgccttcccaccaattggccctgccgctcctgatgtcgtcaagaagcaggttgaggacgccctcgccgctgtcaaggctctcaagcccgaggatctcaacggcaaggaagccgaagtcaccactgcctatctcggaccccccaatgaggtctccatgaaggtcctcgactacgtccagggctacctccacacccagatcctcttccaccttaccaccacctacgacatcctgcgtgctaacggtgctgccattggcaaggccgactacatcaagcccttcatcaagatccaccagggttag

SEQ ID NO: 26146 - protein, 174 aa, Muscodor strobelii
  misc_feature: SGI Peptide ID NO. 568934
  misc_feature (4)..(168): Pfam Id: PF09351 Pfam Desc: Domain of function (DUF1993)
  misc_feature (89)..(168): Pfam Id: PF09351 Pfam Desc: Domain of function (DUF1993)
  misc_feature (4)..(60): Pfam Id: PF09351 Pfam Desc: Domain of function (DUF1993)
  misc_feature (2)..(171): NCBI GI: 256723743 Blast Desc: NECHADRAFT_52059 [Nectria haematococca mpVI 77-13-4]
  misc_feature (3)..(168): NCBI GI: 225559351 Blast Desc: conserved [Ajellomyces capsulatus G186AR]
  misc_feature (3)..(168): NCBI GI: 240282282 Blast Desc: conserved [Ajellomyces capsulatus H143]
  misc_feature (3)..(167): NCBI GI: 167644944 Blast Desc: Caul_0979 [Caulobacter sp. K31] gi|167347374|gb|ABZ70109.1| conserved [Caulobacter sp. K31]
  misc_feature (3)..(165): NCBI GI: 27377557 Blast Desc: bll2446 [Bradyrhizobium japonicum USDA 110] gi|27350701|dbj|BAC47711.1| bll2446 [Bradyrhizobium japonicum USDA 110]
  misc_feature (3)..(166): NCBI GI: 241771488 Blast Desc: conserved [Asticcacaulis excentricus CB 48] gi|241216294|gb|EER52169.1| conserved [Asticcacaulis excentricus CB 48]
  misc_feature (3)..(168): NCBI GI: 134094701 Blast Desc: HEAR1478 [Herminiimonas arsenicoxydans] gi|133738604|emb|CAL61649.1| conserved [Herminiimonas arsenicoxydans]
  misc_feature (3)..(167): NCBI GI: 154253496 Blast Desc: Plav_3056 [Parvibaculum lavamentivorans DS-1] gi|154157446|gb|ABS64663.1| conserved [Parvibaculum lavamentivorans DS-1]
  misc_feature (3)..(165): NCBI GI: 227822895 Blast Desc: NGR_c23550 [Rhizobium sp. NGR234] gi|227341896|gb|ACP26114.1| NGR_c23550 [Rhizobium sp. NGR234]
  misc_feature (3)..(168): NCBI GI: 154274041 Blast Desc: [Ajellomyces capsulatus NAm1] gi|150415480|gb|EDN10833.1| [Ajellomyces capsulatus NAm1]
  misc_feature: Useful for introducing or modulating the production of volatile compounds
MTSLYDIVVPFLTNALNSELHLIGKAEELAKTKGVSLEDIFHYKLTDDMWELSQQVNIMAMHTAATIKKITGKDVAFPPIGPAAPDVVKKQVEDALAAVKALKPEDLNGKEAEVTTAYLGPPNEVSMKVLDYVQGYLHTQILFHLTTTYDILRANGAAIGKADYIKPFIKIHQG

SEQ ID NO: 26147 - DNA, 1489 bp, Muscodor strobelii
  misc_feature: SGI EST ID NO. CUFF.61623.0
  misc_feature: Variant of the nucleotide sequence at SEQ ID NO 26145
cgtcggcctctcgcataagccgaagcgtaaggcgcttcatgctggacggccctctctcgcattaccagggcattgcgcatgctgcatttgtgtccactggataagcactgcgtttcatgcagccgaatggagaccgcgctggaatcatttgtggattggtcgacaaagtatcattgaagaatagtaatgcgtacctgccctaagtgaggggaagcttaaaggaggggcagcatgcagcgtagctcgaaggaagaaggagcagcttggttcttgggttgcgtagaagaggtcgggtgtatataagaggagctgcaggtagcatgagaaagtctggtgtttctcttgattctttcattgttcacaaacaaaacgatcgcaactactaactcacaaatacacatatcacgtattatcctaacaaatcgccaagatgacttctctctacgacattgttgttcccttcctcaccaatgctctcaacagcgagctacacctcatcggcaaagccgaggagctcgccaagaccaagggcgtctccctcgaggatatcttccattacaagctcaccgacgacatgtgggagctgagccaacaggtcaacatcatggccatgcacaccgctgccaccatcaagaagattaccggcaaggacgttgccttcccaccaattggccctgccgctcctgatgtcgtcaagaagcaggttgaggacgccctcgccgctgtcaaggctctcaagcccgaggatctcaacggcaaggaagccgaagtcaccactgcctatctcggaccccccaatgaggtctccatgaaggtcctcgactacgtccagggctacctccacacccagatcctcttccaccttaccaccacctacgacatcctgcgtgctaacggtgctgccattggcaaggccgactacatcaagcccttcatcaagatccaccagggttaggtttgcgctattgaggcggatgggaataattagaatgaagtaaatacccggcttgcatcatagacgcgtataaataaaataaagtaaaattgtttaatttctggctctcgcgtattaggtgattgtgtcttgacgattattactatgtcattgtgcttgagagctgcatgattgtcgatactgtattatcaacctctcttacacacaaccctctcagtcgcgcggcaatgctatccgaacaggcgtcgtgccaattcctctcccggaagcttcatctaagatggcctttgtggccgtggctcctatccgtgagacacctagtgacattgcgagtagtacttgattgagtgttcgaataccacccgctgctttgatacgcacgctgggcccaatgttttccttcattagtttgagatgtgggattgtggcacctttggatgtgtagcaaccgtctggtagcttcacgaacccatatcccgttgatgtcttgacgtatgctacagagaggattgagcagatcttgcagaggtggat

SEQ ID NO: 26148 - DNA, 459 bp, Muscodor strobelii
  misc_feature: SGI cDNA ID NO. 568935
  misc_feature: Encodes the peptide sequence at SEQ ID NO 26149
atggacccctcatcaatcacgataacactcccacagatcgcaaaactcatcgaccactcacttctccatcccacactaaccgacagcgagatccacgccgggctcaaattagcccggaacgcacgtgtcgccgcggcctgtgtaaagccgtattgcgtgccgattgcaaaagaaatcctcgatgacaccggagtagcgatctgcgctgtaatcggctttcctcacgggaacagcacgacgggtatcaaggtcctagaggccgagcaggctgtcaaagatggagctacggaaattgatatggtggtgaatatcggcaaggtgcttggcggcgattgggagtatgtacagaatgagatcaaggatgtcaatgagaaggttacacgaggtggtgcgttattgaaggtcatttttgagaatgactttttgagtgatgagcgtgagttcactccagttttataa

SEQ ID NO: 26149 - protein, 152 aa, Muscodor strobelii
  misc_feature: SGI Peptide ID NO. 568935
  misc_feature (12)..(152): Pfam Id: PF01791 Pfam Desc: DeoC/LacD family aldolase
  misc_feature (12)..(136): Pfam Id: PF01791 Pfam Desc: DeoC/LacD family aldolase
  misc_feature (1)..(145): NCBI GI: 119483144 Blast Desc: deoxyribose-phosphate aldolase [Neosartorya fischeri NRRL 181] gi|119409755|gb|EAW19703.1| deoxyribose-phosphate aldolase [Neosartorya fischeri NRRL 181]
  misc_feature (1)..(145): NCBI GI: 159123368 Blast Desc: deoxyribose-phosphate aldolase [Aspergillus fumigatus A1163]
  misc_feature (1)..(145): NCBI GI: 70986744 Blast Desc: deoxyribose-phosphate aldolase [Aspergillus fumigatus Af293] gi|66846491|gb|EAL86823.1| deoxyribose-phosphate aldolase [Aspergillus fumigatus Af293]
  misc_feature (1)..(145): NCBI GI: 169782229 Blast Desc: [Aspergillus oryzae RIB40] gi|83774320|dbj|BAE64444.1| protein product [Aspergillus oryzae]
  misc_feature (1)..(145): NCBI GI: 238500670 Blast Desc: deoxyribose-phosphate aldolase [Aspergillus flavus NRRL3357] gi|220691806|gb|EED48153.1| deoxyribose-phosphate aldolase [Aspergillus flavus NRRL3357]
  misc_feature (3)..(146): NCBI GI: 85107841 Blast Desc: deoxyribose-phosphate aldolase [Neurospora crassa OR74A] gi|28924066|gb|EAA33224.1| deoxyribose-phosphate aldolase [Neurospora crassa OR74A]
  misc_feature (1)..(146): NCBI GI: 115399788 Blast Desc: deoxyribose-phosphate aldolase [Aspergillus terreus NIH2624] gi|114191149|gb|EAU32849.1| deoxyribose-phosphate aldolase [Aspergillus terreus NIH2624]
  misc_feature (12)..(146): NCBI GI: 254445465 Blast Desc: deoxyribose-phosphate aldolase [Verrucomicrobiae bacterium DG1235] gi|198259773|gb|EDY84081.1| deoxyribose-phosphate aldolase [Verrucomicrobiae bacterium
  misc_feature (6)..(146): NCBI GI: 145231358 Blast Desc: An02g00250 [Aspergillus niger] gi|134056065|emb|CAK96240.1| protein product [Aspergillus niger]
  misc_feature (4)..(144): NCBI GI: 256730642 Blast Desc: [Nectria haematococca mpVI 77-13-4]
  misc_feature (13)..(148): SWISSPROT Homolog: EC 4.1.2.4 Deoxyribose-phosphate aldolase
MDPSSITITLPQIAKLIDHSLLHPTLTDSEIHAGLKLARNARVAAACVKPYCVPIAKEILDDTGVAICAVIGFPHGNSTTGIKVLEAEQAVKDGATEIDMVVNIGKVLGGDWEYVQNEIKDVNEKVTRGGALLKVIFENDFLSDEREFTPVL

SEQ ID NO: 26150 - DNA, 1956 bp, Muscodor strobelii
  misc_feature: SGI cDNA ID NO. 568936
  misc_feature: Encodes the peptide sequence at SEQ ID NO 26151
atggccgctacggttaggtttgtcgagtctgaccctatcggtctgccgctcaagcggaaacaggtcgcccaggcgtgcgaaagatgccgtaaaaggaagaagcgctgtacacatacagagtctcttgtccatgagaccccttcttcttcctcctccccaaacgtgaccttggtcaatggtagatcacgcccctcaccaaatgaccgaagcggtcagaatcatagttcaactctggatgtcaatgaaagcacaggtgtagagtcgccggctatacagaatggctccgtacggtcagacagtcatcgtgatccgaattctacgtatgtcggcgaccttaaccctggcgccatcctgatggaagctaccaacctctgttcccatcgtgacacctcgcggcgttctgttgggacatggcattctcaatttccgcgccaggaaacccatatgcagggtattccgaccgctcactctgaatcaaggcgagcggtgcaggacatgatgaaatcatacctttggaaccactgcctaccttgtcgccctcctgccgctgatttcgcagttctgaagcgtatctactttgagaagatgaacatgatattacccttcttcgagcccgaatctctttcgcaccctcccgacgcggtaactgggatcttgatagaacaagttgtcagccttgccgccgccgctgatccggaggcaactcaacatctccgtctgagtgcgaccggctctcccctatctcgacaagaattctgtgcatgtctctcaaactcggttctgacaaccctggatgcgggactggtgacgaaccgaatctggatcgctcggttgtcggctgccttgtcactatacacgcaacctatgcaccctgaagatgctgatatcccggctcagttgaatagccgcgccgtacatcaaatgcacactctaggggttcatatggcccgagaagaagacaatccggcgacccccacaatgcaaactctgttttgtgtcctctgggctctcgatcggataacgagcgctatctacgggcgtgcttgtctgatacatgaacgagacgtcggctgggacatcgatgaaatcatccggaaacaagcccctccatttcgattgcttttgctgcttattgaacaacttgacaatgtgatttcgctttatcgacctggttcacgatcttctactcgaacgataatcgagatgccaatttacgaacagatgatcattgatgctgaggcgttgaaggtgccgagcttctgtctcgcttctctcgagatattctaccactcagtcgctatcttgtcaagccagtctcctttagaagttacaacatcttccctaccgaatccagccactaatagccggaggtcgttagctgcagacaggataacgtcgttagtaaaagagcagttcgtgggacaactcgcatacatgccaataataccatacggtgtctcgctgtctctcaacgtatcctacagaaagatgcggcatagcaaagttcccatgtttagatcccggggcaagcagagcttccaaacaaacatgttcttgttgaaatcgatggatgatacattttggtcggcgaggacaacggtcgcaatggctgaacaggtgttacaagagatcgacaagactgtggcgtcacttgctcaagagaatggcctgatcgatcactccaagaaaaatgaatcgacgtcgacaaccgcagggacgcaatccatcgcaccgatggatgtgaacacgggattcaataatggcatagatgggagttttgactggatgttatctaacaatatgccggatctagacgtattcgggcacttcgatccaacatttgacttaggtgctttcgatgcggcgcttgagggaaatctggatttcggacatctttcatcgtccaattggtatgactggcaacagacttggggaatgtcgccgcaggtgcaatga

SEQ ID NO: 26151 - protein, 651 aa, Muscodor strobelii
  misc_feature: SGI Peptide ID NO. 568936
  misc_feature (5)..(642): NCBI GI: 256729029 Blast Desc: NECHADRAFT_39754 [Nectria haematococca mpVI 77-13-4]
  misc_feature (4)..(642): NCBI GI: 261355002 Blast Desc: conserved [Verticillium albo-atrum VaMs.102]
  misc_feature (78)..(642): NCBI GI: 46138925 Blast Desc: FG10977.1 [Gibberella zeae PH-1]
  misc_feature (6)..(647): NCBI GI: 39942716 Blast Desc: MGG_03438 [Magnaporthe grisea 70-15] gi|145010018|gb|EDJ94674.1| MGG_03438 [Magnaporthe grisea 70-15]
  misc_feature (6)..(630): NCBI GI: 154294942 Blast Desc: BC1G_13337 [Botryotinia fuckeliana B05.10] gi|150844466|gb|EDN19659.1| BC1G_13337 [Botryotinia fuckeliana B05.10]
  misc_feature (5)..(645): NCBI GI: 212536468 Blast Desc: fungal specific transcription factor, [Penicillium marneffei ATCC 18224] gi|210070789|gb|EEA24879.1| fungal specific transcription factor, [Penicillium marneffei ATCC 18224]
  misc_feature (6)..(628): NCBI GI: 256725936 Blast Desc: NECHADRAFT_82147 [Nectria haematococca mpVI 77-13-4]
  misc_feature (180)..(629): NCBI GI: 242795757 Blast Desc: fungal specific transcription factor, [Talaromyces stipitatus ATCC 10500] gi|218719245|gb|EED18665.1| fungal specific transcription factor, [Talaromyces stipitatus ATCC
  misc_feature (108)..(628): NCBI GI: 261356996 Blast Desc: conserved [Verticillium albo-atrum VaMs.102]
  misc_feature (5)..(547): NCBI GI: 116203967 Blast Desc: CHGG_09867 [Chaetomium globosum CBS 148.51] gi|88175995|gb|EAQ83463.1| CHGG_09867 [Chaetomium globosum CBS 148.51]
MAATVRFVESDPIGLPLKRKQVAQACERCRKRKKRCTHTESLVHETPSSSSSPNVTLVNGRSRPSPNDRSGQNHSSTLDVNESTGVESPAIQNGSVRSDSHRDPNSTYVGDLNPGAILMEATNLCSHRDTSRRSVGTWHSQFPRQETHMQGIPTAHSESRRAVQDMMKSYLWNHCLPCRPPAADFAVLKRIYFEKMNMILPFFEPESLSHPPDAVTGILIEQVVSLAAAADPEATQHLRLSATGSPLSRQEFCACLSNSVLTTLDAGLVTNRIWIARLSAALSLYTQPMHPEDADIPAQLNSRAVHQMHTLGVHMAREEDNPATPTMQTLFCVLWALDRITSAIYGRACLIHERDVGWDIDEIIRKQAPPFRLLLLLIEQLDNVISLYRPGSRSSTRTIIEMPIYEQMIIDAEALKVPSFCLASLEIFYHSVAILSSQSPLEVTTSSLPNPATNSRRSLAADRITSLVKEQFVGQLAYMPIIPYGVSLSLNVSYRKMRHSKVPMFRSRGKQSFQTNMFLLKSMDDTFWSARTTVAMAEQVLQEIDKTVASLAQENGLIDHSKKNESTSTTAGTQSIAPMDVNTGFNNGIDGSFDWMLSNNMPDLDVFGHFDPTFDLGAFDAALEGNLDFGHLSSSNWYDWQQTWGMSPQVQ

SEQ ID NO: 26152 - DNA, 2542 bp, Muscodor strobelii
  misc_feature: SGI EST ID NO. CUFF.61772.1
  misc_feature: Variant of the nucleotide sequence at SEQ ID NO 26150
ttgcaagatccgttccgacatcagtggcggagtttgctgttcgtgtcggtctctacttgtcggcgttccaaaagtatcatctccgccttttgacggactgtgcattttaggctagtccgccgcataacccctgcagttttgacacttgaaagttcccaaagttcccgcagagccatgtcatcgtctatcatcagcgctctgtgggcgtgttcctcgccttctctcgttgaagatgtgttgccgaacatcctcttcatgtagatgcctcatcggagatgacagattaggagactaccgcctgtcttcacgagcccgccgctgctgctattatggccgctacggttaggtttgtcgagtctgaccctatcggtctgccgctcaagcggaaacaggtcgcccaggcgtgcgaaagatgccgtaaaaggaagaagcgctgtacacatacagagtctcttgtccatgagaccccttcttcttcctcctccccaaacgtgaccttggtcaatggtagatcacgcccctcaccaaatgaccgaagcggtcagaatcatagttcaactctggatgtcaatgaaagcacaggtgtagagtcgccggctatacagaatggctccgtacggtcagacagtcatcgtgatccgaattctacgtatgtcggcgaccttaaccctggcgccatcctgatggaagctaccaacctctgttcccatcgtgacacctcgcggcgttctgttgggacatggcattctcaatttccgcgccaggaaacccatatgcagggtattccgaccgctcactctgaatcaaggcgagcggtgcaggacatgatgaaatcatacctttggaaccactgcctaccttgtcgccctcctgccgctgatttcgcagttctgaagcgtatctactttgagaagatgaacatgatattacccttcttcgagcccgaatctctttcgcaccctcccgacgcggtaactgggatcttgatagaacaagttgtcagccttgccgccgccgctgatccggaggcaactcaacatctccgtctgagtgcgaccggctctcccctatctcgacaagaattctgtgcatgtctctcaaactcggttctgacaaccctggatgcgggactggtgacgaaccgaatctggatcgctcggttgtcggctgccttgtcactatacacgcaacctatgcaccctgaagatgctgatatcccggctcagttgaatagccgcgccgtacatcaaatgcacactctaggggttcatatggcccgagaagaagacaatccggcgacccccacaatgcaaactctgttttgtgtcctctgggctctcgatcggataacgagcgctatctacgggcgtgcttgtctgatacatgaacgagacgtcggctgggacatcgatgaaatcatccggaaacaagcccctccatttcgattgcttttgctgcttattgaacaacttgacaatgtgatttcgctttatcgacctggttcacgatcttctactcgaacgataatcgagatgccaatttacgaacagatgatcattgatgctgaggcgttgaaggtgccgagcttctgtctcgcttctctcgagatattctaccactcagtcgctatcttgtcaagccagtctcctttagaagttacaacatcttccctaccgaatccagccactaatagccggaggtcgttagctgcagacaggataacgtcgttagtaaaagagcagttcgtgggacaactcgcatacatgccaataataccatacggtgtctcgctgtctctcaacgtatcctacagaaagatgcggcatagcaaagttcccatgtttagatcccggggcaagcagagcttccaaacaaacatgttcttgttgaaatcgatggatgatacattttggtcggcgaggacaacggtcgcaatggctgaacaggtgttacaagagatcgacaagactgtggcgtcacttgctcaagagaatggcctgatcgatcactccaagaaaaatgaatcgacgtcgacaaccgcagggacgcaatccatcgcaccgatggatgtgaacacgggattcaataatggcatagatgggagttttgactggatgttatctaacaatatgccggatctagacgtattcgggcacttcgatccaacatttgacttaggtgctttcgatgcggcgcttgagggaaatctggatttcggacatctttcatcgtccaattggtatgactggcaacagacttggggaatgtcgccgcaggtgcaatgatcttgttaatgaaatttgtatgaatactccgtgaatgatgacgacatgcctgaccgcaacttcaaatatgttaggatctcagtgacgcgtgacgcgtgacgaggctcgatcgagcccgtaagtacgaagcgacataaatccggccgcacctgattgaatggcgacaagcttcatgatgagaatgcgaacattaatgcaaaagatgaaaagaagtatcaaatcgcaggattttttgcttggtgttgtttgcaatttta

SEQ ID NO: 26153 - DNA, 1446 bp, Muscodor strobelii
  misc_feature: SGI cDNA ID NO. 568937
  misc_feature: Encodes the peptide sequence at SEQ ID NO 26154
atggcgaccaccactcagactcagactcagactcagggcaagagagaaggggatatctcggacgccttcgcgtcgctttctggtctcgataaagttcctttgccccaacgcttccttgatcttaagaaatcattaattgcgggacatgaggatcgcgtcatcgcaagttggaagaggctgttagcgcagctagagaaagagaacgaaatcgtcgcgaaagaaaagtccaacatcgtgcccagcattgagtttaaaaatctggacgaaggcatcgcgaaattccgctccgagcttgagaaaaggggtgtcgccgtaatcagaggagtgatccctgaaaaggaggctcgcgcatacaaagatgaccttgaagattatgtgaggaagaatctctctacgagagcattcccacaagataaccctcaggtgtatgagctgtattggtccagctctcagatccgagcccgagcgcatccgaacctaatcagagtccagaacaagttgatgaatatctggcgtcaatcaaaccctggcagcgcaattgctctatcgcagaatctggcttatgcggatcgggtgcgcattaggcagccaggcgatgcgaaatttgcccttgggcctcacattgatggcgggagcgtcgagcggtgggagaagcacggctacgggatcgacggggtttacgataagatcttcgagggcgcttgggaagattacgatccatgggatgccagcggtcgagctaatgcggtcatggataactaccaaggcttgggagccgcctctatgtttcgcatgttccagggatggttgagcatgagtcgaacgaaaggctttgagggcacactgctggtgaaccctatgcttcaactttcaacagcatatctgcttctccggcccttcttccgacctgtaaaggacgcgcgtgaagtgtctgcccacgagtacctcgccgcagataattgggtcttcgaaggatctgacatgacgagtgaactgcacggtgcgacgccgggtcacggacaggaactcaactcagagctgcatccgcacctcaagctcgacacgagtatggttcacatgccagaggtaaaacctggagacttcgttgtctggcattgcgacaccatccacgcagtcgacaaaatccatatgggcaagtcagactctagcgttctatacattccgatatgtccagtaacggagcagaatgccagatatctccttcgccagaagaatgcattccttgctggtacaccaggcccagacttccctggaggcgctggcgagtcgcagcatatcgatagaccaacagtggaatatcttcaggcgcatgcgacatctgaagggctacgagcctttgggttcgagggccttgtcccagctaactctgatggacccggcgcccgggagataattgccaagacaaatacgatcttaggcttctag

SEQ ID NO: 26154 - protein, 481 aa, Muscodor strobelii
  misc_feature: SGI Peptide ID NO. 568937
  misc_feature (23)..(457): Pfam Id: PF07350 Pfam Desc: Domain of function (DUF1479)
  misc_feature (92)..(299): Pfam Id: PF07350 Pfam Desc: Domain of function (DUF1479)
  misc_feature (331)..(457): Pfam Id: PF07350 Pfam Desc: Domain of function (DUF1479)
  misc_feature (5)..(481): NCBI GI: 256728851 Blast Desc: NECHADRAFT_40290 [Nectria haematococca mpVI 77-13-4]
  misc_feature (14)..(481): NCBI GI: 171679357 Blast Desc: protein product [Podospora anserina] gi|170939304|emb|CAP64532.1| protein product [Podospora anserina]
  misc_feature (9)..(481): NCBI GI: 145616280 Blast Desc: MGG_03437 [Magnaporthe grisea 70-15] gi|145010019|gb|EDJ94675.1| MGG_03437 [Magnaporthe grisea 70-15]
  misc_feature (13)..(481): NCBI GI: 116203969 Blast Desc: CHGG_09868 [Chaetomium globosum CBS 148.51] gi|88175996|gb|EAQ83464.1| CHGG_09868 [Chaetomium globosum CBS 148.51]
  misc_feature (6)..(480): NCBI GI: 256725937 Blast Desc: NECHADRAFT_94732 [Nectria haematococca mpVI 77-13-4]
  misc_feature (14)..(481): NCBI GI: 46138913 Blast Desc: FG10971.1 [Gibberella zeae PH-1]
  misc_feature (14)..(481): NCBI GI: 156066035 Blast Desc: SS1G_01029 [Sclerotinia sclerotiorum 1980] gi|154691887|gb|EDN91625.1| SS1G_01029 [Sclerotinia sclerotiorum 1980]
  misc_feature (6)..(481): NCBI GI: 238491166 Blast Desc: conserved [Aspergillus flavus NRRL3357] gi|220697233|gb|EED53574.1| conserved [Aspergillus flavus NRRL3357]
  misc_feature (8)..(447): NCBI GI: 261356997 Blast Desc: conserved [Verticillium albo-atrum VaMs.102]
  misc_feature (4)..(481): NCBI GI: 169616844 Blast Desc: SNOG_11597 [Phaeosphaeria nodorum SN15] gi|160703271|gb|EAT81305.2| SNOG_11597 [Phaeosphaeria nodorum SN15]
MATTTQTQTQTQGKREGDISDAFASLSGLDKVPLPQRFLDLKKSLIAGHEDRVIASWKRLLAQLEKENEIVAKEKSNIVPSIEFKNLDEGIAKFRSELEKRGVAVIRGVIPEKEARAYKDDLEDYVRKNLSTRAFPQDNPQVYELYWSSSQIRARAHPNLIRVQNKLMNIWRQSNPGSAIALSQNLAYADRVRIRQPGDAKFALGPHIDGGSVERWEKHGYGIDGVYDKIFEGAWEDYDPWDASGRANAVMDNYQGLGAASMFRMFQGWLSMSRTKGFEGTLLVNPMLQLSTAYLLLRPFFRPVKDAREVSAHEYLAADNWVFEGSDMTSELHGATPGHGQELNSELHPHLKLDTSMVHMPEVKPGDFVVWHCDTIHAVDKIHMGKSDSSVLYIPICPVTEQNARYLLRQKNAFLAGTPGPDFPGGAGESQHIDRPTVEYLQAHATSEGLRAFGFEGLVPANSDGPGAREIIAKTNTILGF

SEQ ID NO: 26155 - DNA, 823 bp, Muscodor strobelii
  misc_feature: SGI EST ID NO. CUFF.61639.0
  misc_feature: Variant of the nucleotide sequence at SEQ ID NO 26153
ttgcgacaccatccacgcagtcgacaaaatccatatgggcaagtcagactctagcgttctatacattccgatatgtccagtaacggagcagaatgccagatatctccttcgccagaagaatgcattccttgctggtacaccaggcccagacttccctggaggcgctggcgagtcgcagcatatcgatagaccaacagtggaatatcttcaggcgcatgcgacatctgaagggctacgagcctttgggttcgagggccttgtcccagctaactctgatggacccggcgcccgggagataattgccaagacaaatacgatcttaggcttctagctgccttgatatttacgcctatgtaccgactattttcgaagtatgatatcacgcattacaaacaaattaaaaagactaaaatgagaggttgccttctgcacgaattagtcctcgatgtcaacacaatacagagcaacgaatcgcaaaaatgcgcgcccaccagcacaataaaacttttggaacatgaacgctttcgtgggaatggatgtcattgatctttatcctagtctggctgcatgatagagcacatcccttgaattaccagaataatcgcgaaagtctctgaggagcaatggatattcacgccagacccgcgtatatcttgccgtaggagctcaattccgtctcattcgtaaacaagtatcccgtagcagcgaagtagtacgcgtatttgtcgacaaaatcgtattcattactgtcgagagccttgagagaaactttcataaacgtgtccacgtcaccctccaaggctgcgaactccgtgatccagac

SEQ ID NO: 26156 - DNA, 1458 bp, Muscodor strobelii
  misc_feature: SGI cDNA ID NO. 568938
  misc_feature: Encodes the peptide sequence at SEQ ID NO 26157
atggcgaccaccactcagactcagactcagactcagggcaagagagaaggggatatctcggacgccttcgcgtcgctttctggtctcgataaagttcctttgccccaacgcttccttgatcttaagaaatcattaattgcgggacatgaggatcgcgtcatcgcaagttggaagaggctgttagcgcagctagagaaagagaacgaaatcgtcgcgaaagaaaagtccaacatcgtgcccagcattgagtttaaaaatctggacgaaggcatcgcgaaattccgctccgagcttgagaaaaggggtgtcgccgtaatcagaggagtgatccctgaaaaggaggctcgcgcatacaaagatgaccttgaagattatgtgaggaagaatctctctacgagagcattcccacaagataaccctcaggtgtatgagctgtattggtccagctctcagatccgagcccgagcgcatccgaacctaatcagagtccagaacaagttgatgaatatctggcgtcaatcaaaccctggcagcgcaattgctctatcgcagaatctggcttatgcggatcgggtgcgcattaggcagccaggcgatgcgaaatttgcccttgggcctcacattgatggcgggagcgtcgagcggtgggagaagcacggctacgggatcgacggggtttacgataagatcttcgagggcgcttgggaagattacgatccatgggatgccagcggtcgagctaatgcggtcatggataactaccaaggcttgggagccgcctctatgtttcgcatgttccagggatggttgagcatgagtcgaacgaaaggctttgagggcacactgctggtgaaccctatgcttcaactttcaacagcatatctgcttctccggcccttcttccgacctgtaaaggacgcgcgtgaagtgtctgcccacgagtacctcgccgcagataattgggtcttcgaaggatctgacatgacgagtgaactgcacggtgcgacgccgggtcacggacaggaactcaactcagagctgcatccgcacctcaagctcgacacgagtatggttcacatgccagaggtaaaacctggagacttcgttgtctggcattgcgacagtgactttcaagccatccacgcagtcgacaaaatccatatgggcaagtcagactctagcgttctatacattccgatatgtccagtaacggagcagaatgccagatatctccttcgccagaagaatgcattccttgctggtacaccaggcccagacttccctggaggcgctggcgagtcgcagcatatcgatagaccaacagtggaatatcttcaggcgcatgcgacatctgaagggctacgagcctttgggttcgagggccttgtcccagctaactctgatggacccggcgcccgggagataattgccaagacaaatacgatcttaggcttctag

SEQ ID NO: 26157 - protein, 485 aa, Muscodor strobelii
  misc_feature: SGI Peptide ID NO. 568938
  misc_feature (23)..(461): Pfam Id: PF07350 Pfam Desc: Domain of function (DUF1479)
  misc_feature (92)..(299): Pfam Id: PF07350 Pfam Desc: Domain of function (DUF1479)
  misc_feature (331)..(461): Pfam Id: PF07350 Pfam Desc: Domain of function (DUF1479)
  misc_feature (5)..(485): NCBI GI: 256728851 Blast Desc: NECHADRAFT_40290 [Nectria haematococca mpVI 77-13-4]
  misc_feature (14)..(485): NCBI GI: 171679357 Blast Desc: protein product [Podospora anserina] gi|170939304|emb|CAP64532.1| protein product [Podospora anserina]
  misc_feature (9)..(485): NCBI GI: 145616280 Blast Desc: MGG_03437 [Magnaporthe grisea 70-15] gi|145010019|gb|EDJ94675.1| MGG_03437 [Magnaporthe grisea 70-15]
  misc_feature (13)..(485): NCBI GI: 116203969 Blast Desc: CHGG_09868 [Chaetomium globosum CBS 148.51] gi|88175996|gb|EAQ83464.1| CHGG_09868 [Chaetomium globosum CBS 148.51]
  misc_feature (14)..(485): NCBI GI: 46138913 Blast Desc: FG10971.1 [Gibberella zeae PH-1]
  misc_feature (6)..(484): NCBI GI: 256725937 Blast Desc: NECHADRAFT_94732 [Nectria haematococca mpVI 77-13-4]
  misc_feature (14)..(485): NCBI GI: 156066035 Blast Desc: SS1G_01029 [Sclerotinia sclerotiorum 1980] gi|154691887|gb|EDN91625.1| SS1G_01029 [Sclerotinia sclerotiorum 1980]
  misc_feature (6)..(485): NCBI GI: 238491166 Blast Desc: conserved [Aspergillus flavus NRRL3357] gi|220697233|gb|EED53574.1| conserved [Aspergillus flavus NRRL3357]
  misc_feature (8)..(451): NCBI GI: 261356997 Blast Desc: conserved [Verticillium albo-atrum VaMs.102]
  misc_feature (4)..(485): NCBI GI: 169616844 Blast Desc: SNOG_11597 [Phaeosphaeria nodorum SN15] gi|160703271|gb|EAT81305.2| SNOG_11597 [Phaeosphaeria nodorum SN15]
MATTTQTQTQTQGKREGDISDAFASLSGLDKVPLPQRFLDLKKSLIAGHEDRVIASWKRLLAQLEKENEIVAKEKSNIVPSIEFKNLDEGIAKFRSELEKRGVAVIRGVIPEKEARAYKDDLEDYVRKNLSTRAFPQDNPQVYELYWSSSQIRARAHPNLIRVQNKLMNIWRQSNPGSAIALSQNLAYADRVRIRQPGDAKFALGPHIDGGSVERWEKHGYGIDGVYDKIFEGAWEDYDPWDASGRANAVMDNYQGLGAASMFRMFQGWLSMSRTKGFEGTLLVNPMLQLSTAYLLLRPFFRPVKDAREVSAHEYLAADNWVFEGSDMTSELHGATPGHGQELNSELHPHLKLDTSMVHMPEVKPGDFVVWHCDSDFQAIHAVDKIHMGKSDSSVLYIPICPVTEQNARYLLRQKNAFLAGTPGPDFPGGAGESQHIDRPTVEYLQAHATSEGLRAFGFEGLVPANSDGPGAREIIAKTNTILGF

SEQ ID NO: 26158 - DNA, 284 bp, Muscodor strobelii
  misc_feature: SGI EST ID NO. CUFF.61636.0
  misc_feature: Variant of the nucleotide sequence at SEQ ID NO 26156
ggatcgggtgcgcattaggcagccaggcgatgcgaaatttgcccttgggcctcacattgatggcgggagcgtcgagcggtgggagaagcacggctacgggatcgacggggtttacgataagatcttcgagggcgcttgggaagattacgatccatgggatgccagcggtcgagctaatgcggtcatggataactaccaaggcttgggagccgcctctatgtttcgcatgttccagggatggttgagcatgagtcgaacgaaaggctttgagggcacactgctgg

SEQ ID NO: 26159 - DNA, 786 bp, Muscodor strobelii
  misc_feature: SGI cDNA ID NO. 568939
  misc_feature: Encodes the peptide sequence at SEQ ID NO 26160
atggcgctgaggtacatgctagccgcagccgcggctctcatcacactcatcgcttcggccgctagttcaagcacgaaacgcggcatcttataccaagatccgcacttcatccaacagttcctcaatctcggcggcaaagcatcttgggcctctaattggggcgaatgcgacgaacacccgaccaatggcctggcctactatcctttactgtacgccaacttgcccgaatacaccgaccgctggacagcagctgccagactcgcaacctctgagggcgacgcgcaccttcttagtttccatgaacccggctgtaacgactccgtcgcggtcatgtcaccggctgaggccatcgtcgcacacaaagagtggctgaacccgtattcgggccaagctaagattggcgctccaggcatcgtatcaaaacctatcaccggacgaggcctaagctggctaggagagttcctcgaccgctgcaacggcgagtgcgctgtcgacttctgcgttggacattggttcggtcctggtggcgaggatggcgcgaacgtatttcttcaatatgtgaacgaccttcatgagacttgtcatggtcgccacgtctggatcacggagttcgcagccttggagggtgacgtggacacgtttatgaaagtttctctcaaggctctcgacagtaatgaatacgattttgtcgacaaatacgcgtactacttcgctgctacgggatacttgtttacgaatgagacggaattgagctcctacggcaagatatacgcgggtctggcgtga

SEQ ID NO: 26160 - protein, 261 aa, Muscodor strobelii
  misc_feature: SGI Peptide ID NO. 568939
  misc_feature (23)..(258): NCBI GI: 39946646 Blast Desc: MGG_08577 [Magnaporthe grisea 70-15] gi|145012435|gb|EDJ97091.1| MGG_08577 [Magnaporthe grisea 70-15]
  misc_feature (26)..(258): NCBI GI: 223973473 Blast Desc: [Zea mays]
  misc_feature (23)..(258): NCBI GI: 116204951 Blast Desc: CHGG_10359 [Chaetomium globosum CBS 148.51] gi|88176487|gb|EAQ83955.1| CHGG_10359 [Chaetomium globosum CBS 148.51]
  misc_feature (26)..(258): NCBI GI: 85077644 Blast Desc: NCU01720 [Neurospora crassa OR74A] gi|8218273|emb|CAB92700.1| conserved [Neurospora crassa] gi|28917076|gb|EAA26798.1| [Neurospora crassa OR74A]
  misc_feature (26)..(258): NCBI GI: 46105372 Blast Desc: FG00314.1 [Gibberella zeae PH-1]
  misc_feature (26)..(258): NCBI GI: 256735350 Blast Desc: NECHADRAFT_98877 [Nectria haematococca mpVI 77-13-4]
  misc_feature (28)..(258): NCBI GI: 171689052 Blast Desc: protein product [Podospora anserina] gi|170944488|emb|CAP70599.1| protein product [Podospora anserina]
  misc_feature (19)..(258): NCBI GI: 261358599 Blast Desc: conserved [Verticillium albo-atrum VaMs.102]
  misc_feature (6)..(257): NCBI GI: 154313149 Blast Desc: BC1G_05576 [Botryotinia fuckeliana B05.10] gi|150849661|gb|EDN24854.1| BC1G_05576 [Botryotinia fuckeliana B05.10]
  misc_feature (19)..(260): NCBI GI: 154274924 Blast Desc: [Ajellomyces capsulatus NAm1] gi|150414753|gb|EDN10115.1| [Ajellomyces capsulatus NAm1]
MALRYMLAAAAALITLIASAASSSTKRGILYQDPHFIQQFLNLGGKASWASNWGECDEHPTNGLAYYPLLYANLPEYTDRWTAAARLATSEGDAHLLSFHEPGCNDSVAVMSPAEAIVAHKEWLNPYSGQAKIGAPGIVSKPITGRGLSWLGEFLDRCNGECAVDFCVGHWFGPGGEDGANVFLQYVNDLHETCHGRHVWITEFAALEGDVDTFMKVSLKALDSNEYDFVDKYAYYFAATGYLFTNETELSSYGKIYAGLA

SEQ ID NO: 26161 - DNA, 342 bp, Muscodor strobelii
  misc_feature: SGI EST ID NO. CUFF.61642.0
  misc_feature: Variant of the nucleotide sequence at SEQ ID NO 26159
cggcaaagcatcttgggcctctaattggggcgaatgcgacgaacacccgaccaatggcctggcctactatcctttactgtacgccaacttgcccgaatacaccgaccgctggacagcagctgccagactcgcaacctctgagggcgacgcgcaccttcttagtttccatgaacccggctgtaacgactccgtcgcggtcatgtcaccggctgaggccatcgtcgcacacaaagagtggctgaacccgtattcgggccaagctaagattggcgctccaggcatcgtatcaaaacctatcaccggacgaggcctaagctggctaggagagttcctcgaccgctg

SEQ ID NO: 26162 - DNA, 468 bp, Muscodor strobelii
  misc_feature: SGI cDNA ID NO. 568940
  misc_feature: Encodes the peptide sequence at SEQ ID NO 26163
atggccgcctctgatccacctggaacatcccgtcactgcggagagttcttctctcgatttgatgtatcatacgacgacgagcgtccccataatgcccttacagagatctttggcgaaaatgccgatatcaacaagggacaaggcggctcttacgtctggctcattccacgcaatgcgaccgcgccaagatcaatggttgacaacgtctggatcgatatccagagcgatggagctccagaccgttatgacattgcgaagggcgctggtggtgactatcgatacttgggatggtccaacaatcctagtacaggccactttataacagaccttggtctctggaggtcctctgacggtcaggacagtcctccaagtggctggcagggaatgaccaaggacctcaatagtggccgtggtggtgacttcttatatcttgtttggaagacgaagcagtatactggcggtttctga

SEQ ID NO: 26163 - protein, 155 aa, Muscodor strobelii
  misc_feature: SGI Peptide ID NO. 568940
  misc_feature (4)..(153): NCBI GI: 171684615 Blast Desc: protein product [Podospora anserina] gi|170942268|emb|CAP67920.1| protein product [Podospora anserina]
  misc_feature (46)..(153): NCBI GI: 171679030 Blast Desc: protein product [Podospora anserina] gi|170937586|emb|CAP62243.1| protein product [Podospora anserina]
  misc_feature (15)..(149): NCBI GI: 169864190 Blast Desc: CC1G_11650 [Coprinopsis cinerea okayama7#130] gi|116500229|gb|EAU83124.1| CC1G_11650 [Coprinopsis cinerea okayama7#130]
  misc_feature (16)..(147): NCBI GI: 259481436 Blast Desc: TPA: conserved [Aspergillus nidulans FGSC A4]
  misc_feature (16)..(150): NCBI GI: 169864150 Blast Desc: CC1G_11630 [Coprinopsis cinerea okayama7#130] gi|116500209|gb|EAU83104.1| CC1G_11630 [Coprinopsis cinerea okayama7#130]
  misc_feature (15)..(150): NCBI GI: 169864602 Blast Desc: CC1G_05461 [Coprinopsis cinerea okayama7#130] gi|116499944|gb|EAU82839.1| CC1G_05461 [Coprinopsis cinerea okayama7#130]
  misc_feature (16)..(148): NCBI GI: 121712124 Blast Desc: ACLA_062140 [Aspergillus clavatus NRRL 1] gi|119401829|gb|EAW12251.1| ACLA_062140 [Aspergillus clavatus NRRL 1]
  misc_feature (16)..(149): NCBI GI: 67527101 Blast Desc: AN3983.2 [Aspergillus nidulans FGSC A4] gi|40740264|gb|EAA59454.1| AN3983.2 [Aspergillus nidulans FGSC A4]
  misc_feature (33)..(147): NCBI GI: 170120303 Blast Desc: LACBIDRAFT_309575 [Laccaria bicolor S238N-H82] gi|164633542|gb|EDQ98171.1| LACBIDRAFT_309575 [Laccaria bicolor S238N-H82]
  misc_feature (42)..(147): NCBI GI: 46133889 Blast Desc: FG09084.1 [Gibberella zeae PH-1]
MAASDPPGTSRHCGEFFSRFDVSYDDERPHNALTEIFGENADINKGQGGSYVWLIPRNATAPRSMVDNVWIDIQSDGAPDRYDIAKGAGGDYRYLGWSNNPSTGHFITDLGLWRSSDGQDSPPSGWQGMTKDLNSGRGGDFLYLVWKTKQYTGGF

SEQ ID NO: 26164 - DNA, 385 bp, Muscodor strobelii
  misc_feature: SGI EST ID NO. CUFF.61649.0
  misc_feature: Variant of the nucleotide sequence at SEQ ID NO 26162
agcgatggagctccagaccgttatgacattgcgaagggcgctggtggtgactatcgatacttgggatggtccaacaatcctagtacaggccactttataacagaccttggtctctggaggtcctctgacggtcaggacagtcctccaagtggctggcagggaatgaccaaggacctcaatagtggccgtggtggtgacttcttatatcttgtttggaagacgaagcagtatactggcggtttctgaaaattgaacgctctcattgagcttgtattgctcaacctttctagtggtcaaatggaccgctcccctcctgcggagttcctcgtctgtgtgtcggaccaactaattctctgtatcagtcatcctagattggttctatccc

SEQ ID NO: 26165 - DNA, 1041 bp, Muscodor strobelii
  misc_feature: SGI cDNA ID NO. 568941
  misc_feature: Elevated expression when VOC is produced
  misc_feature: Encodes the peptide sequence at SEQ ID NO 26166
atgggcgcaactaacacccttgaaagtagtcgtcccagtggcattaccgcacctgaaaaccacttagtcttagaccgagcgatcctaaatgcgatttcgaaaggcagcaaaattgtatcagctgaacgctataataattcagcatgggcttcaacggggcgcgttcgaactagagacgccactggcacagttcgtgattacttcctcaagattgtgaaaggtgaatttgctcacgagcgtgtcctcggtgagcacagctgcatgttggaactatataggactatgccatcaactgtgccaatgccccatggattcggacagtgtattgatactgatggtcattatttcctctgtgattatgtcaatatcactcatcaacagccagatccggtccgtctcgcacagaaaattgttgagcttcataagaagagcacatcgcctacaggccaatttggttttcacgtgactccatatgatggaaagcttccgctcagtgtggcatgggatagaagttggaaatctttctacgccaagcttctgcagggagtgtatcaactagacaccgatgtcaatgggttctggagagagttggacgaagcaatgaccgtgacaatagagaaggtcataccccgactcctgggcccccttgaagaggacggacgatcgatcagaccatgccttattcacggcgatctttgggaggcaaacatcggcactgagcagcaaacaggcgagatcttcatatttgactcgtgcgcgtactatgctcaccatgagatggctgtcgggatgtggagggttgatcatcatcgcatgaacgcggaggtgtaccgaaatgagtacttcaacctctttgaacccgatgagcccaaggcggaatatgacgatcgaaatagattatacgcgatcaaggagagaatcatgtactctgctcacataccaggaagccaggcccgtggtctggctcttaaggatatgcagtatctgatcaagaagtttgccatttgtgacggcaatattgaaggggctcctgcggagtga

SEQ ID NO: 26166 - protein, 346 aa, Muscodor strobelii
  misc_feature: SGI Peptide ID NO. 568941
  misc_feature (24)..(333): NCBI GI: 116206070 Blast Desc: CHGG_02328 [Chaetomium globosum CBS 148.51] gi|88182925|gb|EAQ90393.1| CHGG_02328 [Chaetomium globosum CBS 148.51]
  misc_feature (7)..(334): NCBI GI: 145228563 Blast Desc: An01g01490 [Aspergillus niger] gi|134054681|emb|CAK43522.1| protein product [Aspergillus niger]
  misc_feature (6)..(319): NCBI GI: 258563734 Blast Desc: [Uncinocarpus reesii 1704] gi|237908119|gb|EEP82520.1| [Uncinocarpus reesii 1704]
  misc_feature (14)..(338): NCBI GI: 116214451 Blast Desc: CHGG_11066 [Chaetomium globosum CBS 148.51] gi|88175421|gb|EAQ82890.1| CHGG_11066 [Chaetomium globosum CBS 148.51]
  misc_feature (5)..(333): NCBI GI: 240110347 Blast Desc: CPC735_063790 [Coccidioides posadasii C735 delta SOWgp]
  misc_feature (5)..(333): NCBI GI: 119180471 Blast Desc: CIMG_08864 [Coccidioides immitis RS]
  misc_feature (24)..(311): NCBI GI: 169765035 Blast Desc: [Aspergillus oryzae RIB40] gi|83764843|dbj|BAE54987.1| protein product [Aspergillus oryzae]
  misc_feature (32)..(311): NCBI GI: 238503680 Blast Desc: conserved [Aspergillus flavus NRRL3357] gi|220690543|gb|EED46892.1| conserved [Aspergillus flavus NRRL3357]
  misc_feature (24)..(334): NCBI GI: 261356147 Blast Desc: conserved [Verticillium albo-atrum VaMs.102]
  misc_feature (24)..(303): NCBI GI: 145256231 Blast Desc: An10g00710 [Aspergillus niger CBS 513.88] gi|134078637|emb|CAK40510.1| protein product [Aspergillus niger]
  misc_feature: Useful for introducing or modulating the production of volatile compounds
MGATNTLESSRPSGITAPENHLVLDRAILNAISKGSKIVSAERYNNSAWASTGRVRTRDATGTVRDYFLKIVKGEFAHERVLGEHSCMLELYRTMPSTVPMPHGFGQCIDTDGHYFLCDYVNITHQQPDPVRLAQKIVELHKKSTSPTGQFGFHVTPYDGKLPLSVAWDRSWKSFYAKLLQGVYQLDTDVNGFWRELDEAMTVTIEKVIPRLLGPLEEDGRSIRPCLIHGDLWEANIGTEQQTGEIFIFDSCAYYAHHEMAVGMWRVDHHRMNAEVYRNEYFNLFEPDEPKAEYDDRNRLYAIKERIMYSAHIPGSQARGLALKDMQYLIKKFAICDGNIEGAPAE

SEQ ID NO: 26167 - DNA, 1473 bp, Muscodor strobelii
  misc_feature: SGI EST ID NO. CUFF.61654.0
  misc_feature: Variant of the nucleotide sequence at SEQ ID NO 26165
cttcgcgcccgtggccgtagtggatctgtctcaccacgttcaatgagactcgaccggggcaattgcaggtcgcgaacccgtgttgatcgatacagcgcgaagccattcccaggctcgtcttcatcagagatcctgcaacctgtaagtcaccgatcacaaataacaattgaggcctaagccaggtataaacatcagaggttcgtgtcgacacggcggcgtcgtctaagcgcgcgtctctcattccgttgccgatggcttcgccacgctaccaagaaccaactgcatcgcgcaccagaaatgtgttgctctgacaatgtcgaggaatgctcaaatacccacggtagcacaggccaaaatgagatacgaaatgccaatttttttgccaccatcaagtagtcgtcccagtggcattaccgcacctgaaaaccacttagtcttagaccgagcgatcctaaatgcgatttcgaaaggcagcaaaattgtatcagctgaacgctataataattcagcatgggcttcaacggggcgcgttcgaactagagacgccactggcacagttcgtgattacttcctcaagattgtgaaaggtgaatttgctcacgagcgtgtcctcggtgagcacagctgcatgttggaactatataggactatgccatcaactgtgccaatgccccatggattcggacagtgtattgatactgatggtcattatttcctctgtgattatgtcaatatcactcatcaacagccagatccggtccgtctcgcacagaaaattgttgagcttcataagaagagcacatcgcctacaggccaatttggttttcacgtgactccatatgatggaaagcttccgctcagtgtggcatgggatagaagttggaaatctttctacgccaagcttctgcagggagtgtatcaactagacaccgatgtcaatgggttctggagagagttggacgaagcaatgaccgtgacaatagagaaggtcataccccgactcctgggcccccttgaagaggacggacgatcgatcagaccatgccttattcacggcgatctttgggaggcaaacatcggcactgagcagcaaacaggcgagatcttcatatttgactcgtgcgcgtactatgctcaccatgagatggctgtcgggatgtggagggttgatcatcatcgcatgaacgcggaggtgtaccgaaatgagtacttcaacctctttgaacccgatgagcccaaggcggaatatgacgatcgaaatagattatacgcgatcaaggagagaatcatgtactctgctcacataccaggaagccaggcccgtggtctggctcttaaggatatgcagtatctgatcaagaagtttgccatttgtgacggcaatattgaaggggctcctgcggagtgatccgcatgtcgttgatatgggtctcggctccagaactatttctagatcttttctgaagttccctc

SEQ ID NO: 26168 - DNA, 1044 bp, Muscodor strobelii
  misc_feature: SGI cDNA ID NO. 568942
  misc_feature: Encodes the peptide sequence at SEQ ID NO 26169
atggctaatatcatactccctgagcccttcgcgagcatcccacgagaatcattcctcttcgggccctcgcccatccagcacctccctcggatatctgctgcacttggaggaaaggtccaggtatatgcgaagcgagaggactgtaactctggcctagcatatggtggaaacaagacgcggaagcttgaatatcttgcctctgaagcccttgctcagggttgcgatactcttgtaagcattggcggagtgcagtctaatcacacgcgtcaagtggctgcagtagccgccaagcttggactgaggagcgcattggtccaagagcattgggtcgattgtgatgatgctcactatgatcgcgtcggcaatatccagctgtcgcgagtgatgggtgcggactcacggctggacccttcaacgttcggtattgagcacaaggaaactctaaagaacttgcaatccgagttgcttgtcgccgggcgcaagccctactacatccctgctggcgcttctgaccatccgcttggcggactaggattcgcgcgctgggctttcgaggtttgtcaacaagagaaagagacaggcattttctatcacacgataattgtctgcgctgtcacaggatctacgatggccggaatggttgctggtttcaaattgactgagaagttgggaagccgcaagcgaaaagtcatcggtattgacgcatcggcgaaggtgaagcagacttttgaccaagtattgcgcatcgcgaaagcgaccggtgttaagatcggattagcagaggatgatatcacagagagcgatattatactcgatgatcgataccatggcggagtttacggattgccggacgagaagaccatcgaggcgattaagttcggtgcaagtaccgaggccttcatcacagatccagtgtacgaaggaaagagtcttgcgggtatgatggatcttataaaaaatggagaaatcccggacggcagcaatgtgctttatgcgcacttgggaggtcaattggcactcaacgcgtattcgtctatacagtag

SEQ ID NO: 26169 - protein, 347 aa, Muscodor strobelii
  misc_feature: SGI Peptide ID NO. 568942
  misc_feature (16)..(335): Pfam Id: PF00291 Pfam Desc: Pyridoxal-phosphate dependent enzyme
  misc_feature (1)..(346): NCBI GI: 212544226 Blast Desc: 1-aminocyclopropane-1-carboxylate deaminase, [Penicillium marneffei ATCC 18224] gi|210065236|gb|EEA19330.1| 1-aminocyclopropane-1-carboxylate deaminase, [Penicillium ATCC
  misc_feature (1)..(346): NCBI GI: 242818949 Blast Desc: 1-aminocyclopropane-1-carboxylate deaminase, [Talaromyces stipitatus ATCC 10500] gi|218713680|gb|EED13104.1| 1-aminocyclopropane-1-carboxylate deaminase, [Talaromyces ATCC
  misc_feature (1)..(346): NCBI GI: 256726768 Blast Desc: NECHADRAFT_33030 [Nectria haematococca mpVI 77-13-4]
  misc_feature (1)..(346): NCBI GI: 164425307 Blast Desc: 1-aminocyclopropane-1-carboxylate deaminase [Neurospora crassa OR74A] gi|157070876|gb|EAA29964.2| 1-aminocyclopropane-1-carboxylate deaminase [Neurospora crassa
  misc_feature (1)..(346): NCBI GI: 46121309 Blast Desc: FG05033.1 [Gibberella zeae PH-1]
  misc_feature (1)..(346): NCBI GI: 28950050 Blast Desc: ACC deaminase [Neurospora crassa]
  misc_feature (3)..(346): NCBI GI: 145609992 Blast Desc: MGG_02812 [Magnaporthe grisea 70-15] gi|145017374|gb|EDK01737.1| MGG_02812 [Magnaporthe grisea 70-15]
  misc_feature (3)..(317): NCBI GI: 67903824 Blast Desc: AN8899.2 [Aspergillus nidulans FGSC A4] gi|40744957|gb|EAA64113.1| AN8899.2 [Aspergillus nidulans FGSC A4] gi|259486667|tpe|CBF84704.1| TPA: deaminase, (AFU_orthologue;
  misc_feature (3)..(346): NCBI GI: 149210173 Blast Desc: MGCH7_ch7g568 [Magnaporthe grisea 70-15] gi|86196523|gb|EAQ71161.1| MGCH7_ch7g568 [Magnaporthe grisea 70-15]
  misc_feature (1)..(338): NCBI GI: 116206748 Blast Desc: conserved [Chaetomium globosum CBS 148.51] gi|88183264|gb|EAQ90732.1| conserved [Chaetomium globosum CBS 148.51]
  misc_feature (12)..(345): SWISSPROT Homolog: EC 3.5.99.7 1-aminocyclopropane-1-carboxylate deaminase
MANIILPEPFASIPRESFLFGPSPIQHLPRISAALGGKVQVYAKREDCNSGLAYGGNKTRKLEYLASEALAQGCDTLVSIGGVQSNHTRQVAAVAAKLGLRSALVQEHWVDCDDAHYDRVGNIQLSRVMGADSRLDPSTFGIEHKETLKNLQSELLVAGRKPYYIPAGASDHPLGGLGFARWAFEVCQQEKETGIFYHTIIVCAVTGSTMAGMVAGFKLTEKLGSRKRKVIGIDASAKVKQTFDQVLRIAKATGVKIGLAEDDITESDIILDDRYHGGVYGLPDEKTIEAIKFGASTEAFITDPVYEGKSLAGMMDLIKNGEIPDGSNVLYAHLGGQLALNAYSSIQ

SEQ ID NO: 26170 - DNA, 1272 bp, Muscodor strobelii
  misc_feature: SGI cDNA ID NO. 568943
  misc_feature: Elevated expression when VOC is produced
  misc_feature: Encodes the peptide sequence at SEQ ID NO 26171
atgagagcgtttgtttctgcggcggtcctgttagctctgtcccttggccactctgtcttaggacaaacatgtcctcaggcagatcttagcttcgggctcggagctgacgacttagcaccggttgataatgttgcaaccgccgaaaccaccggtccctatagcgtaggaatcactttccaaaactactgctctggaggccgcaatcttacagcaagcgtgtggtatccggcgactccctcatctgggtccatgccatacgtctcatctggcggcatcgttggcaacgcatacaaagatgcgccactcgatgcctcgggaggcccatatccgcttatcgtcttctccagtggcttgggtgcggtccacgacgcatactacttctatgtacagaatcttgtcagtcacggatacatcgtgaccagcgcccagcacttggatgccagacacgctagtataacgtcaaacgttagccttctgcttatcgcagttgcagacgccgagctcggcaataccaacgatgctgtgatcaccttctatacagactggttccgatctacacaatatgctttcacatatcgaccgcaggagattgagttcaatctcaaccaaacccttgccctgggcgaagattcgtcgtcgatattctatggaaatatcgacagtaacaacattggtatgactggtcactctcttggaggcttcatgaccaatgttatcgggggtggagcagctatctactgcgattatgtgatgctaccgggtgaaagcaacccgaacaacccgttgctcgcatctgtcagcccatgcgcattcgatgaggttaagtcactctcaagcccgttcgctctacacgacagtcgtatcaaggctattatccccttagcagcgccaagtttcatcgcgaaagatcaaattgcacgatctgcggctcagattaaggtcccaacgatggtcttgacaggagacaactttacatcagagacgacagagtgggtacagaaggccgtatacaacaatgctcaaggaccagcatactgggttcagatcgatggtgctgatcactacatggtagcagacgcctatgggctgaatccagatgtcccatttaagggtagcgaagacagcgagaacttcttagataaggccgcagtgtacatgacatactccgcagcatttttcaactactatatcaaagggaacacgtcagcgctgagtaccttacacacgaaatcgtcgttgttcgtcgaagacttggcgtatagaaacgattga

SEQ ID NO: 26171 - protein, 423 aa, Muscodor strobelii
  misc_feature: SGI Peptide ID NO. 568943
  misc_feature (53)..(416): NCBI GI: 57233901 Blast Desc: DET1295 [Dehalococcoides ethenogenes 195] gi|57224349|gb|AAW39406.1| DET1295 [Dehalococcoides ethenogenes 195]
  misc_feature (69)..(416): NCBI GI: 270308466 Blast Desc: DhcVS_1079 [Dehalococcoides sp. VS] gi|270154358|gb|ACZ62196.1| DhcVS_1079 [Dehalococcoides sp. VS]
  misc_feature (69)..(416): NCBI GI: 147669747 Blast Desc: dienelactone hydrolase-like protein [Dehalococcoides sp. BAV1] gi|146270695|gb|ABQ17687.1| dienelactone hydrolase-like protein [Dehalococcoides sp. BAV1]
  misc_feature (69)..(416): NCBI GI: 269920764 Blast Desc: dienelactone hydrolase-like protein [Dehalococcoides sp. GT] gi|269200717|gb|EEZ73345.1| dienelactone hydrolase-like protein [Dehalococcoides sp. GT]
  misc_feature (69)..(416): NCBI GI: 73748980 Blast Desc: cbdb_A1235 [Dehalococcoides sp. CBDB1] gi|73660696|emb|CAI83303.1| [Dehalococcoides sp. CBDB1]
  misc_feature (107)..(407): NCBI GI: 223935249 Blast Desc: Platelet-activating factor acetylhydrolase plasma/intracellular isoform II [bacterium Ellin514] gi|223896133|gb|EEF62576.1| Platelet-activating factor isoform II
  misc_feature (43)..(416): NCBI GI: 158520804 Blast Desc: platelet-activating factor acetylhydrolase plasma/intracellular isoform II [Desulfococcus oleovorans Hxd3] gi|158509630|gb|ABW66597.1| Platelet-activating factor isoform II
  misc_feature (38)..(403): NCBI GI: 220929640 Blast Desc: Platelet-activating factor acetylhydrolase plasma/intracellular isoform II [Clostridium cellulolyticum H10] gi|219999968|gb|ACL76569.1| Platelet-activating factor isoform II
  misc_feature (38)..(410): NCBI GI: 261406593 Blast Desc: Platelet-activating factor acetylhydrolase plasma/intracellular isoform II [Geobacillus sp. Y412MC10] gi|261283056|gb|ACX65027.1| Platelet-activating factor isoform II
  misc_feature (51)..(356): NCBI GI: 149920179 Blast Desc: dienelactone hydrolase-like protein [Plesiocystis pacifica SIR-1] gi|149818945|gb|EDM78384.1| dienelactone hydrolase-like protein [Plesiocystis pacifica SIR-1]
  misc_feature: Useful for introducing or modulating the production of volatile compounds
MRAFVSAAVLLALSLGHSVLGQTCPQADLSFGLGADDLAPVDNVATAETTGPYSVGITFQNYCSGGRNLTASVWYPATPSSGSMPYVSSGGIVGNAYKDAPLDASGGPYPLIVFSSGLGAVHDAYYFYVQNLVSHGYIVTSAQHLDARHASITSNVSLLLIAVADAELGNTNDAVITFYTDWFRSTQYAFTYRPQEIEFNLNQTLALGEDSSSIFYGNIDSNNIGMTGHSLGGFMTNVIGGGAAIYCDYVMLPGESNPNNPLLASVSPCAFDEVKSLSSPFALHDSRIKAIIPLAAPSFIAKDQIARSAAQIKVPTMVLTGDNFTSETTEWVQKAVYNNAQGPAYWVQIDGADHYMVADAYGLNPDVPFKGSEDSENFLDKAAVYMTYSAAFFNYYIKGNTSALSTLHTKSSLFVEDLAYRND

SEQ ID NO: 26172 - DNA, 2416 bp, Muscodor strobelii
  misc_feature: SGI EST ID NO. CUFF.61669.0
  misc_feature: Variant of the nucleotide sequence at SEQ ID NO 26170
caagcctaaccctgaccaagactcccaactgagagcaatatctggttctactcggactgctccgtattgatttgcaaattcgcacgacgcaagctaaacatctgtgccatgagcatcatggaattcgaaattttcatgcaatgcttcatggaggtcatgtcttcacgttgcgtccatggtcattccgccaaggatcgacaacagggaatgaaaatgacagacagtcatggacatcatcacgataggtccagccgcagtatcctactctaccctgttatgtgtttgatctaagacattgaaataagttcgacgaatgagttccgctggggatcccatggtcgtctgttcccgaatcaactccaaacctaccccagatcttagacacccatcggtgatccccacgtactaccccacgatctcgcgtcatgcaccccaggcaacgctcaagactagttgcatttcatcatgaggtatacctctctagtactgagtatagtgctgacagagccaggaactactaggcgaaggacatggacaaggactttcaagttgaagggcccgacgcttccgtcttgcccctgcagctgctaggatgcatgcttccacttccggcgttgatcatgccctccttcagcgatgctcggaatatctataaagtttgactctattgcatcaccgtaccaagaaattatgtcttctaacatcgatataacaactataagtgcatctagacatcgtcaaatattgagctgcggtagcttcgggtcggtgaccactagctctcaacgattgaaggctcgcattcctgcggttcagacagcacaatgagagcgtttgtttctgcggcggtcctgttagctctgtcccttggccactctgtcttaggacaaacatgtcctcaggcagatcttagcttcgggctcggagctgacgacttagcaccggttgataatgttgcaaccgccgaaaccaccggtccctatagcgtaggaatcactttccaaaactactgctctggaggccgcaatcttacagcaagcgtgtggtatccggcgactccctcatctgggtccatgccatacgtctcatctggcggcatcgttggcaacgcatacaaagatgcgccactcgatgcctcgggaggcccatatccgcttatcgtcttctccagtggcttgggtgcggtccacgacgcatactacttctatgtacagaatcttgtcagtcacggatacatcgtgaccagcgcccagcacttggatgccagacacgctagtataacgtcaaacgttagccttctgcttatcgcagttgcagacgccgagctcggcaataccaacgatgctgtgatcaccttctatacagactggttccgatctacacaatatgctttcacatatcgaccgcaggagattgagttcaatctcaaccaaacccttgccctgggcgaagattcgtcgtcgatattctatggaaatatcgacagtaacaacattggtatgactggtcactctcttggaggcttcatgaccaatgttatcgggggtggagcagctatctactgcgattatgtgatgctaccgggtgaaagcaacccgaacaacccgttgctcgcatctgtcagcccatgcgcattcgatgaggttaagtcactctcaagcccgttcgctctacacgacagtcgtatcaaggctattatccccttagcagcgccaagtttcatcgcgaaagatcaaattgcacgatctgcggctcagattaaggtcccaacgatggtcttgacaggagacaactttacatcagagacgacagagtgggtacagaaggccgtatacaacaatgctcaaggaccagcatactgggttcagatcgatggtgctgatcactacatggtagcagacgcctatgggctgaatccagatgtcccatttaagggtagcgaagacagcgagaacttcttagataaggccgcagtgtacatgacatactccgcagcatttttcaactactatatcaaagggaacacgtcagcgctgagtaccttacacacgaaatcgtcgttgttcgtcgaagacttggcgtatagaaacgattgagctcggatgggaaatgaatgaaaacttacctcataatcaatcagagaatctcgttctctattattatagtgatatggcgctgctgtaataaccggtccttggaaaatggaatcgtgacgaaacgtcatgagaagtgtgacgacacctacctgcccattgctaagctcgtgcggcaaaagcaagtgcgtgtgcgagtcccagagatgaagatcgatcgattagagtcgtgtgcgaagtcatcggacagatacttctgcttaatcaataagcttcatagcttgtatttcacaaaagagggaagccggcactatgagctgttg

SEQ ID NO: 26173 - DNA, 1107 bp, Muscodor strobelii
  misc_feature: SGI cDNA ID NO. 568944
  misc_feature: Elevated expression when VOC is produced
  misc_feature: Encodes the peptide sequence at SEQ ID NO 26174
atggctactcaccttgcggccatggccgttgccaagggccagcccttcgaggttcagagtcgtcccactccgaaaccaggtccgggcgagctccttgttgcggtgaaatccgttgcgctgaacccagtcgacacatacatgcatggcatgggtcttttcatacccaaatatcctacgtcggtaggatttgatgtcgcagggttggtccttgaggtcggtgataacgtgccaactggcgatagcgatgacgatggcgtggtcttccggccaggtgtcactcgtgtcgccgcctacgcagccacgctctggaagggttgtgaccctgactatggtgctttccaggagcgtgtcatcgttccctggcagcttgccatacctctccccagcgatagcatttcgtggagtgaggcggcgaccttaccaatggccgtcgaagtcggcttgaatgcctgggatacgcttgggatcctgcgtggacaggagaatccagctacagcgaagaaagaagcccttctcatttggggcgcatcttccagcgttggttctatgggcgtacagagtgctcgactacttcacgaagacccgaaatctgcctacgctgctgtgtatgccaccgctggagcagcaaaccatgattacgtgcaatcgctaggcgcaacccgtgttttcgaccacaaggatccgcaggtagtagacgcaattgtgtcggccgctaaggaggatggcctcgtgataagacactgctattatgccgcaggaaaattagctccatgtcaggcggtattgagtgccttcttgggagccgaaggcgaagagaatactaaggaggccaagatcgccgcggcgccatatgtatcaccggatgctgataaggtagatggtgtcgaggtcatctcgttgctgccgtcaaatgatgaggcagagcgattgaagcagtttcggtactggttcggaacctgggcgcgagagaaccttgcgaggggtattgtcaagcctagcccagagcctacagtcgtaggaaaaggcctagaggcaattatatctggcatcgacaagctctcgaaaggagtcagctgtaccaaattggtggtggaagtcgacgaatga

SEQ ID NO: 26174 - protein, 368 aa, Muscodor strobelii
  misc_feature: SGI Peptide ID NO. 568944
  misc_feature (28)..(127): Pfam Id: PF08240 Pfam Desc: Alcohol dehydrogenase GroES-like domain
  misc_feature (28)..(80): Pfam Id: PF08240 Pfam Desc: Alcohol dehydrogenase GroES-like domain
  misc_feature (167)..(242): Pfam Id: PF00107 Pfam Desc: Zinc-binding dehydrogenase
  misc_feature (1)..(368): NCBI GI: 119497453 Blast Desc: NFIA_022990 [Neosartorya fischeri NRRL 181] gi|119413647|gb|EAW23588.1| NFIA_022990 [Neosartorya fischeri NRRL 181]
  misc_feature (1)..(368): NCBI GI: 256723494 Blast Desc: NECHADRAFT_42043 [Nectria haematococca mpVI 77-13-4]
  misc_feature (1)..(368): NCBI GI: 255955527 Blast Desc: Pc21g15040 [Penicillium chrysogenum Wisconsin 54-1255] gi|211590227|emb|CAP96401.1| Pc21g15040 [Penicillium chrysogenum Wisconsin 54-1255]
  misc_feature (1)..(368): NCBI GI: 169775883 Blast Desc: [Aspergillus oryzae RIB40] gi|83771143|dbj|BAE61275.1| protein product [Aspergillus oryzae]
  misc_feature (1)..(368): NCBI GI: 238502537 Blast Desc: alcohol dehydrogenase, [Aspergillus flavus NRRL3357] gi|220691312|gb|EED47660.1| alcohol dehydrogenase, [Aspergillus flavus NRRL3357]
  misc_feature (1)..(357): NCBI GI: 115402001 Blast Desc: delta-aminolevulinic acid dehydratase [Aspergillus terreus NIH2624] gi|114188923|gb|EAU30623.1| delta-aminolevulinic acid dehydratase [Aspergillus terreus NIH2624]
  misc_feature (1)..(358): NCBI GI: 46139269 Blast Desc: FG11149.1 [Gibberella zeae PH-1]
  misc_feature (1)..(368): NCBI GI: 145250575 Blast Desc: An15g02630 [Aspergillus niger] gi|134082322|emb|CAL00417.1| protein product [Aspergillus niger]
  misc_feature (3)..(359): NCBI GI: 67527138 Blast Desc: AN3995.2 [Aspergillus nidulans FGSC A4] gi|40740276|gb|EAA59466.1| AN3995.2 [Aspergillus nidulans FGSC A4] gi|259481424|tpe|CBF74928.1| TPA: conserved [Aspergillus FGSC
  misc_feature (1)..(366): NCBI GI: 156054568 Blast Desc: SS1G_06132 [Sclerotinia sclerotiorum 1980] gi|154703912|gb|EDO03651.1| SS1G_06132 [Sclerotinia sclerotiorum 1980]
  misc_feature: Useful for introducing or modulating the production of volatile compounds
MATHLAAMAVAKGQPFEVQSRPTPKPGPGELLVAVKSVALNPVDTYMHGMGLFIPKYPTSVGFDVAGLVLEVGDNVPTGDSDDDGVVFRPGVTRVAAYAATLWKGCDPDYGAFQERVIVPWQLAIPLPSDSISWSEAATLPMAVEVGLNAWDTLGILRGQENPATAKKEALLIWGASSSVGSMGVQSARLLHEDPKSAYAAVYATAGAANHDYVQSLGATRVFDHKDPQVVDAIVSAAKEDGLVIRHCYYAAGKLAPCQAVLSAFLGAEGEENTKEAKIAAAPYVSPDADKVDGVEVISLLPSNDEAERLKQFRYWFGTWARENLARGIVKPSPEPTVVGKGLEAIISGIDKLSKGVSCTKLVVEVDE

SEQ ID NO: 26175 - DNA, 1555 bp, Muscodor strobelii
  misc_feature: SGI EST ID NO. CUFF.61678.0
  misc_feature: Variant of the nucleotide sequence at SEQ ID NO 26173
ctgccataataggaaagttgtgattgtttttgcagggcccaaatttactggatcggggaagttatacagcggcaaaacagtgcccattggacatgccagtctgaactaagcccaatcggggatgttagagcctagaaatagtcaaaaatagtcagaatccaatgccctgggcctattattcagcgacgaatcgacctgaaagccaaccgttcgtaaaagagcaagaccggatcagatataacaaccgatgctttcaaataacgagcaggtcttattcaaatagcaaccatgattattgtataagagactggctttttgccagaatgcgaccgtgggtacttgatgctggtccacgagacaagcgttagaaggccgctcgtgagaaacatccacctcgtcacttcacgtatcgttaatcagttactccagaatggctactcaccttgcggccatggccgttgccaagggccagcccttcgaggttcagagtcgtcccactccgaaaccaggtccgggcgagctccttgttgcggtgaaatccgttgcgctgaacccagtcgacacatacatgcatggcatgggtcttttcatacccaaatatcctacgtcggtaggatttgatgtcgcagggttggtccttgaggtcggtgataacgtgccaactggcgatagcgatgacgatggcgtggtcttccggccaggtgtcactcgtgtcgccgcctacgcagccacgctctggaagggttgtgaccctgactatggtgctttccaggagcgtgtcatcgttccctggcagcttgccatacctctccccagcgatagcatttcgtggagtgaggcggcgaccttaccaatggccgtcgaagtcggcttgaatgcctgggatacgcttgggatcctgcgtggacaggagaatccagctacagcgaagaaagaagcccttctcatttggggcgcatcttccagcgttggttctatgggcgtacagagtgctcgactacttcacgaagacccgaaatctgcctacgctgctgtgtatgccaccgctggagcagcaaaccatgattacgtgcaatcgctaggcgcaacccgtgttttcgaccacaaggatccgcaggtagtagacgcaattgtgtcggccgctaaggaggatggcctcgtgataagacactgctattatgccgcaggaaaattagctccatgtcaggcggtattgagtgccttcttgggagccgaaggcgaagagaatactaaggaggccaagatcgccgcggcgccatatgtatcaccggatgctgataaggtagatggtgtcgaggtcatctcgttgctgccgtcaaatgatgaggcagagcgattgaagcagtttcggtactggttcggaacctgggcgcgagagaaccttgcgaggggtattgtcaagcctagcccagagcctacagtcgtaggaaaaggcctagaggcaattatatctggcatcgacaagctctcgaaaggagtcagctgtaccaaattggtggtggaagtcgacgaatgaacgagggtttaaatggtt

SEQ ID NO: 26176 - DNA, 1467 bp, Muscodor strobelii
  misc_feature: SGI cDNA ID NO. 568945
  misc_feature: Encodes the peptide sequence at SEQ ID NO 26177
atgatcttcccagatggtatctcgcgccttagcggcgccagttcaactctcttaattctagctaccctcccagttggcattatcgtctcgttctgggcatacaactattggcgagtgttcaaccttaaacgccagcgccttggagttcccgtcatcaatctcaaggatggcgattacgaagcggcggcaaaggaatacttcacagacgccgaagccttgttgaaacggggacacaaagactacaaacatggcatataccagcgtatgattggtgattacaagttcacaaggctaggagataccttgggatttcatactgtattgaaagatttgacgcaaaagttttggggtatgctgccagaacttgaagaagagatcagctatgcgatgagaacagagttgccagactgcaaagaatggaccgccgtaaccattcaacccaagatactacgcattgttgctcttgtcaccggccgcgtatttgtcggctctgagctcaatcgcaatgaagagtggattgccacatcatgcggcttcatgaaggatatatacgcagcaggtgcaggcgtcttcagctacagtcatctcatgcgacccttcgcggcgagatttttggtacctgccgttaaacgtgtttgggcacacgaggccacagggcagcgtctgctcattcccataatgaagaaacgcaagaggagagagttgacggatcctaattatcagaagccgaatgattggatgcagtggctcatggacaataatgacaaggaagagaacccacacacgctcgaagaacttgtccatgttcacttgctgttgtgcttcgcggcgctgcatacatctacgatggccgtaacacatttactgtttgatcttgctgctcgacaagaatatatcgaacctcttcgagaggagcagatcgctgtagctcgagactttgacggtgaacactcaaagaactcgtacctcaagatggtaaagatggacagctttgtaaaggaatcgcagcggcatagccctcctagcatgttgacatacgctcgtctagtcatgaaggaattcacacttagcaatgggctcagatttaagcctggcgattatcttgtcatccccgccggacccatatcaatggacgatgagagttgggaggacgcagaggagttccgcggcttccgtttcgctgagttgcgaggaaagacgaaggaagattctcacaagtaccaatatgccactgttgcaccaaacgccctgcacttcggtcacggtcgcctggcctgcccaggcagattcttcgctggttatgagtttaaagcaatcaccgcgcgcttcattgacaacttcgacatcaaattggttgatgagaaagcaggtagacccaagaatacgacggcgggagctgcggtcttactagatgggtctttgcaactcttgtttaagaagagaaaggcggttcttacggaaatttga

SEQ ID NO: 26177 - protein, 488 aa, Muscodor strobelii
  misc_feature: SGI Peptide ID NO. 568945
  misc_feature (23)..(478): Pfam Id: PF00067 Pfam Desc: Cytochrome P450
  misc_feature (227)..(478): Pfam Id: PF00067 Pfam Desc: Cytochrome P450
  misc_feature (1)..(483): NCBI GI: 238839259 Blast Desc: cytochrome P450 monooxygenase [Microsporum canis CBS 113480]
  misc_feature (17)..(481): NCBI GI: 116205667 Blast Desc: CHGG_10717 [Chaetomium globosum CBS 148.51] gi|88176845|gb|EAQ84313.1| CHGG_10717 [Chaetomium globosum CBS 148.51]
  misc_feature (87)..(481): NCBI GI: 212539424 Blast Desc: cytochrome P450, [Penicillium marneffei ATCC 18224] gi|210067166|gb|EEA21258.1| cytochrome P450, [Penicillium marneffei ATCC 18224]
  misc_feature (88)..(481): NCBI GI: 242804557 Blast Desc: cytochrome P450, [Talaromyces stipitatus ATCC 10500] gi|218717744|gb|EED17165.1| cytochrome P450, [Talaromyces stipitatus ATCC 10500]
  misc_feature (49)..(482): NCBI GI: 212542745 Blast Desc: cytochrome P450, [Penicillium marneffei ATCC 18224] gi|210066434|gb|EEA20527.1| cytochrome P450, [Penicillium marneffei ATCC 18224]
  misc_feature (86)..(484): NCBI GI: 119498929 Blast Desc: cytochrome P450 monooxygenase SirB-like, [Neosartorya fischeri NRRL 181] gi|119414386|gb|EAW24325.1| cytochrome P450 monooxygenase SirB-like, [Neosartorya fischeri NRRL 181]
  misc_feature (87)..(481): NCBI GI: 119494789 Blast Desc: cytochrome P450 monooxygenase, [Neosartorya fischeri NRRL 181] gi|119412362|gb|EAW22303.1| cytochrome P450 monooxygenase, [Neosartorya fischeri NRRL 181]
  misc_feature (66)..(481): NCBI GI: 238839986 Blast Desc: phoma betae P450 monooxygenase No.2 [Microsporum canis CBS 113480]
  misc_feature (88)..(481): NCBI GI: 238845677 Blast Desc: GliF [Microsporum canis CBS 113480]
  misc_feature (87)..(481): NCBI GI: 67522282 Blast Desc: AN1598.2 [Aspergillus nidulans FGSC A4] gi|40745149|gb|EAA64305.1| AN1598.2 [Aspergillus nidulans FGSC A4]
  misc_feature (90)..(481): SWISSPROT Homolog: EC 1.14.13.78 Ent-kaurene oxidase
MIFPDGISRLSGASSTLLILATLPVGIIVSFWAYNYWRVFNLKRQRLGVPVINLKDGDYEAAAKEYFTDAEALLKRGHKDYKHGIYQRMIGDYKFTRLGDTLGFHTVLKDLTQKFWGMLPELEEEISYAMRTELPDCKEWTAVTIQPKILRIVALVTGRVFVGSELNRNEEWIATSCGFMKDIYAAGAGVFSYSHLMRPFAARFLVPAVKRVWAHEATGQRLLIPIMKKRKRRELTDPNYQKPNDWMQWLMDNNDKEENPHTLEELVHVHLLLCFAALHTSTMAVTHLLFDLAARQEYIEPLREEQIAVARDFDGEHSKNSYLKMVKMDSFVKESQRHSPPSMLTYARLVMKEFTLSNGLRFKPGDYLVIPAGPISMDDESWEDAEEFRGFRFAELRGKTKEDSHKYQYATVAPNALHFGHGRLACPGRFFAGYEFKAITARFIDNFDIKLVDEKAGRPKNTTAGAAVLLDGSLQLLFKKRKAVLTEI

SEQ ID NO: 26178 - DNA, 490 bp, Muscodor strobelii
  misc_feature: SGI EST ID NO. CUFF.61687.0
  misc_feature: Variant of the nucleotide sequence at SEQ ID NO 26176
gctttgtaaaggaatcgcagcggcatagccctcctagcatgttgacatacgctcgtctagtcatgaaggaattcacacttagcaatgggctcagatttaagcctggcgattatcttgtcatccccgccggacccatatcaatggacgatgagagttgggaggacgcagaggagttccgcggcttccgtttcgctgagttgcgaggaaagacgaaggaagattctcacaagtaccaatatgccactgttgcaccaaacgccctgcacttcggtcacggtcgcctggcctgcccaggcagattcttcgctggttatgagtttaaagcaatcaccgcgcgcttcattgacaacttcgacatcaaattggttgatgagaaagcaggtagacccaagaatacgacggcgggagctgcggtcttactagatgggtctttgcaactcttgtttaagaagagaaaggcggttcttacggaaatttgagatgttgcgag

SEQ ID NO: 26179 - DNA, 1524 bp, Muscodor strobelii
  misc_feature: SGI cDNA ID NO. 568946
  misc_feature: Encodes the peptide sequence at SEQ ID NO 26180
atgttgtccacgctcgctctcgttggtgtgcttgctagtttattgtatgtggtagggctggtcgtctaccgtttgtacttccatcctctagcatctttccctggaccgaaatttgcagctgcgactgtatggtatgaattcttttacgatggcgtgcgaagaggccaatacaccttcaagattcaggagatgcacgagaaatatggtccaatagtgcgcatatcgcccgaggaattgcattgcaatgaccccgcgttcatcgacacgctttatgcgggcggctcagttcgtcgcgataaattcgaatattttgccagtcagtttggcattcctgaaagtgttttcggaaccgtgcaccatgatatgcatcggttgcgtcgaggggcaatgaaccgcttcttctccaaggcgtcggtcacaaagcttgagcccactatacacgacaaagttgacaagctctgtcgccagctatcaacacacattggtagtaaagagccaattcagcttaacatggcttttagttgctttacaaccgatgtagtcacgacctatgcattcgccaaatgctacgacttcctcgatgacccatcctttgcaacaaatttccatgctccgattgtcgcgggaacagatcttggcccgtacatcaagcagtttccgtttattttcccactaatgcaatcgttgcctgactcttgggtgtctgccatgaacccccagatgggcatatatctacagtttcagaaggatgtaaaagctcagatccgcgagacacaacggcagcgagacatcggcaaggctatggcaatagagcaaaagctacacgcaacgatattccacgaactccttgaaagcgacttaccggagagagaaaagacagctgaacgtctttggcaagaaggccaaatcatcatcggcgctggcacagagacaacagcatggactctatcggttattttgttctacatcctgcacaatagacagatctaccaaaagattatgaaagagctcgagttcgccattccggacgctacatcacggccggctcttaaggatattgaacaattgccctttttgataagccttcgtctctcgtatggcgttagcactcgccttcaacgcatatcgcctgatagtccgatggtatataagccctcaagtggaccagaagtcgtgatcccgcaaggtactcctgttggtatgacatctgtgctcgttcaccataacccggagcttttccctcgttcgcaagaattcgatcccagccgatggcttgacgccgatggcaacagagatcggtcactggaaaaatacatactatcgttctctcgaggaagccgacagtgcattggtattaatcttgcatatgcggagctgttcatggtcacggcgttgctgctacgtcgcttaggaccgcgtcttaatctgtacaagacgggattagaagacgttgagatcttgcacgactgctttgtaccactgcctaggttagatacggagggtatccgggtgactttgagttag

SEQ ID NO: 26180 - protein, 507 aa, Muscodor strobelii
  misc_feature: SGI Peptide ID NO. 568946
  misc_feature (34)..(502): Pfam Id: PF00067 Pfam Desc: Cytochrome P450
  misc_feature (123)..(469): Pfam Id: PF00067 Pfam Desc: Cytochrome P450
  misc_feature (11)..(504): NCBI GI: 259484233 Blast Desc: TPA: cytochrome P450, (Eurofung) [Aspergillus nidulans FGSC A4]
  misc_feature (20)..(504): NCBI GI: 67902644 Blast Desc: AN8309.2 [Aspergillus nidulans FGSC A4] gi|40747776|gb|EAA66932.1| AN8309.2 [Aspergillus nidulans FGSC A4]
  misc_feature (19)..(499): NCBI GI: 119178512 Blast Desc: CIMG_08088 [Coccidioides immitis RS]
  misc_feature (18)..(507): NCBI GI: 169782650 Blast Desc: [Aspergillus oryzae RIB40] gi|83774531|dbj|BAE64654.1| protein product [Aspergillus oryzae]
  misc_feature (2)..(499): NCBI GI: 240104883 Blast Desc: Cytochrome P450 family protein [Coccidioides posadasii C735 delta SOWgp]
  misc_feature (7)..(504): NCBI GI: 258572987 Blast Desc: conserved [Uncinocarpus reesii 1704] gi|237900941|gb|EEP75342.1| conserved [Uncinocarpus reesii 1704]
  misc_feature (10)..(507): NCBI GI: 169765436 Blast Desc: [Aspergillus oryzae RIB40] gi|83765044|dbj|BAE55187.1| protein product [Aspergillus oryzae]
  misc_feature (7)..(504): NCBI GI: 119191412 Blast Desc: CIMG_00083 [Coccidioides immitis RS]
  misc_feature (7)..(504): NCBI GI: 240106487 Blast Desc: Cytochrome P450 family protein [Coccidioides posadasii C735 delta SOWgp]
  misc_feature (11)..(506): NCBI GI: 259487140 Blast Desc: TPA: cytochrome P450, (Eurofung) [Aspergillus nidulans FGSC A4]
  misc_feature (53)..(459): SWISSPROT Homolog: EC 1.14.14.1 Unspecific monooxygenase
MLSTLALVGVLASLLYVVGLVVYRLYFHPLASFPGPKFAAATVWYEFFYDGVRRGQYTFKIQEMHEKYGPIVRISPEELHCNDPAFIDTLYAGGSVRRDKFEYFASQFGIPESVFGTVHHDMHRLRRGAMNRFFSKASVTKLEPTIHDKVDKLCRQLSTHIGSKEPIQLNMAFSCFTTDVVTTYAFAKCYDFLDDPSFATNFHAPIVAGTDLGPYIKQFPFIFPLMQSLPDSWVSAMNPQMGIYLQFQKDVKAQIRETQRQRDIGKAMAIEQKLHATIFHELLESDLPEREKTAERLWQEGQIIIGAGTETTAWTLSVILFYILHNRQIYQKIMKELEFAIPDATSRPALKDIEQLPFLISLRLSYGVSTRLQRISPDSPMVYKPSSGPEVVIPQGTPVGMTSVLVHHNPELFPRSQEFDPSRWLDADGNRDRSLEKYILSFSRGSRQCIGINLAYAELFMVTALLLRRLGPRLNLYKTGLEDVEILHDCFVPLPRLDTEGIRVTLS

SEQ ID NO: 26181 - DNA, 526 bp, Muscodor strobelii
  misc_feature: SGI EST ID NO. CUFF.61691.0
  misc_feature: Variant of the nucleotide sequence at SEQ ID NO 26179
gaacaattgccctttttgataagtactcctctccattacttgcacactcgaaactgacgtctcttcacagcgcatgtgtatccgaaggccttcgtctctcgtatggcgttagcactcgccttcaacgcatatcgcctgatagtccgatggtatataagccctcaagtggaccagaagtcgtgatcccgcaaggtactcctgttggtatgacatctgtgctcgttcaccataacccggagcttttccctcgttcgcaagaattcgatcccagccgatggcttgacgccgatggcaacagagatcggtcactggaaaaatacatactatcgttctctcgaggaagccgacagtgcattggtattaatcttgcatatgcggagctgttcatggtcacggcgttgctgctacgtcgcttaggaccgcgtcttaatctgtacaagacgggattagaagacgttgagatcttgcacgactgctttgtaccactgcctaggttagatacggagggtatccgggtgactttgag

SEQ ID NO: 26182 - DNA, 1473 bp, Muscodor strobelii
  misc_feature: SGI cDNA ID NO. 568947
  misc_feature: Encodes the peptide sequence at SEQ ID NO 26183
atgttgtccacgctcgctctcgttggtgtgcttgctagtttattgtatgtggtagggctggtcgtctaccgtttgtacttccatcctctagcatctttccctggaccgaaatttgcagctgcgactgtatggtatgaattcttttacgatggcgtgcgaagaggccaatacaccttcaagattcaggagatgcacgagaaatatggtccaatagtgcgcatatcgcccgaggaattgcattgcaatgaccccgcgttcatcgacacgctttatgcgggcggctcagttcgtcgcgataaattcgaatattttgccagtcagtttggcattcctgaaagtgttttcggaaccgtgcaccatgatatgcatcggttgcgtcgaggggcaatgaaccgcttcttctccaaggcgtcggtcacaaagcttgagcccactatacacgacaaagttgacaagctctgtcgccagctatcaacacacattggtagtaaagagccaattcagcttaacatggcttttagttgctttacaaccgatgtagtcacgacctatgcattcgccaaatgctacgacttcctcgatgacccatcctttgcaacaaatttccatgctccgattgtcgcgggaacagatcttggcccgtacatcaagcagtttccgtttattttcccactaatgcaatcgttgcctgactcttgggtgtctgccatgaacccccagatgggcatatatctacagtttcagaaggatgtaaaagctcagatccgcgagacacaacggcagcgagacatcggcaaggctatggcaatagagcaaaagctacacgcaacgatattccacgaactccttgaaagcgacttaccggagagagaaaagacagctgaacgtctttggcaagaaggccaaatcatcatcggcgctggcacagagacaacagcatggactctatcggttattttgttctacatcctgcacaatagacagatctaccaaaagattatgaaagagctcgacgcatgtgtatccgaaggccttcgtctctcgtatggcgttagcactcgccttcaacgcatatcgcctgatagtccgatggtatataagccctcaagtggaccagaagtcgtgatcccgcaaggtactcctgttggtatgacatctgtgctcgttcaccataacccggagcttttccctcgttcgcaagaattcgatcccagccgatggcttgacgccgatggcaacagagatcggtcactggaaaaatacatactatcgttctctcgaggaagccgacagtgcattggtattaatcttgcatatgcggagctgttcatggtcacggcgttgctgctacgtcgcttaggaccgcgtcttaatctgtacaagacgggattagaagacgttgagatcttgcacgactgctttgtaccactgcctaggttagatacggagggtatccgggtgactttgagttag

SEQ ID NO: 26183 - protein, 490 aa, Muscodor strobelii
  misc_feature: SGI Peptide ID NO. 568947
  misc_feature (34)..(485): Pfam Id: PF00067 Pfam Desc: Cytochrome P450
  misc_feature (123)..(452): Pfam Id: PF00067 Pfam Desc: Cytochrome P450
  misc_feature (11)..(487): NCBI GI: 259484233 Blast Desc: TPA: cytochrome P450, (Eurofung) [Aspergillus nidulans FGSC A4]
  misc_feature (20)..(487): NCBI GI: 67902644 Blast Desc: AN8309.2 [Aspergillus nidulans FGSC A4] gi|40747776|gb|EAA66932.1| AN8309.2 [Aspergillus nidulans FGSC A4]
  misc_feature (19)..(482): NCBI GI: 240104883 Blast Desc: Cytochrome P450 family protein [Coccidioides posadasii C735 delta SOWgp]
  misc_feature (19)..(482): NCBI GI: 119178512 Blast Desc: CIMG_08088 [Coccidioides immitis RS]
  misc_feature (18)..(490): NCBI GI: 169782650 Blast Desc: [Aspergillus oryzae RIB40] gi|83774531|dbj|BAE64654.1| protein product [Aspergillus oryzae]
  misc_feature (7)..(487): NCBI GI: 258572987 Blast Desc: conserved [Uncinocarpus reesii 1704] gi|237900941|gb|EEP75342.1| conserved [Uncinocarpus reesii 1704]
  misc_feature (10)..(490): NCBI GI: 169765436 Blast Desc: [Aspergillus oryzae RIB40] gi|83765044|dbj|BAE55187.1| protein product [Aspergillus oryzae]
  misc_feature (7)..(487): NCBI GI: 119191412 Blast Desc: CIMG_00083 [Coccidioides immitis RS]
  misc_feature (7)..(487): NCBI GI: 240106487 Blast Desc: Cytochrome P450 family protein [Coccidioides posadasii C735 delta SOWgp]
  misc_feature (11)..(489): NCBI GI: 259487140 Blast Desc: TPA: cytochrome P450, (Eurofung) [Aspergillus nidulans FGSC A4]
  misc_feature (53)..(442): SWISSPROT Homolog: EC 1.14.14.1 Unspecific monooxygenase
MLSTLALVGVLASLLYVVGLVVYRLYFHPLASFPGPKFAAATVWYEFFYDGVRRGQYTFKIQEMHEKYGPIVRISPEELHCNDPAFIDTLYAGGSVRRDKFEYFASQFGIPESVFGTVHHDMHRLRRGAMNRFFSKASVTKLEPTIHDKVDKLCRQLSTHIGSKEPIQLNMAFSCFTTDVVTTYAFAKCYDFLDDPSFATNFHAPIVAGTDLGPYIKQFPFIFPLMQSLPDSWVSAMNPQMGIYLQFQKDVKAQIRETQRQRDIGKAMAIEQKLHATIFHELLESDLPEREKTAERLWQEGQIIIGAGTETTAWTLSVILFYILHNRQIYQKIMKELDACVSEGLRLSYGVSTRLQRISPDSPMVYKPSSGPEVVIPQGTPVGMTSVLVHHNPELFPRSQEFDPSRWLDADGNRDRSLEKYILSFSRGSRQCIGINLAYAELFMVTALLLRRLGPRLNLYKTGLEDVEILHDCFVPLPRLDTEGIRVTLS

SEQ ID NO: 26184 - DNA, 526 bp, Muscodor strobelii; identical to SEQ ID NO: 26181
  misc_feature: SGI EST ID NO. CUFF.61691.0
  misc_feature: Variant of the nucleotide sequence at SEQ ID NO 26182

SEQ ID NO: 26185 - DNA, 3036 bp, Muscodor strobelii
  misc_feature: SGI cDNA ID NO. 568948
  misc_feature: Encodes the peptide sequence at SEQ ID NO 26186
atggctgttggcgcccccaacgtgctcgacgtaagcgtcgttgacctggtcgaccgctggtcatccaacactccaaatgcagccgcagccgaatggaaaggccagacacttacatacggccaacttcgtcatgcatcgcttcacatcagtgaggcgctactgtctgcgggtgttaagcctggcgacatgatcccgcttctcacagaaatgtcgcttgagatgatcccagcgattgttggcatcttgagagtaggagcctgctacgtgccgatggatgtggcagcttggagcaaggatagaattatctccgcattagagagtgtcgcatcgtctgtcgtcgttcttacgtctgatactctggaactgtcgttaccgaccacagtcaaagttcagcccgagtggctaacgttgccattgaaggaggagaagcaactagtccccaaattgaacaccattcgtcagcagatcacaaacacacacctcgcatatgtgatcttcacatctggaactactggaaagccgaaaggagtgatggtggctcatccgtctattcgtaaccttgtgttaatgaccgaaggcgatgtgatgaaagttgtccccgcacggagagtgcttctcactttctcaatcgcattcgatggctgtgccggtattgtctggtgcacaattgcaaacggtggaacactcgtaatggcatcttcgtctgattttccagaacgagctgcgacctgccatacagtcatcttgacgccatcgatgttcgcaagcatagaaccatcttccgcctatgacagcgttgagacgatctacctgggtggggaagcaccgaatatgtcagttgtccgacagtggatcacaccgaccagagccgtgtacaattcctacggtccttccgaggccaccgttgccgtcacagtcactcgtatggatccgaacgaagagccaatactgggccatgtcatcccaggcgtgcgcattgccctagtggacgaagcactggaagagtcggatgttggcgagattatgatagcaggcccctgcttagctactggttatttaaataatccagagcttaccgcaaagaaattcattcaatggaaaggagatcgattctacaggacgggagatcttgcaaagcgaacctcacgcggtttagaatgggcgggtcgcgtcgatcgacttgtcaagaaccggggattcctagtcaacctcgaatcggaagtcgaacctgccatcatgcgattcgaacaagttcgcgtcgcaacagctttcatttggaaaacaaagctgataggttgcgtgcagcctgcgaatgtcaacattagtgagctgcgtgacttcatgagcgccaactttgatcactttgttgttcccgacgaaatcctagcaatggaccgatttccccttacggcgaatagcaaagtcgatttgaatgcccttagggctcaactcgatagtagaattgccagcattgaggaagacgaggaactgagtggggacgcagccgcttatgatctcgtgcgaacggggtttgcaaggatactactcattcctaaggcggatctcgaggagagctcatcattcttgaagctcggtggcaactcgttattggcaattaagctatcgcaatatctccagaaacacaagtaccctgtatcgatcaaggatatagtcacaggcgacagcatcggcaatattcgggacgcagctgaagcagctactaacagagagaccagcctcgatcttaccaagcctgttcctatgatcgatatgcacaaacatttgatcgcgcagtcgcaacaagatattgccaagaactgcgttgtatttcgcttgaaatacgtaggatcttctgctccttctgtcgctgagttaaagtccgcttggatgaaggtgttatcgaaccacagcatcttccaaactcgcatcaatctagagaactggactatgcaaagttcagagcaactgaatatcatctggaacgaggttacagtcagcaaatcagagtatgaggaggccataaagtcatacgaggctagtgcactcacagaccttgagagtggcgagccactgcctctggacatgccgcattgcgcgatgacatgcatctcagcattcgaaggcggggcagtgactatcgtatggcgtctacatcacattctcattgatggtttctctctagatctactgatgcaggatctgcgaagagtgcttagtggtgagcagcttttgccggcacctcgatatgaagagtttgcggccttttaccaggcatacaaggcacagaacttggagaatgtggaaagggcttggggtccaatggtcaaatctcttgcagccaacaagccattagaactcgttctccagtcacaaacaccaaagccaaagggcgtatttcgctcacacgcgatcaaatcaggtgtaaagaaaggagagctcgaggaagcagaacaaagattcggtgttacgagcgcgacgatggtccttgcggcttgggctctcgtgctgagaaaacttacaggctcaattggggtgtcaactcttatcagcatgtcgggacgcttcttaccctgggctgcggcttcgtcacttgtcggcgcaatgttctgtagggtacccctttgcacgcagttacccgaagaagaaactgttactagctggatttcagcactacatgaacagcatgaagcgctagctgagctgcagaacctgtgctcacctttacccacatcggtcctcagcgagaaggactatgctaaatacttcaatagcatggtgcaatgcttcattggtatggctccttcaatgaaggaatgggagatattggacgtgcaacctcccccggcagatctcacctggttcgtgtacgagcatgaaggcgaggtcacgacgaatcttgctgtagagccgaggcttgttgatttgaagtgggccgatgaggtgggtaagattggtgcgaaggcattcaaattgctcgttacagctggtcctgacgcgacgctgggagacctcttgaccggcctgagcacaagctga

SEQ ID NO: 26186 - protein, 1011 aa, Muscodor strobelii
  misc_feature: SGI Peptide ID NO. 568948
  misc_feature (38)..(423): Pfam Id: PF00501 Pfam Desc: AMP-binding enzyme
  misc_feature (582)..(875): Pfam Id: PF00668 Pfam Desc: Condensation domain
  misc_feature (707)..(771): Pfam Id: PF00668 Pfam Desc: Condensation domain
  misc_feature (9)..(1005): NCBI GI: 119490090 Blast Desc: nonribosomal peptide synthase, [Neosartorya fischeri NRRL 181] gi|119411121|gb|EAW21064.1| nonribosomal peptide synthase, [Neosartorya fischeri NRRL 181]
  misc_feature (8)..(1004): NCBI GI: 59876801 Blast Desc: nonribosomal peptide synthetase 11 [Cochliobolus heterostrophus]
  misc_feature (1)..(961): NCBI GI: 238839260 Blast Desc: nonribosomal peptide synthetase 11 [Microsporum canis CBS 113480]
  misc_feature (4)..(902): NCBI GI: 46403055 Blast Desc: SirP [Leptosphaeria maculans]
  misc_feature (12)..(902): NCBI GI: 242818728 Blast Desc: nonribosomal peptide synthase GliP-like, [Talaromyces stipitatus ATCC 10500] gi|218713640|gb|EED13064.1| nonribosomal peptide synthase GliP-like, [Talaromyces stipitatus ATCC 10500]
  misc_feature (1)..(902): NCBI GI: 159127346 Blast Desc: nonribosomal peptide synthase GliP2 [Aspergillus fumigatus A1163]
  misc_feature (1)..(902): NCBI GI: 146323460 Blast Desc: nonribosomal peptide synthase GliP-like [Aspergillus fumigatus Af293] gi|129558279|gb|EAL92291.2| nonribosomal peptide synthase GliP-like, [Aspergillus fumigatus Af293]
  misc_feature (1)..(902): NCBI GI: 115433823 Blast Desc: ATEG_08427 [Aspergillus terreus NIH2624] gi|114189900|gb|EAU31600.1| ATEG_08427 [Aspergillus terreus NIH2624]
  misc_feature (1)..(902): NCBI GI: 119491025 Blast Desc: nonribosomal peptide synthase GliP2 [Neosartorya fischeri NRRL 181] gi|119411333|gb|EAW21276.1| nonribosomal peptide synthase GliP2 [Neosartorya fischeri NRRL 181]
  misc_feature (10)..(878): NCBI GI: 212529362 Blast Desc: nonribosomal peptide synthase GliP-like, [Penicillium marneffei ATCC 18224] gi|210074236|gb|EEA28323.1| nonribosomal peptide synthase GliP-like, [Penicillium marneffei ATCC 18224]
  misc_feature (21)..(893): SWISSPROT Homolog: EC 5.1.1.13 Aspartate racemase
  misc_feature (21)..(893): SWISSPROT Homolog: EC 5.1.1.11 Phenylalanine racemase (ATP-hydrolyzing)
MAVGAPNVLDVSVVDLVDRWSSNTPNAAAAEWKGQTLTYGQLRHASLHISEALLSAGVKPGDMIPLLTEMSLEMIPAIVGILRVGACYVPMDVAAWSKDRIISALESVASSVVVLTSDTLELSLPTTVKVQPEWLTLPLKEEKQLVPKLNTIRQQITNTHLAYVIFTSGTTGKPKGVMVAHPSIRNLVLMTEGDVMKVVPARRVLLTFSIAFDGCAGIVWCTIANGGTLVMASSSDFPERAATCHTVILTPSMFASIEPSSAYDSVETIYLGGEAPNMSVVRQWITPTRAVYNSYGPSEATVAVTVTRMDPNEEPILGHVIPGVRIALVDEALEESDVGEIMIAGPCLATGYLNNPELTAKKFIQWKGDRFYRTGDLAKRTSRGLEWAGRVDRLVKNRGFLVNLESEVEPAIMRFEQVRVATAFIWKTKLIGCVQPANVNISELRDFMSANFDHFVVPDEILAMDRFPLTANSKVDLNALRAQLDSRIASIEEDEELSGDAAAYDLVRTGFARILLIPKADLEESSSFLKLGGNSLLAIKLSQYLQKHKYPVSIKDIVTGDSIGNIRDAAEAATNRETSLDLTKPVPMIDMHKHLIAQSQQDIAKNCVVFRLKYVGSSAPSVAELKSAWMKVLSNHSIFQTRINLENWTMQSSEQLNIIWNEVTVSKSEYEEAIKSYEASALTDLESGEPLPLDMPHCAMTCISAFEGGAVTIVWRLHHILIDGFSLDLLMQDLRRVLSGEQLLPAPRYEEFAAFYQAYKAQNLENVERAWGPMVKSLAANKPLELVLQSQTPKPKGVFRSHAIKSGVKKGELEEAEQRFGVTSATMVLAAWALVLRKLTGSIGVSTLISMSGRFLPWAAASSLVGAMFCRVPLCTQLPEEETVTSWISALHEQHEALAELQNLCSPLPTSVLSEKDYAKYFNSMVQCFIGMAPSMKEWEILDVQPPPADLTWFVYEHEGEVTTNLAVEPRLVDLKWADEVGKIGAKAFKLLVTAGPDATLGDLLTGLSTS

SEQ ID NO: 26187 - DNA, 1650 bp, Muscodor strobelii
  misc_feature: SGI cDNA ID NO. 568949
  misc_feature: Encodes the peptide sequence at SEQ ID NO 26188
atggtggtacctcgatattcccacgtgggactggtagccgcagctgcactcctcctgcacgctgctgatgctgttccggccggcaactgtcctcgaagtagtacaacaaaggcgtcgccaatagttgacctaggttattctctacatcgagcggtttcgactggagtctacgatacagtctatagcttcaacaacatccaatacgccgttgccagccgcttcgaaaaccccagctatccacctccgcaggatcgcggtcagatcttcaatggatctactcagtccttatgtcctcaggcttaccccgcgtggcagttcgctgcggtcgagttcctaagtggagttgacttgagtaatgccaccgacgaagagctattggatcccagtctcgttccagcggttgagttttcaaatgaggaatgtcttcatgtagatgttcaagtacccatgaaacatttcgacagcttctcagccgattccgccgctcctctattgcctgtagtcgtgtggattcacggtggtggctttgtacaaggcgacaaggccttggatggcaacggtacaggattgattaccagggcacttgaacttgggagcgaaggcattgtgttcgtcgcagtcaactatcgtctcggcatgtttggttggttatcgggacacgaggacatcaccgcaaatgtcggcctccaggatcaagcaacggctttacgatgggtccaagattatgctcacctcttcggtggcgatgcaaaaaggatcaccgttctcggtcagtctgcaggaggcggttcgatcctgtcgcatatggccaagtcattttctggcgaaactgaactgccctttaagcaggcgatcatccagagcccgtataccggcatcgcacccagaaatgcagctcaaaaatcactatatgctcaagttttgaagacagccaatgtaacttcattgcaggagctccagcagcttgacactcagacactccagcgcgtcaactatgaagtgattacctcttcccaatacggcgcatttaccttcggaccgacatcggttccaacgcaatttcaaatcccatcatctacgaccgagtcgtattcattcgtcgtcggcgccaactctcgcgaaggagtcttgtttggtgctcccaacgtccaaagcgaaacatcttatgttgctgcactccagcatttgatgcctgagttatctctagaggacctgacgagccagaccaacgatctttacccttcatctcaattcagcagccagcttgatcgcttgtattcgactctagccgatgtgctgattcactgcaacgttcagcaaaccttgacatcattcgcagggtcatcgtatgcttatcagtacagtgtgcccagtggagttcacgcggctgatttgcattacactttctatgatgggaatgtcgatgacttgcctcagaaaaacacgactgtcgctaaagtcttccaaggctaccttgcaaacttcattcttggcaatgctcccgactccggcgtagcaggtatagtcgacttaccaatcttcgaggatgatttggctgttgacctaaatattacgggcattgtatcggagacacctgcatggttaaatgcaactatttgcgacaagtggacgcaagctcttagtgcctga

SEQ ID NO: 26188 - protein, 549 aa, Muscodor strobelii
  misc_feature: SGI Peptide ID NO. 568949
  misc_feature (16)..(543): Pfam Id: PF00135 Pfam Desc: Carboxylesterase
  misc_feature (139)..(543): Pfam Id: PF00135 Pfam Desc: Carboxylesterase
  misc_feature (9)..(547): NCBI GI: 154294375 Blast Desc: BC1G_13960 [Botryotinia fuckeliana B05.10] gi|150844799|gb|EDN19992.1| BC1G_13960 [Botryotinia fuckeliana B05.10]
  misc_feature (35)..(547): NCBI GI: 156039433 Blast Desc: SS1G_11853 [Sclerotinia sclerotiorum 1980] gi|154697590|gb|EDN97328.1| SS1G_11853 [Sclerotinia sclerotiorum 1980]
  misc_feature (40)..(546): NCBI GI: 255946670 Blast Desc: Pc22g00570 [Penicillium chrysogenum Wisconsin 54-1255] gi|211591119|emb|CAP97345.1| Pc22g00570 [Penicillium chrysogenum Wisconsin 54-1255]
  misc_feature (31)..(543): NCBI GI: 145240591 Blast Desc: An08g08290 [Aspergillus niger] gi|134077465|emb|CAK40030.1| protein product [Aspergillus niger]
  misc_feature (40)..(547): NCBI GI: 189200859 Blast Desc: acetylcholinesterase precursor [Pyrenophora tritici-repentis Pt-1C-BFP] gi|187983865|gb|EDU49353.1| acetylcholinesterase precursor [Pyrenophora tritici-repentis
  misc_feature (41)..(503): NCBI GI: 242816445 Blast Desc: carboxylesterase, [Talaromyces stipitatus ATCC 10500] gi|218715118|gb|EED14541.1| carboxylesterase, [Talaromyces stipitatus ATCC 10500]
  misc_feature (40)..(546): NCBI GI: 119485943 Blast Desc: carboxylesterase family protein [Neosartorya fischeri NRRL 181] gi|119410470|gb|EAW20417.1| carboxylesterase family protein [Neosartorya fischeri NRRL 181]
  misc_feature (60)..(511): NCBI GI: 169773941 Blast Desc: [Aspergillus oryzae RIB40] gi|83769300|dbj|BAE59437.1| protein product [Aspergillus oryzae]
  misc_feature (40)..(545): NCBI GI: 121710936 Blast Desc: carboxylesterase family protein [Aspergillus clavatus NRRL 1] gi|119401234|gb|EAW11658.1| carboxylesterase family protein [Aspergillus clavatus NRRL 1]
  misc_feature (40)..(501): NCBI GI: 256727193 Blast Desc: NECHADRAFT_76924 [Nectria haematococca mpVI 77-13-4]
  misc_feature (73)..(547): SWISSPROT Homolog: EC 3.1.1.7 Acetylcholinesterase
MVVPRYSHVGLVAAAALLLHAADAVPAGNCPRSSTTKASPIVDLGYSLHRAVSTGVYDTVYSFNNIQYAVASRFENPSYPPPQDRGQIFNGSTQSLCPQAYPAWQFAAVEFLSGVDLSNATDEELLDPSLVPAVEFSNEECLHVDVQVPMKHFDSFSADSAAPLLPVVVWIHGGGFVQGDKALDGNGTGLITRALELGSEGIVFVAVNYRLGMFGWLSGHEDITANVGLQDQATALRWVQDYAHLFGGDAKRITVLGQSAGGGSILSHMAKSFSGETELPFKQAIIQSPYTGIAPRNAAQKSLYAQVLKTANVTSLQELQQLDTQTLQRVNYEVITSSQYGAFTFGPTSVPTQFQIPSSTTESYSFVVGANSREGVLFGAPNVQSETSYVAALQHLMPELSLEDLTSQTNDLYPSSQFSSQLDRLYSTLADVLIHCNVQQTLTSFAGSSYAYQYSVPSGVHAADLHYTFYDGNVDDLPQKNTTVAKVFQGYLANFILGNAPDSGVAGIVDLPIFEDDLAVDLNITGIVSETPAWLNATICDKWTQALSA

SEQ ID NO: 26189 - DNA, 760 bp, Muscodor strobelii
  misc_feature: SGI EST ID NO. CUFF.61718.0
  misc_feature: Variant of the nucleotide sequence at SEQ ID NO 26187
gctttgtacaaggcgacaaggccttggatggcaacggtacaggattgattaccagggcacttgaacttgggagcgaaggcattgtgttcgtcgcagtcaactatcgtctcggcatgtttggttggttatcgggacacgaggacatcaccgcaaatgtcggcctccaggatcaagcaacggctttacgatgggtccaagattatgctcacctcttcggtggcgatgcaaaaaggatcaccgttctcggtcagtctgcaggaggcggttcgatcctgtcgcatatggccaagtcattttctggcgaaactgaactgccctttaagcaggcgatcatccagagcccgtataccggcatcgcacccagaaatgcagctcaaaaatcactatatgctcaagttttgaagacagccaatgtaacttcattgcaggagctccagcagcttgacactcagacactccagcgcgtcaactatgaagtgattacctcttcccaatacggcgcatttaccttcggaccgacatcggttccaacgcaatttcaaatcccatcatctacgaccgagtcgtattcattcgtcgtcggcgccaactctcgcgaaggagtcttgtttggtgctcccaacgtccaaagcgaaacatcttatgttgctgcactccagcatttgatgcctgagttatctctagaggacctgacgagccagaccaacgatctttacccttcatctcaattcagcagccagcttgatcgcttgtattcgac

SEQ ID NO: 26190 - DNA, 1539 bp, Muscodor strobelii
  misc_feature: SGI cDNA ID NO. 568950
  misc_feature: Encodes the peptide sequence at SEQ ID NO 26191
atggatggcacaagcatacctattggagttggtggcgaggccgtcctccgtcacttcaacgcctccagtggtctgaattcagtcgctgttctaatcgcagtatttagcactatttacgtgttgtctcatatggtatacaacctctatctgcatcctctgagcaaatacccgggtcctttcttcggtcgctcgactctattgtggcgtttttataatgttcttggcggccgatggcatcgacacatcgacgagcagcacaagaaatacgggcctgtcgtgcgcgtttctcctaacgagctttctttcgccagtatagagtcatggagggacatctacggacacgctactggaggacggcagacatgcacgaagagcgaattctatgacgtctttggtggaggatttgacagcacttgcattggcagcgagcgaaatccgaaagagcatgcacgaatgcgaaaggcactatcaaatgctttcagcacgaaagcactcacagagcaggaaaccatcgtaaatgataacgttgatgcgttcgtaaagcgcttaggtacggatggcggtccttcgacatcagggctaaatatgacgaagtggttcgaaatgattgcttttgacattctgggcgagatgtcttttggcgagagctttggcagcgtagctcaaggacatccccatttctggtctgagatgtttaccgaacatctttttgctatcaccgtagttgacatgctgcgtcggtatcctctcttcgtcacattggggcgggtgcttatgccattggcaatgtcgctacgggagaagcatacgggtctcagtcgaagcaaagttgcgcggcgtttgcaaaagacagacacgagggctgacttcctatctcttctcatcaataaagttcaagccggggagatggatatggaagagctgactgcacatgcatccaccctaactgtcgctggaggagaaaccgtagcgacatttcttgcttcggcgacatattatctcctcaacacacctgatgcattggcaaaagttcagaccgaagttcgaagttcattcagctcttattccgatataaacgcaacaaaagctcagcagctaccatatttacaagctgtcgttgctgagggtttacgtatgcatcctccagggtcgcgcggattcccgagagtatcccctggaacacaaatttcaggccactacgtaccggccggagttgaagtctacaccagcgcatggactatgacgcacgacgagcaatacttccacgagccatttgtattcaagccagagagatggaccgatcctgaatgcgaggacataaaagaagcaagtcaaccgttctccctggggccgagaggctgcataggcaagaatttcgcttatctggaggttaatctcatactggccaaaatattttggacatatgacatggagctgaaaaataaagatttggactgggaagggagtgcccatgagcatgtcatgtggtccaagccagatttgatggtcacattcaagcctgcgaggcacaccgtgtag

SEQ ID NO: 26191 - protein, 512 aa, Muscodor strobelii
  misc_feature: SGI Peptide ID NO. 568950
  misc_feature (52)..(505): Pfam Id: PF00067 Pfam Desc: Cytochrome P450
  misc_feature (145)..(471): Pfam Id: PF00067 Pfam Desc: Cytochrome P450
  misc_feature (36)..(509): NCBI GI: 259485752 Blast Desc: TPA: cytochrome P450, (Eurofung) [Aspergillus nidulans FGSC A4]
  misc_feature (26)..(505): NCBI GI: 255931847 Blast Desc: Pc12g06380 [Penicillium chrysogenum Wisconsin 54-1255] gi|211582099|emb|CAP80265.1| Pc12g06380 [Penicillium chrysogenum Wisconsin 54-1255]
  misc_feature (38)..(509): NCBI GI: 121712479 Blast Desc: benzoate 4-monooxygenase cytochrome P450 [Aspergillus clavatus NRRL 1] gi|119402003|gb|EAW12425.1| benzoate 4-monooxygenase cytochrome P450 [Aspergillus clavatus NRRL 1]
  misc_feature (35)..(508): NCBI GI: 238492291 Blast Desc: cytochrome P450, [Aspergillus flavus NRRL3357] gi|220695876|gb|EED52218.1| cytochrome P450, [Aspergillus flavus NRRL3357]
  misc_feature (21)..(506): NCBI GI: 67525647 Blast Desc: AN3281.2 [Aspergillus nidulans FGSC A4] gi|40744069|gb|EAA63249.1| AN3281.2 [Aspergillus nidulans FGSC A4]
  misc_feature (28)..(503): NCBI GI: 188596513 Blast Desc: BCL4p [Botryotinia fuckeliana]
  misc_feature (18)..(506): NCBI GI: 238839258 Blast Desc: benzoate 4-monooxygenase cytochrome P450 [Microsporum canis CBS 113480]
  misc_feature (35)..(508): NCBI GI: 169782646 Blast Desc: [Aspergillus oryzae RIB40] gi|83774529|dbj|BAE64652.1| protein product [Aspergillus oryzae]
  misc_feature (38)..(507): NCBI GI: 121712467 Blast Desc: benzoate 4-monooxygenase cytochrome P450 [Aspergillus clavatus NRRL 1] gi|119401997|gb|EAW12419.1| benzoate 4-monooxygenase cytochrome P450 [Aspergillus clavatus NRRL 1]
  misc_feature (11)..(507): NCBI GI: 259485758 Blast Desc: TPA: cytochrome P450, (Eurofung) [Aspergillus nidulans FGSC A4]
  misc_feature (53)..(482): SWISSPROT Homolog: EC 1.14.13.12 Benzoate 4-monooxygenase
MDGTSIPIGVGGEAVLRHFNASSGLNSVAVLIAVFSTIYVLSHMVYNLYLHPLSKYPGPFFGRSTLLWRFYNVLGGRWHRHIDEQHKKYGPVVRVSPNELSFASIESWRDIYGHATGGRQTCTKSEFYDVFGGGFDSTCIGSERNPKEHARMRKALSNAFSTKALTEQETIVNDNVDAFVKRLGTDGGPSTSGLNMTKWFEMIAFDILGEMSFGESFGSVAQGHPHFWSEMFTEHLFAITVVDMLRRYPLFVTLGRVLMPLAMSLREKHTGLSRSKVARRLQKTDTRADFLSLLINKVQAGEMDMEELTAHASTLTVAGGETVATFLASATYYLLNTPDALAKVQTEVRSSFSSYSDINATKAQQLPYLQAVVAEGLRMHPPGSRGFPRVSPGTQISGHYVPAGVEVYTSAWTMTHDEQYFHEPFVFKPERWTDPECEDIKEASQPFSLGPRGCIGKNFAYLEVNLILAKIFWTYDMELKNKDLDWEGSAHEHVMWSKPDLMVTFKPARHTV

SEQ ID NO: 26192 - DNA, 388 bp, Muscodor strobelii
  misc_feature: SGI EST ID NO. CUFF.61730.0
  misc_feature: Variant of the nucleotide sequence at SEQ ID NO 26190
gtcttttggcgagagctttggcagcgtagctcaaggttagatgcaaaatcaatcagggattagaaataacggctgacacattcactaaccaggacatccccatttctggtctgagatgtttaccgaacatctttttgctatcaccgtagttgacatgctgcgtcggtatcctctcttcgtcacattggggcgggtgcttatgccattggcaatgtcgctacgggagaagcatacgggtctcagtcgaagcaaagttgcgcggcgtttgcaaaagacagacacgagggctgacttcctatctcttctcatcaataaagttcaagccggggagatggatatggaagagctgactgcacatgcatccaccctaactgtcgctggaggagaa

SEQ ID NO: 26193 - DNA, 1416 bp, Muscodor strobelii
  misc_feature: SGI cDNA ID NO. 568951
  misc_feature: Encodes the peptide sequence at SEQ ID NO 26194
atggccgacgcctttgcaccttacaaggtgaatgcgaacccgagggagtattccttcaacacactgcaggttcacgctggacataagcccgacacccagacccgctcacgcgcagtgcccatctatgcaactgcatcatatgtcttcgatgatgcagatcatgctcgccgagtatgcactaatgaagaggctggatatgtgtactcgcggatagcgaatccaacagtagaggttttcgagaagcgctgcgctgcactagagggcggttcagccgctgttgctacagggtccggacagggcgctgtctttcaaaccatcatcttgctcgctcaatcaggcgacaacatcatcgcttcgcgaaacctttatggcggctcatatagctgtctcaagtcattactgccgcgcttgggtattcaagtcaaatggctagatgctggagaccgaccggaaaatgttgcaagattaattgatgacaagaccaagatggtctttgttgagacaatcggcaatccccgctgtacggtgccggatctacagggcattgcagatgcagctcatgccaagggagtgccgatggtggttgacaacacatttggcgcctgtggctacttctgcagggctaaagatcacggtgccgacatcatcattcattcggccacgaaatggattggcggacatggaactacggtcggcggcgtagtagttgacgctggcacttttgattggctgtcataccccgagcgtttcccatttcttgcgaagccaaatgacgatgtaatgggcttttgctatgcgaaagcttttggcaatgccgcattcgccatggcgctgagaattgacgtagtcatggaatctggtggtgtgttgaatcccttcgcggcccagcagctccttctaggcttggaaacgctggcactgcgttgcgataagatcgctaagaattcgttgcggctcgctaaattcttggagaaccatgaaaggatagcctgggttctgtatcctggccttgaaagcaatgccgcaaatcatacacaagcgaaaacggtgcttaacaacggcttcggtggagtcctttcgattggcatcgttggtggtaatgcagcaagcaagttcgtcatcaacaacttcaaactcgtttcacatatgacgaatgttggagattccaagaccatggcaacacatccctggtcctcgacgcacgtcatcatggccgagcccgatcgcatagcggctggcatcacagaggatctcataagaataagtattggtacagagacaattgaggatatcgagaatgattttgatcaagctttacgtgcaatcccactcgagttgatgagccaagcaaaacaggtggtggaggatgctcctagtgactcaggtttcgagtcttcagagggtgaccaggtatag

SEQ ID NO: 26194 - protein, 471 aa, Muscodor strobelii
  misc_feature: SGI Peptide ID NO. 568951
  misc_feature (20)..(440): Pfam Id: PF01053 Pfam Desc: Cys/Met metabolism PLP-dependent enzyme
  misc_feature (19)..(439): NCBI GI: 255932999 Blast Desc: Pc12g11520 [Penicillium chrysogenum Wisconsin 54-1255] gi|211582589|emb|CAP80779.1| Pc12g11520 [Penicillium chrysogenum Wisconsin 54-1255]
  misc_feature (19)..(443): NCBI GI: 255931661 Blast Desc: Pc12g05420 [Penicillium chrysogenum Wisconsin 54-1255] gi|211582006|emb|CAP80169.1| Pc12g05420 [Penicillium chrysogenum Wisconsin 54-1255]
  misc_feature (17)..(439): NCBI GI: 119182555 Blast Desc: O-acetylhomoserine [Coccidioides immitis RS] gi|240109323|gb|EER27492.1| O-acetylhomoserine , [Coccidioides posadasii C735 delta SOWgp]
  misc_feature (19)..(441): NCBI GI: 116204903 Blast Desc: CHGG_10335 [Chaetomium globosum CBS 148.51] gi|88176463|gb|EAQ83931.1| CHGG_10335 [Chaetomium globosum CBS 148.51]
  misc_feature (12)..(441): NCBI GI: 145242826 Blast Desc: An09g06710 [Aspergillus niger] gi|134078543|emb|CAK40464.1| protein product [Aspergillus niger]
  misc_feature (19)..(441): NCBI GI: 261194489 Blast Desc: O-acetylhomoserine [Ajellomyces dermatitidis SLH14081] gi|239588187|gb|EEQ70830.1| O-acetylhomoserine [Ajellomyces dermatitidis SLH14081]
  misc_feature (19)..(441): NCBI GI: 226287968 Blast Desc: O-acetylhomoserine (thiol)-lyase [Paracoccidioides brasiliensis Pb18]
  misc_feature (19)..(441): NCBI GI: 225678964 Blast Desc: homocysteine synthase CysD [Paracoccidioides brasiliensis Pb03]
  misc_feature (19)..(441): NCBI GI: 226282116 Blast Desc: O-acetylhomoserine (thiol)-lyase [Paracoccidioides brasiliensis Pb01]
  misc_feature (19)..(439): NCBI GI: 258571523 Blast Desc: O-acetylhomoserine [Uncinocarpus reesii 1704] gi|237904835|gb|EEP79236.1| O-acetylhomoserine [Uncinocarpus reesii 1704]
  misc_feature (12)..(441): SWISSPROT Homolog: EC 2.5.1.49 O-acetylhomoserine aminocarboxypropyltransferase
MADAFAPYKVNANPREYSFNTLQVHAGHKPDTQTRSRAVPIYATASYVFDDADHARRVCTNEEAGYVYSRIANPTVEVFEKRCAALEGGSAAVATGSGQGAVFQTIILLAQSGDNIIASRNLYGGSYSCLKSLLPRLGIQVKWLDAGDRPENVARLIDDKTKMVFVETIGNPRCTVPDLQGIADAAHAKGVPMVVDNTFGACGYFCRAKDHGADIIIHSATKWIGGHGTTVGGVVVDAGTFDWLSYPERFPFLAKPNDDVMGFCYAKAFGNAAFAMALRIDVVMESGGVLNPFAAQQLLLGLETLALRCDKIAKNSLRLAKFLENHERIAWVLYPGLESNAANHTQAKTVLNNGFGGVLSIGIVGGNAASKFVINNFKLVSHMTNVGDSKTMATHPWSSTHVIMAEPDRIAAGITEDLIRISIGTETIEDIENDFDQALRAIPLELMSQAKQVVEDAPSDSGFESSEGDQV

SEQ ID NO: 26195 - DNA, 317 bp, Muscodor strobelii
  misc_feature: SGI EST ID NO. CUFF.61741.0
  misc_feature: Variant of the nucleotide sequence at SEQ ID NO 26193
ctaacatgcctcgttgtagtgttggagattccaagaccatggcaacacatccctggtcctcgacgcacgtcatcatggccgagcccgatcgcatagcggctggcatcacagaggatctcataagaataagtattggtacagagacaattgaggatatcgagaatgattttgatcaagctttacgtgcaatcccactcgagttgatgagccaagcaaaacaggtggtggaggatgctcctagtgactcaggtttcgagtcttcagagggtgaccaggtatagacagaaagcgatagaatagagcctgctttatggtcc

SEQ ID NO: 26196 - DNA, 1107 bp, Muscodor strobelii
  misc_feature: SGI cDNA ID NO. 568952
  misc_feature: Encodes the peptide sequence at SEQ ID NO 26197
atggccgccgctacagcaatgcctcatgcagatgcagtgattgacaagctgcaggcttcaaagatgggtgtgagccaaaaggtggtggagcagacgccaccggcaacccctccgaatgaacgggcagctagcacccctgaaccagtagcgccagcgctacaggtcccggcaacacccgcgccgtacctccaaccatcgtggtatcacgagatcgacgcggtgattcgagaaattgatcagtacttcctcgatcgctgggactttcccaacgagagagcgcgaaagaagttcgtagtagctggcttctctcgtgttacttgcatgtactatcccatggcacatgcagacagaattggctatgcttgcaagctccttactattctcttcctcgttgatgatcttcttgaggatatgtcattcgaagatggagaggcctacaatgccgctttgatgcccatcatgacgggtcaaaagaaacccaaccgagatatccccgcagagtcaatcatgtgggacttatgggaggacatgcgagccctcgacctcgagctggcaaacgagattctggagcccacattcgtcttcatgcgtgcgcaaacagatcgtcagcgtaagaacgtgaagggccttggagcttatcttctttaccgagagcgcgatgttggcaaggcgcttctctccgcccttatgagattctccatgaagcttagcctaactccagaggagctggcacttgtcaagcctgtcgatgagaactgctctaagcatatttcgatcatcaacgacattttcagctgggacaaggagttagcacagtcaaagtccggacacgaagaaggctccgttctctgctcctcagtgcaagtgcttgccgaagaggcaaatttgactattgaagcctccaagagagttctattctcaatggctcgcgagtgggaattaacacacatcaagttggaacaggaaattcgcgacagcagtgttttaagcgaagacagaaaagaggcagttctcagttatgcaaagggattggagtatcagatgagcggcaatgaattatggagtgctactactttgcggtacattggacagcaggctacctcttag

SEQ ID NO: 26197 - protein, 368 aa, Muscodor strobelii
  misc_feature: SGI Peptide ID NO. 568952
  misc_feature (58)..(310): Pfam Id: PF03936 Pfam Desc: Terpene synthase family, metal binding domain
  misc_feature (92)..(294): Pfam Id: PF03936 Pfam Desc: Terpene synthase family, metal binding domain
  misc_feature (64)..(368): NCBI GI: 121712471 Blast Desc: terpene synthase metal binding domain protein [Aspergillus clavatus NRRL 1] gi|119401999|gb|EAW12421.1| terpene synthase metal binding domain protein [Aspergillus clavatus NRRL
  misc_feature (64)..(368): NCBI GI: 67525639 Blast Desc: AN3277.2 [Aspergillus nidulans FGSC A4] gi|40744065|gb|EAA63245.1| AN3277.2 [Aspergillus nidulans FGSC A4] gi|259485756|tpe|CBF83046.1| TPA: conserved [Aspergillus FGSC
  misc_feature (47)..(361): NCBI GI: 416643 Blast Desc: ARIS_PENRO RecName: Full=Aristolochene synthase; Short=AS; AltName: Full=Sesquiterpene cyclase gi|169178|gb|AAA33694.1| aristolochene synthase [Penicillium
  misc_feature (47)..(361): NCBI GI: 255931833 Blast Desc: Pc12g06310 [Penicillium chrysogenum Wisconsin 54-1255] gi|211582092|emb|CAP80258.1| Pc12g06310 [Penicillium chrysogenum Wisconsin 54-1255]
  misc_feature (58)..(358): NCBI GI: 10120633 Blast Desc: Pc12g06310 [Penicillium chrysogenum Wisconsin 54-1255] gi|211582092|emb|CAP80258.1| Pc12g06310 [Penicillium chrysogenum Wisconsin 54-1255]
  misc_feature (71)..(362): NCBI GI: 171677181 Blast Desc: protein product [Podospora anserina] gi|170936658|emb|CAP61317.1| protein product [Podospora anserina]
  misc_feature (47)..(352): NCBI GI: 224589059 Blast Desc: FPP cyclase [Penicillium expansum]
  misc_feature (51)..(361): NCBI GI: 169782654 Blast Desc: [Aspergillus oryzae RIB40] gi|83774533|dbj|BAE64656.1| protein product [Aspergillus oryzae]
  misc_feature (64)..(362): NCBI GI: 121708682 Blast Desc: conserved [Aspergillus clavatus NRRL 1] gi|119400361|gb|EAW10787.1| conserved [Aspergillus clavatus NRRL 1]
  misc_feature (138)..(361): NCBI GI: 238492299 Blast Desc: aristolochene synthase, [Aspergillus flavus NRRL3357] gi|220695880|gb|EED52222.1| aristolochene synthase, [Aspergillus flavus NRRL3357]
  misc_feature (47)..(361): SWISSPROT Homolog: EC 4.2.3.9 Aristolochene synthase
MAAATAMPHADAVIDKLQASKMGVSQKVVEQTPPATPPNERAASTPEPVAPALQVPATPAPYLQPSWYHEIDAVIREIDQYFLDRWDFPNERARKKFVVAGFSRVTCMYYPMAHADRIGYACKLLTILFLVDDLLEDMSFEDGEAYNAALMPIMTGQKKPNRDIPAESIMWDLWEDMRALDLELANEILEPTFVFMRAQTDRQRKNVKGLGAYLLYRERDVGKALLSALMRFSMKLSLTPEELALVKPVDENCSKHISIINDIFSWDKELAQSKSGHEEGSVLCSSVQVLAEEANLTIEASKRVLFSMAREWELTHIKLEQEIRDSSVLSEDRKEAVLSYAKGLEYQMSGNELWSATTLRYIGQQATS

SEQ ID NO: 26198 - DNA, 3804 bp, Muscodor strobelii
  misc_feature: SGI EST ID NO. CUFF.61814.0
  misc_feature: Variant of the nucleotide sequence at SEQ ID NO 26196
gatcagtacttcctcgatcgctgggactttcccaacgagagagcgcgaaagaagttcgtagtagctggcttctctcgtgttacttgcatgtactatcccatggcacatgcagacagaattggctatgcttgcaagctccttactattctcttcctcgttgatgatcttcttgaggatatgtcattcgaagatggagaggcctacaatgccgctttgatgcccatcatgacgggtcaaaagaaacccaaccgagatatccccgcagagtcaatcatgtgggacttatgggaggacatgcgagccctcgacctcgagctggcaaacgagattctggagcccacattcgtcttcatgcgtgcgcaaacagatcgtcagcgtaagaacgtgaagggccttggagcttatcttctttaccgagagcgcgatgttggcaaggcgcttctctccgcccttatgagattctccatgaagcttagcctaactccagaggagctggcacttgtcaagcctgtcgatgagaactgctctaagcatatttcgatcatcaacgacattttcagctgggacaaggagttagcacagtcaaagtccggacacgaagaaggctccgttctctgctcctcagtgcaagtgcttgccgaagaggcaaatttgactattgaagcctccaagagagttctattctcaatggctcgcgagtgggaattaacacacatcaagttggaacaggaaattcgcgacagcagtgttttaagcgaagacagaaaagaggcagttctcagttatgcaaagggattggagtatcagatgagcggcaatgaattatggagtgctactactttgcggtacattggacagcaggctacctcttagaaaacgagcatatggtatacgattacaagtttgggtttgtgttaggggcaaggtcgtttcgggtcattggctttcactagatttcaactagggtctcttttcatttaaatagctagtgcttcgatatcatgacaaagtgacagtctcgttcatagcattgatatacgagtatcatcaataggctctctctacacagagtttttcgcgatatatcgtctcaaatgtgtagtattctcaccaagtaggatggataggtctaatgatttggtttttgcttgggaagccgcaaagcttcaagctttggtagtttactctgtatccaatctgccattctagttgtgagggcgtgtctggagcccttggcttcagctgacgtttcctttgaaggattggttgtccggcggaaattccaatatcccttcgttgtcggagacagagcctgtgcctttggttgcgtcgattgctctagtgccgccgcttcgcgttgacgcctaatggcacgtgcgatgtcgtaatacgctttttccacattgtgaccatcttttgcggatgtttccaaaaactcaataccgagctcatgggcaagagcttggccttcttcagttgaaatttctctttctgcgactaaatcgcatttgttcccgactagtgcaatcggtgggttcacgctcgatggatttgtgacctgggcgggcgttgtattggagtgactattcgacccctctaagcgcgcagtctctttcaccctcaaaatctgactgtgaaactctttgatcctcgacaatgatgctctcgaaatgatgctgtagacaagcaagaacccttggccatggcgaatacataaatcgcgtaacgcagtgtattcattatcgctgatattatccatgatgtcgattatgcaactgtcgccgtcaataactgcttgctgtctatctggctcaccagtagggtcataaagtccgaagggaactccatataactgttgtttcaaacaggtctttcccacgcctctgtcaccgaagactaccaaatcgtaagtttgcatttttcctggtatgttcaccttttactgcgtgagcttggaaagcgaccggttggtgatctttcggtgaagtagctcatcaccgttctacgcaatcgtgcgattgagctcctttgaatagcttcggctattcgatcctcaaaatcctggtaattaaaaccccgcagttgtttcctgctgcctagcaccctgcaggaggtaatgtatgcaaccccaaccattctggcatcataccatgctctaacgagagatcgaatgagaaattgtattttaatatgcgcaaacgtggcggcgttcaccttgaacatggagtctaggggcccgtgataatgatgatttaagcacattattatttcaactttcggatatctagctatgaatacttagatacacgtgctctggggcatggaaagttagtgcacacttattttccatccctcgagactacccgcacaaacatttgaggtttgtgccacaacgtgtgcattctagattctttgtgccaatctaggtccttgctcaacagctcgaggtcgtatttgaaatgtaattttgcaattgtagtgttcatctccatccaagctagatttcgtcctagacagcctctggggccgagcgaaaacggctgcgaagcatcaagattatctcgagagttttcccccatccatctttctggtataaactcgaatggccggtcgaagttagccgtggagttacttgcagcaaacgtcgccgtagagacagtgacctgtgatttgtcagccaccattgatgcaataggacaattgactcacccctccaggaatgaaatgaccatcgactgtatcgccaccttcaggaacgacacgaggtagggcaaatggcaatggtgagtaaatgcgcatgccttcgtagatcacagcattcaaatatttcagcgacaaagtgctgtgggcattgatgtcctcatagctatggaatgttgatctgatctcatgttgtaacttgctgtagacgtccgggttttttaagaggtagtatgtgatggttgataatacggtagccgtggtctcgctccctgcagtgctgattggagttagttcggctctcagatacaacactaataaataacatacacaaagtctgatgcatgcgctgcaatttgtatatccgagatgttgttcgtttctctgctctctatcattcgggtgaggaagtcgggacggtcactcatgttttttaaccgtctttattgctaagttagcgcacgacttactacgatgatgtcgcgggacgggagagacgaacttgtcaaccaaagcgatagtgtgagcttcgtgagttcgagtatcctcaatgagtttggcaatcgtaccgggcatcaatttcatgaagatctttgcaatcattggaaatcgactcatacagtcagcgagcgcgccttggctcatggcaccaagcacgagcttgatccaagaatggtacttcgcagattccaacccgccaaatggctggccgaaggctaatgagccaataatatcaagggtcaatagattgaaccacatgaccatatcaagaccttctgggaccgagccgaatttgccaatctgttccatgaagaagtcgaccatttctgtgactaggccctcctgctccttgagactcctgtcagagaatgcatgactgaggtactttctcattataccgtgctccgttggatctctctcgctaacaattgaatgcgcagcatctgcaaagctgcctccatcatagaacgggctcttcacaaacgttttgtgattagggcgaaagccatatatgtctcgccaagactgtgcagtgttgaaagagagctcattaggtgaggtccgtactacgggaccatacttctcgtgtaaagctaagatatc

SEQ ID NO: 26199 - DNA, 1239 bp, Muscodor strobelii
  misc_feature: SGI cDNA ID NO. 568953
  misc_feature: Encodes the peptide sequence at SEQ ID NO 26200
atgagcgccaaactcactgaagcagatgttttgcctgcctcgctgcaggtgctcaagtcaaacccaattagtgtcgtcggggcactaatagctatttggctgattaaaactgtcgtcgatcacgtctcacaccccctctataggtttcccggacccttttgggcctctttcagcaatgtcttgcactcttggacctttatgggtggtcgtcagccgtacgatatcttagctttacacgagaagtatggtcccgtagtacggacctcacctaatgagctctctttcaacactgcacagtcttggcgagacatatatggctttcgccctaatcacaaaacgtttgtgaagagcccgttctatgatggaggcagctttgcagatgctgcgcattcaattgttagcgagagagatccaacggagcacggtataatgagaaagtacctcagtcatgcattctctgacaggagtctcaaggagcaggagggcctagtcacagaaatggtcgacttcttcatggaacagattggcaaattcggctcggtcccagaaggtcttgatatggtcatgtggttcaatctattgacccttgatattattggctcattagccttcggccagccatttggcgggttggaatctgcgaagtaccattcttggatcaagctcgtgcttggtgccatgagccaaggcgcgctcgctgactgtatgagtcgatttccaatgattgcaaagatcttcatgaaattgatgcccggtacgattgccaaactcattgaggatactcgaactcacgaagctcacactatcgctttggttgacaaacggttaaaaaacatgagtgaccgtcccgacttcctcacccgaatgatagagagcagagaaacgaacaacatctcggatatacaaattgcagcgcatgcatcagactttgtcactgcagggagcgagaccacggctaccgtattatcaaccatcacatactacctcttaaaaaacccggacgtctacagcaagttacaacatgagatcagatcaacattccatagctatgaggacatcaatgcccacagcactttgtcgctgaaatatttgaatgctgtgatctacgaaggcatgcgcatttactcaccattgccatttgccctacctcgtgtcgttcctgaaggtggcgatacagtcgatggtcatttcattcctggaggggtgagtcaattgtcctattgcatcaatggtggctga

SEQ ID NO: 26200 - protein, 412 aa, Muscodor strobelii
  misc_feature: SGI Peptide ID NO. 568953
  misc_feature (50)..(412): Pfam Id: PF00067 Pfam Desc: Cytochrome P450
  misc_feature (144)..(399): Pfam Id: PF00067 Pfam Desc: Cytochrome P450
  misc_feature (41)..(410): NCBI GI: 255931851 Blast Desc: Pc12g06400 [Penicillium chrysogenum Wisconsin 54-1255] gi|211582101|emb|CAP80267.1| Pc12g06400 [Penicillium chrysogenum Wisconsin 54-1255]
  misc_feature (28)..(399): NCBI GI: 259485758 Blast Desc: TPA: cytochrome P450, (Eurofung) [Aspergillus nidulans FGSC A4]
  misc_feature (23)..(400): NCBI GI: 121712467 Blast Desc: benzoate 4-monooxygenase cytochrome P450 [Aspergillus clavatus NRRL 1] gi|119401997|gb|EAW12419.1| benzoate 4-monooxygenase cytochrome P450 [Aspergillus clavatus NRRL 1]
  misc_feature (58)..(401): NCBI GI: 171677183 Blast Desc: protein product [Podospora anserina] gi|170936659|emb|CAP61318.1| protein product [Podospora anserina]
  misc_feature (28)..(402): NCBI GI: 169603624 Blast Desc: SNOG_04820 [Phaeosphaeria nodorum SN15] gi|111066091|gb|EAT87211.1| SNOG_04820 [Phaeosphaeria nodorum SN15]
  misc_feature (17)..(403): NCBI GI: 121716300 Blast Desc: benzoate 4-monooxygenase cytochrome P450 [Aspergillus clavatus NRRL 1] gi|119403916|gb|EAW14333.1| benzoate 4-monooxygenase cytochrome P450 [Aspergillus clavatus NRRL 1]
  misc_feature (30)..(403): NCBI GI: 115402601 Blast Desc: [Aspergillus terreus NIH2624] gi|114189223|gb|EAU30923.1| [Aspergillus terreus NIH2624]
  misc_feature (21)..(398): NCBI GI: 119481647 Blast Desc: benzoate 4-monooxygenase cytochrome P450 [Neosartorya fischeri NRRL 181] gi|119409006|gb|EAW18955.1| benzoate 4-monooxygenase cytochrome P450 [Neosartorya fischeri NRRL 181]
  misc_feature (44)..(402): NCBI GI: 259485752 Blast Desc: TPA: cytochrome P450, (Eurofung) [Aspergillus nidulans FGSC A4]
  misc_feature (1)..(402): NCBI GI: 255931847 Blast Desc: Pc12g06380 [Penicillium chrysogenum Wisconsin 54-1255] gi|211582099|emb|CAP80265.1| Pc12g06380 [Penicillium chrysogenum Wisconsin 54-1255]
  misc_feature (46)..(410): SWISSPROT Homolog: EC 1.14.13.12 Benzoate 4-monooxygenase
MSAKLTEADVLPASLQVLKSNPISVVGALIAIWLIKTVVDHVSHPLYRFPGPFWASFSNVLHSWTFMGGRQPYDILALHEKYGPVVRTSPNELSFNTAQSWRDIYGFRPNHKTFVKSPFYDGGSFADAAHSIVSERDPTEHGIMRKYLSHAFSDRSLKEQEGLVTEMVDFFMEQIGKFGSVPEGLDMVMWFNLLTLDIIGSLAFGQPFGGLESAKYHSWIKLVLGAMSQGALADCMSRFPMIAKIFMKLMPGTIAKLIEDTRTHEAHTIALVDKRLKNMSDRPDFLTRMIESRETNNISDIQIAAHASDFVTAGSETTATVLSTITYYLLKNPDVYSKLQHEIRSTFHSYEDINAHSTLSLKYLNAVIYEGMRIYSPLPFALPRVVPEGGDTVDGHFIPGGVSQLSYCINGG

SEQ ID NO: 26201 - DNA, 3133 bp, Muscodor strobelii
  misc_feature: SGI EST ID NO. CUFF.61815.1
  misc_feature: Variant of the nucleotide sequence at SEQ ID NO 26199
gatatcttagctttacacgagaagtatggtcccgtagtacggacctcacctaatgagctctctttcaacactgcacagtcttggcgagacatatatggctttcgccctaatcacaaaacgtttgtgaagagcccgttctatgatggaggcagctttgcagatgctgcgcattcaattgttagcgagagagatccaacggagcacggtataatgagaaagtacctcagtcatgcattctctgacaggagtctcaaggagcaggagggcctagtcacagaaatggtcgacttcttcatggaacagattggcaaattcggctcggtcccagaaggtcttgatatggtcatgtggttcaatctattgacccttgatattattggctcattagccttcggccagccatttggcgggttggaatctgcgaagtaccattcttggatcaagctcgtgcttggtgccatgagccaaggcgcgctcgctgactgtatgagtcgatttccaatgattgcaaagatcttcatgaaattgatgcccggtacgattgccaaactcattgaggatactcgaactcacgaagctcacactatcgctttggttgacaaacggttaaaaaacatgagtgaccgtcccgacttcctcacccgaatgatagagagcagagaaacgaacaacatctcggatatacaaattgcagcgcatgcatcagactttgtcactgcagggagcgagaccacggctaccgtattatcaaccatcacatactacctcttaaaaaacccggacgtctacagcaagttacaacatgagatcagatcaacattccatagctatgaggacatcaatgcccacagcactttgtcgctgaaatatttgaatgctgtgatctacgaaggcatgcgcatttactcaccattgccatttgccctacctcgtgtcgttcctgaaggtggcgatacagtcgatggtcatttcattcctggaggggtgagtcaattgtcctattgcatcaatggtggctgacaaatcacaggtcactgtctctacggcgacgtttgctgcaagtaactccacggctaacttcgaccggccattcgagtttataccagaaagatggatgggggaaaactctcgagataatcttgatgcttcgcagccgttttcgctcggccccagaggctgtctaggacgaaatctagcttggatggagatgaacactacaattgcaaaattacatttcaaatacgacctcgagctgttgagcaaggacctagattggcacaaagaatctagaatgcacacgttgtggcacaaacctcaaatgtttgtgcgggtagtctcgagggatggaaaataagtgtgcactaactttccatgccccagagcacgtgtatctaagtattcatagctagatatccgaaagttgaaataataatgtgcttaaatcatcattatcacgggcccctagactccatgttcaaggtgaacgccgccacgtttgcgcatattaaaatacaatttctcattcgatctctcgttagagcatggtatgatgccagaatggttggggttgcatacattacctcctgcagggtgctaggcagcaggaaacaactgcggggttttaattaccaggattttgaggatcgaatagccgaagctattcaaaggagctcaatcgcacgattgcgtagaacggtgatgagctacttcaccgaaagatcaccaaccggtcgctttccaagctcacgcagtaaaaggtgaacataccaggaaaaatgcaaacttacgatttggtagtcttcggtgacagaggcgtgggaaagacctgtttgaaacaacagttatatggagttcccttcggactttatgaccctactggtgagccagatagacagcaagcagttattgacggcgacagttgcataatcgacatcatggataatatcagcgataatgaatacactgcgttacgcgatttatgtattcgccatggccaagggttcttgcttgtctacagcatcatttcgagagcatcattgtcgaggatcaaagagtttcacagtcagattttgagggtgaaagagactgcgcgcttagaggggtcgaatagtcactccaatacaacgcccgcccaggtcacaaatccatcgagcgtgaacccaccgattgcactagtcgggaacaaatgcgatttagtcgcagaaagagaaatttcaactgaagaaggccaagctcttgcccatgagctcggtattgagtttttggaaacatccgcaaaagatggtcacaatgtggaaaaagcgtattacgacatcgcacgtgccattaggcgtcaacgcgaagcggcggcactagagcaatcgacgcaaccaaaggcacaggctctgtctccgacaacgaagggatattggaatttccgccggacaaccaatccttcaaaggaaacgtcagctgaagccaagggctccagacacgccctcacaactagaatggcagattggatacagagtaaactaccaaagcttgaagctttgcggcttcccaagcaaaaaccaaatcattagacctatccatcctacttggtgagaatactacacatttgagacgatatatcgcgaaaaactctgtgtagagagagcctattgatgatactcgtatatcaatgctatgaacgagactgtcactttgtcatgatatcgaagcactagctatttaaatgaaaagagaccctagttgaaatctagtgaaagccaatgacccgaaacgaccttgcccctaacacaaacccaaacttgtaatcgtataccatatgctcgttttctaagaggtagcctgctgtccaatgtaccgcaaagtagtagcactccataattcattgccgctcatctgatactccaatccctttgcataactgagaactgcctcttttctgtcttcgcttaaaacactgctgtcgcgaatttcctgttccaacttgatgtgtgttaattcccactcgcgagccattgagaatagaactctcttggaggcttcaatagtcaaatttgcctcttcggcaagcacttgcactgaggagcagagaacggagccttcttcgtgtccggactttgactgtgctaactccttgtcccag

SEQ ID NO: 26202 - DNA, 1560 bp, Muscodor strobelii
  misc_feature: SGI cDNA ID NO. 568954
  misc_feature: Encodes the peptide sequence at SEQ ID NO 26203
atgagttccctctcaaacgccacgggcgcatttgctgagggcaccatcctgtcttctccagcgccccatttcgagagtcttcttattactcctacttctgcatttgcagcctgcatcaccatcatcctcggtttcatcttgatcaacccatttgccaagcgtcaacgtctcgttcctgggattcctatcgtaggcggcgccgataaagagtcaattaagaagaaccgacagcgcttcattcacgatggaatgtcaatgctggccgagggttacaaagagaacaatggcgacatgtactacgttcccagtgtgttgggtgaaaggcttatgatccctgcgaaatatgtcgaagaactgaaaacagcaccaatggatcttgtagacttcgtagccacttttcaggagatgttcgaaggaaaatacactacaatgggtagtcgctctcgactgcatcctcaaacagtcaaaggccagctcaatcactatctcgcggatgttatgccaggtgtccaagatgagattcataacgcctttgaggaagactttcctgcctgcgacgactggacgcctgtgccagtagttgatcgtttgacacaaattgtcgcgcgggtgtcttcacgcatgttcggtggaactgtactaagcgagaacaaggaatggattaaagcatcaattgacttcgcacttgatggtttcattggtgctcaagctatcaagcaatatccacatgctctccgaccggtaatgcaatatactatcccaactctgaggaaaatcacagagcattatcgtgcagcggaacgtgcagcgatacctattctcgaagaacgtcagcgatcgggagagaaagcattagatctcttatcctggatggccgatcaggccgagggtgatgaggcagacaatgccttcattgctggcattctgttgaaagtcagcttcgcggctattcacacaagtgcagcagcacccgctcaactaattttcgatctttgcgataagcctgaatacatagagccgttacgccgggagcttgagagcgttctcttgtccgacgggtccatcgacaagaatgggtttaacaaactcgtcaaaatggacagtatcatgaaggagagccagcgattcaaccctctacttttgataacctttgagcgcgtcgtcacggctgattacaagttgaacgatggattcgtaatcccggctaataccacaattggagttccgactcaagccatcacaatgaacccagatctttaccccgatccggagacgtttgatggcttcagatttgagaaagaaagagcaaaacggcccgaagcttctggacgacaggcttatgctgccagtaaccatgacagcatggcgtttggctatggcaggcatgcatgtccaggacgtttctttgcatctaatgagatcaaagccattatgggttatttactacttaactatgacatgaagttcgctgacgggcagacccgcccaccaagcctgctcttcgagacacagaatctaccaaatcatgaagcaactgtactatttagaagacggaaatag

SEQ ID NO: 26203 - protein, 519 aa, Muscodor strobelii
  misc_feature: SGI Peptide ID NO. 568954
  misc_feature (58)..(515): Pfam Id: PF00067 Pfam Desc: Cytochrome P450
  misc_feature (335)..(515): Pfam Id: PF00067 Pfam Desc: Cytochrome P450
  misc_feature (53)..(519): NCBI GI: 67525633 Blast Desc: AN3274.2 [Aspergillus nidulans FGSC A4] gi|40744062|gb|EAA63242.1| AN3274.2 [Aspergillus nidulans FGSC A4]
  misc_feature (53)..(519): NCBI GI: 259485760 Blast Desc: TPA: cytochrome P450, (Eurofung) [Aspergillus nidulans FGSC A4]
  misc_feature (136)..(519): NCBI GI: 238492293 Blast Desc: cytochrome P450, [Aspergillus flavus NRRL3357] gi|220695877|gb|EED52219.1| cytochrome P450, [Aspergillus flavus NRRL3357]
  misc_feature (136)..(519): NCBI GI: 169782648 Blast Desc: [Aspergillus oryzae RIB40] gi|83774530|dbj|BAE64653.1| protein product [Aspergillus oryzae]
  misc_feature (54)..(472): NCBI GI: 121712463 Blast Desc: cytochrome P450 [Aspergillus clavatus NRRL 1] gi|119401995|gb|EAW12417.1| cytochrome P450 [Aspergillus clavatus NRRL 1]
  misc_feature (78)..(518): NCBI GI: 119494789 Blast Desc: cytochrome P450 monooxygenase, [Neosartorya fischeri NRRL 181] gi|119412362|gb|EAW22303.1| cytochrome P450 monooxygenase, [Neosartorya fischeri NRRL 181]
  misc_feature (78)..(518): NCBI GI: 259486929 Blast Desc: TPA: cytochrome P450, (Eurofung) [Aspergillus nidulans FGSC A4]
  misc_feature (78)..(518): NCBI GI: 67522282 Blast Desc: AN1598.2 [Aspergillus nidulans FGSC A4] gi|40745149|gb|EAA64305.1| AN1598.2 [Aspergillus nidulans FGSC A4]
  misc_feature (24)..(518): NCBI GI: 242804557 Blast Desc: cytochrome P450, [Talaromyces stipitatus ATCC 10500] gi|218717744|gb|EED17165.1| cytochrome P450, [Talaromyces stipitatus ATCC 10500]
  misc_feature (62)..(518): NCBI GI: 212539424 Blast Desc: cytochrome P450, [Penicillium marneffei ATCC 18224] gi|210067166|gb|EEA21258.1| cytochrome P450, [Penicillium marneffei ATCC 18224]
  misc_feature (61)..(518): SWISSPROT Homolog: EC 1.14.13.78 Ent-kaurene oxidase
MSSLSNATGAFAEGTILSSPAPHFESLLITPTSAFAACITIILGFILINPFAKRQRLVPGIPIVGGADKESIKKNRQRFIHDGMSMLAEGYKENNGDMYYVPSVLGERLMIPAKYVEELKTAPMDLVDFVATFQEMFEGKYTTMGSRSRLHPQTVKGQLNHYLADVMPGVQDEIHNAFEEDFPACDDWTPVPVVDRLTQIVARVSSRMFGGTVLSENKEWIKASIDFALDGFIGAQAIKQYPHALRPVMQYTIPTLRKITEHYRAAERAAIPILEERQRSGEKALDLLSWMADQAEGDEADNAFIAGILLKVSFAAIHTSAAAPAQLIFDLCDKPEYIEPLRRELESVLLSDGSIDKNGFNKLVKMDSIMKESQRFNPLLLITFERVVTADYKLNDGFVIPANTTIGVPTQAITMNPDLYPDPETFDGFRFEKERAKRPEASGRQAYAASNHDSMAFGYGRHACPGRFFASNEIKAIMGYLLLNYDMKFADGQTRPPSLLFETQNLPNHEATVLFRRRK

SEQ ID NO: 26204 - DNA, 933 bp, Muscodor strobelii
  misc_feature: SGI cDNA ID NO. 568955
  misc_feature: Encodes the peptide sequence at SEQ ID NO 26205
atgacttcgctccacctccgagaaagtgatatccccgaccttacgggcaaagtcgccgtaatcacaggtggttgctcaggaatcggcctcgcagctggaagaatcttggcttctcgaaatgcgaccgtccatgctctggatatctcgccgccacatgttgaagatggccctaacccagaaggatggcactcacgcattgtcgatgtgtccagttggaaggagctcgctagtgcctttcgggaaattggtcaggttgacatagccatagccaatgctggtataagcgaagacttcgatcttttcaagaacgtcgcatctccagacgacccagagccccagtatcgttgtatcgacgtcaacttgaaagctgtcatcaattttgttcatctttccctgtcagccttcgagaaacaaggatacggtggccgcattgttcttacgacatctgccacgggttacagcccagaacatagtcttcctgtatattctgcaacgaaggctggagtattgggattaattcgatctctcaggccaaatctaccttacacccatggagcaaccataaacggcgtggctcccgctgcaacgatcacgcgattgctaccgaagaacctagcagcgccgataatggcggccggcagtccagtctctaccgccgagcatgttggacttgctatcgcttacagtgctgttgcaaaagaaaaagttcaagtcgatcgttacggtaaagatccagaagcggtgaaagagcactggccgggcttgtggaatggaagagttattctgacacttggagatacatggactgagatcgaggaaccgctggcggacaaacggtctgaatggcttggagcacatcaatttgcgagcactctcagccaacaaaagctcaccgacatgaggccgctacccaactttgacttgaagaactag

SEQ ID NO: 26205 - protein, 310 aa, Muscodor strobelii
  misc_feature: SGI Peptide ID NO. 568955
  misc_feature (17)..(181): Pfam Id: PF00106 Pfam Desc: short chain dehydrogenase
  misc_feature (1)..(301): NCBI GI: 121712475 Blast Desc: short chain dehydrogenase/reductase family oxidoreductase, [Aspergillus clavatus NRRL 1] gi|119402001|gb|EAW12423.1| short chain dehydrogenase/reductase
  misc_feature (23)..(301): NCBI GI: 67525643 Blast Desc: AN3279.2 [Aspergillus nidulans FGSC A4] gi|40744067|gb|EAA63247.1| AN3279.2 [Aspergillus nidulans FGSC A4] gi|259485754|tpe|CBF83042.1| TPA: conserved [Aspergillus FGSC
  misc_feature (1)..(301): NCBI GI: 255931837 Blast Desc: Pc12g06330 [Penicillium chrysogenum Wisconsin 54-1255] gi|211582094|emb|CAP80260.1| Pc12g06330 [Penicillium chrysogenum Wisconsin 54-1255]
  misc_feature (1)..(306): NCBI GI: 238839257 Blast Desc: conserved [Microsporum canis CBS 113480]
  misc_feature (1)..(301): NCBI GI: 238492297 Blast Desc: short-chain dehydrogenase, [Aspergillus flavus NRRL3357] gi|220695879|gb|EED52221.1| short-chain dehydrogenase, [Aspergillus flavus NRRL3357]
  misc_feature (169)..(301): NCBI GI: 169782652 Blast Desc: [Aspergillus oryzae RIB40] gi|83774532|dbj|BAE64655.1| protein product [Aspergillus oryzae]
  misc_feature (1)..(303): NCBI GI: 171677081 Blast Desc: protein product [Podospora anserina] gi|170936608|emb|CAP61267.1| protein product [Podospora anserina]
  misc_feature (1)..(299): NCBI GI: 240110062 Blast Desc: oxidoreductase,short chain dehydrogenase, [Coccidioides posadasii C735 delta SOWgp]
  misc_feature (1)..(299): NCBI GI: 119179075 Blast Desc: CIMG_08324 [Coccidioides immitis RS]
  misc_feature (1)..(202): NCBI GI: 156048875 Blast Desc: SS1G_08144 [Sclerotinia sclerotiorum 1980] gi|154692543|gb|EDN92281.1| SS1G_08144 [Sclerotinia sclerotiorum 1980]
  misc_feature (13)..(230): SWISSPROT Homolog: EC 1.1.1.100 3-oxoacyl-[acyl-carrier-protein] reductase
MTSLHLRESDIPDLTGKVAVITGGCSGIGLAAGRILASRNATVHALDISPPHVEDGPNPEGWHSRIVDVSSWKELASAFREIGQVDIAIANAGISEDFDLFKNVASPDDPEPQYRCIDVNLKAVINFVHLSLSAFEKQGYGGRIVLTTSATGYSPEHSLPVYSATKAGVLGLIRSLRPNLPYTHGATINGVAPAATITRLLPKNLAAPIMAAGSPVSTAEHVGLAIAYSAVAKEKVQVDRYGKDPEAVKEHWPGLWNGRVILTLGDTWTEIEEPLADKRSEWLGAHQFASTLSQQKLTDMRPLPNFDLKN

SEQ ID NO: 26206 - DNA, 1614 bp, Muscodor strobelii
  misc_feature: SGI cDNA ID NO. 568956
  misc_feature: Encodes the peptide sequence at SEQ ID NO 26207
atggccaacacgggcccccgtaaagtccgttcggtgcgacgagtctttgcagctactcagccggccaaagtcaccacaacaaagctgtctattgcagatgcatcggtggcaagatactcaccctgcggagccatatggttcttcgactgcagtcctgcatttgacgcaagaacgcaagggttttttgataggtttgagacagctctggctcacacacttgacgagtatcctcattatgtaggccaggtccactgggcatccaaggagctagttgcagggagcgataatcctcgtcaccttggccgccccgctgtcacgtacggcagcacggaggaccctggttttgagctcaccattgttgatgacgacagagagctcagcatacttgttccaagtctagcagagcgaaactcatcaaagaaaatatggatggcttccagtttgcctcagaatgattttcttccgagcacgaatgttgcactaacgagcctaacgacatatcaagggcttccaggtgcatctgcacagctgactgcattcaagtgcggtggctttgccgtgagtgtgaaattcacgcactgcctttcagatgctacgtgtctcctgcatttcattcactcctgggcgaggcggtcacgacagttattggacgaccaacaaaaggagttatcagcatcgaataacgctgtagcagtttttgatcctacactacttgacggatatgctatgataaacaccgggtcggtcgaatcaggtgccgaaagaatccgccacgcacgttctttacccctgcaccgattcagttggtgggccactgacgccccagggtatccctcctgggctacagcgtcttcgaaggcaacgatgccgcccgaggaagagctgtcccaaattgaactcagtccctcaactcaccccccttggccaacgtgggacctggggtctgctgtggagcatgtacagatacaattcaaagccgccgaggtggctgcattgaaagccgctgctatgaagactttgccggaggatctgaagaccctcgtcgtctcacggcaagacgccctacttgctcacttctggatactcatcaaccgggctcgccaagttgagaatcttagcgagcccgtctacatggacatgagtctgggcatgcgtagccggctgtccccgccgcttgcagatagctttgtgggctctccaatcatcatggcccatataaagaagtctggcaccgacgccgcgaccggaacaattggagccgttgccggtgccattaggcacatggtatctcaattcacatcccaggcggtagccgactacctgtacgacgctgcacaggaagttagcccgcaacgcctctggcaagggtttctcggctctaggcacgtcatggtgacttcctgggcgcgtgctcgggcttatgaagttgacttctgcggcacacaaggattagcacgatacgttcagagtcaaatgccgttaatggatggtcttttgcaactcatggacatcgcggatacaggtgactttgacgtcagtctagcacttgagaagggtgcgatggatcgcctactcagtgatcccttgctaagagagtatggaacttttcaatag

SEQ ID NO: 26207 - protein, 537 aa, Muscodor strobelii
  misc_feature: SGI Peptide ID NO. 568956
  misc_feature (8)..(531): Pfam Id: PF02458 Pfam Desc: Transferase family
  misc_feature (173)..(213): Pfam Id: PF02458 Pfam Desc: Transferase family
  misc_feature (3)..(535): NCBI GI: 145603779 Blast Desc: MGG_05825 [Magnaporthe grisea 70-15] gi|145011933|gb|EDJ96589.1| MGG_05825 [Magnaporthe grisea 70-15]
  misc_feature (14)..(527): NCBI GI: 119474469 Blast Desc: transferase family protein [Neosartorya fischeri NRRL 181] gi|119407263|gb|EAW17213.1| transferase family protein [Neosartorya fischeri NRRL 181]
  misc_feature (14)..(535): NCBI GI: 238487514 Blast Desc: transferase family protein [Aspergillus flavus NRRL3357] gi|220699874|gb|EED56213.1| transferase family protein [Aspergillus flavus NRRL3357]
  misc_feature (25)..(525): NCBI GI: 255942875 Blast Desc: Pc18g03680 [Penicillium chrysogenum Wisconsin 54-1255] gi|211586939|emb|CAP94592.1| Pc18g03680 [Penicillium chrysogenum Wisconsin 54-1255]
  misc_feature (21)..(527): NCBI GI: 70986368 Blast Desc: transferase family protein [Aspergillus fumigatus Af293] gi|66846307|gb|EAL86640.1| transferase family protein [Aspergillus fumigatus Af293] gi|159128176|gb|EDP53291.1| family
  misc_feature (14)..(535): NCBI GI: 242822014 Blast Desc: transferase family protein [Talaromyces stipitatus ATCC 10500] gi|218712718|gb|EED12143.1| transferase family protein [Talaromyces stipitatus ATCC 10500]
  misc_feature (105)..(534): NCBI GI: 169770113 Blast Desc: [Aspergillus oryzae RIB40] gi|83767385|dbj|BAE57524.1| protein product [Aspergillus oryzae]
  misc_feature (14)..(530): NCBI GI: 238840526 Blast Desc: transferase family protein [Microsporum canis CBS 113480]
  misc_feature (19)..(530): NCBI GI: 115384698 Blast Desc: [Aspergillus terreus NIH2624] gi|114196588|gb|EAU38288.1| [Aspergillus terreus NIH2624]
  misc_feature (20)..(530): NCBI GI: 67525435 Blast Desc: AN3175.2 [Aspergillus nidulans FGSC A4] gi|40743752|gb|EAA62939.1| AN3175.2 [Aspergillus nidulans FGSC A4] gi|259485868|tpe|CBF83257.1| TPA: transferase family protein
MANTGPRKVRSVRRVFAATQPAKVTTTKLSIADASVARYSPCGAIWFFDCSPAFDARTQGFFDRFETALAHTLDEYPHYVGQVHWASKELVAGSDNPRHLGRPAVTYGSTEDPGFELTIVDDDRELSILVPSLAERNSSKKIWMASSLPQNDFLPSTNVALTSLTTYQGLPGASAQLTAFKCGGFAVSVKFTHCLSDATCLLHFIHSWARRSRQLLDDQQKELSASNNAVAVFDPTLLDGYAMINTGSVESGAERIRHARSLPLHRFSWWATDAPGYPSWATASSKATMPPEEELSQIELSPSTHPPWPTWDLGSAVEHVQIQFKAAEVAALKAAAMKTLPEDLKTLVVSRQDALLAHFWILINRARQVENLSEPVYMDMSLGMRSRLSPPLADSFVGSPIIMAHIKKSGTDAATGTIGAVAGAIRHMVSQFTSQAVADYLYDAAQEVSPQRLWQGFLGSRHVMVTSWARARAYEVDFCGTQGLARYVQSQMPLMDGLLQLMDIADTGDFDVSLALEKGAMDRLLSDPLLREYGTFQ

SEQ ID NO: 26208 - DNA, 2442 bp, Muscodor strobelii
  misc_feature: SGI EST ID NO. CUFF.61833.0
  misc_feature: Variant of the nucleotide sequence at SEQ ID NO 26206
cagggatgatgtacaataatggtaaggccgagatccctgccagaaccctgcatggcgacaatgtacagggacttcgtcagaatgattcatcctgagcgagcctggggaaaagactggcgtagagtaattggccgctaacacatgaatccgacaggctctatgcggcctataataacaacgtatcaacaccacgggtttccttgaaacggcaacgtttggatataatctctccgcggaatgcattttaatccgaccagtctgctttctctcacattttcccacaattgtaagaggtctttcgtcttggaacttcgcaattgcgcgtgagtaagccccgagtaacttcgggtgatctcattccagattgcactcccacgaatgaccctgaaaccttaagcggcaaagattaccacgcgcttgtttagctgccgtagctcgccttccttgcactgaaaacctcattgtttagagcgaggagagcatcgcatagccctaggcttcgacatggccaacacgggcccccgtaaagtccgttcggtgcgacgagtctttgcagctactcagccggccaaagtcaccacaacaaagctgtctattgcagatgcatcggtggcaagatactcaccctgcggagccatatggttcttcgactgcagtcctgcatttgacgcaagaacgcaagggttttttgataggtttgagacagctctggctcacacacttgacgagtatcctcattatgtaggccaggtccactgggcatccaaggagctagttgcagggagcgataatcctcgtcaccttggccgccccgctgtcacgtacggcagcacggaggaccctggttttgagctcaccattgttgatgacgacagagagctcagcatacttgttccaagtctagcagagcgaaactcatcaaagaaaatatggatggcttccagtttgcctcagaatgattttcttccgagcacgaatgttgcactaacgagcctaacgacatatcaagggcttccaggtgcatctgcacagctgactgcattcaagtgcggtggctttgccgtgagtgtgaaattcacgcactgcctttcagatgctacgtgtctcctgcatttcattcactcctgggcgaggcggtcacgacagttattggacgaccaacaaaaggagttatcagcatcgaataacgctgtagcagtttttgatcctacactacttgacggatatgctatgataaacaccgggtcggtcgaatcaggtgccgaaagaatccgccacgcacgttctttacccctgcaccgattcagttggtgggccactgacgccccagggtatccctcctgggctacagcgtcttcgaaggcaacgatgccgcccgaggaagagctgtcccaaattgaactcagtccctcaactcaccccccttggccaacgtgggacctggggtctgctgtggagcatgtacagatacaattcaaagccgccgaggtggctgcattgaaagccgctgctatgaagactttgccggaggatctgaagaccctcgtcgtctcacggcaagacgccctacttgctcacttctggatactcatcaaccgggctcgccaagttgagaatcttagcgagcccgtctacatggacatgagtctgggcatgcgtagccggctgtccccgccgcttgcagatagctttgtgggctctccaatcatcatggcccatataaagaagtctggcaccgacgccgcgaccggaacaattggagccgttgccggtgccattaggcacatggtatctcaattcacatcccaggcggtagccgactacctgtacgacgctgcacaggaagttagcccgcaacgcctctggcaagggtttctcggctctaggcacgtcatggtgacttcctgggcgcgtgctcgggcttatgaagttgacttctgcggcacacaaggattagcacgatacgttcagagtcaaatgccgttaatggatggtcttttgcaactcatggacatcgcggatacaggtgactttgacgtcagtctagcacttgagaagggtgcgatggatcgcctactcagtgatcccttgctaagagagtatggaacttttcaataggcactttgatcaatagatagaaatatgcacatgatgccctatgcaaagtataataagcacaatggctacattttgcaagatggctgaccttccacgattggcaatatgattcgaaatgaaatgcatgttgcgttcgcatttgtgcaacccacacggtaggctattaggcatggtgagccctaatgtagtgaacctgtgttgttggcagtcgtcagaatgaccgcgtggttgatgatagtcacagggttcttgcttggcgtgctaatatgggcagctgtggtcggattgcatgcaccaacttgcatttggttacttgcccgctgc

SEQ ID NO: 26209 - DNA, 1521 bp, Muscodor strobelii
  misc_feature: SGI cDNA ID NO. 568957
  misc_feature: Encodes the peptide sequence at SEQ ID NO 26210
atgttcggtaccctcaaggccggcaagaaagccaatgctggcagcatggtatttgtagagcaaaacaagcatatccgtagctcatctggagtgcctcatattgcctgcacaacctgtcgggatcgtaagctaaaatgcacgggggaacctaccggctgcaaacgatgccgatcttctcataccaaatgtgaatatcctccagcgagtgaagacaagagggggaagggtagaagaacaacagagccagtgccaccggcgcccgagccagcggaatcgagcgctgcttttaatgccccaagtctacgtgacaatgcccagaaagctggcggaaaatccgcggacatcggacttgaaaacagtaacttggagttcgacttgtcattggctggcatgtctgacttcatgaattcgggcagctttgaagagatgctgctcatggacagccctgctcttctagatcgcatgtctgcaacaggattgggcatcggagattcggatttcctatcgcagctgtcagacatcgaaatcccccatatatcacccggattcccgattgaccctagccactttgctcatggctctggctccgggtctggcagtatttctagtggtagtacaccacctggcatgaatctagatccagcgctatcgaataattttttcgtgcctcgagcagaatggcaaccgaaaccgatgtcggtgcagagtcctcagtctacctctgataaaactagcaatggtctaagatcttcaatgagctggaccaattcagtatctagcaagagttcccctcgggagctaagcagaaccaattcaactactgagtcctctaagcaacaacaacaactgaaacgtcctctgccggactcttctcccagtagcagcgacagcgactcgcggggcgagcagtgccgatgcagtgagaaggcgcttcggttgttagaaaggctcccaggcaacagtgaaagatggtccggagtcggaagcgagtctgaaatgcctgatataagcatgtcgaggaagagcagtacctcaaccgatcgagctgacggatctccagaagctgatttgcggttacctggccccaatatgaccttcgcccaagctgctgcccacttcctgggtcctttctcgcggcatgtcgctttattctcgatgatttcggcgtgtggaagctgtgtgcacaagtcgtcattttgtatggtgctgctcatggtagcacaacgtctatcgagtcgattgaactctttgatgcggacacatggctcaccgcgtaccccaagcgcagagtcgagctctggtaagctcaccttaacagtttgtggccaacctgttgagtatgatgacgcagttcctctattggccaccttgcttgccggcaaaatctgcaaaatggctgcatcaatactcactgtcaaggcagtctgcactgccgcgcggtggactccgtatgcaaagggatttgaagaattggaaacatctttaagagatcgtatgagcgagctcgagctgatgatgtaa

SEQ ID NO: 26210 - protein, 506 aa, Muscodor strobelii
  misc_feature: SGI Peptide ID NO. 568957
  misc_feature (34)..(72): Pfam Id: PF00172 Pfam Desc: Fungal Zn(2)-Cys(6) binuclear cluster domain
  misc_feature (1)..(66): NCBI GI: 50355607 Blast Desc: transcription factor [Phoma betae]
  misc_feature (1)..(66): NCBI GI: 50355636 Blast Desc: transcription factor [Phoma betae]
  misc_feature (26)..(124): NCBI GI: 256734441 Blast Desc: NECHADRAFT_74715 [Nectria haematococca mpVI 77-13-4]
  misc_feature (1)..(103): NCBI GI: 238839256 Blast Desc: [Microsporum canis CBS 113480]
  misc_feature (1)..(82): NCBI GI: 115492841 Blast Desc: [Aspergillus terreus NIH2624] gi|114197908|gb|EAU39608.1| [Aspergillus terreus NIH2624]
  misc_feature (33)..(78): NCBI GI: 145605403 Blast Desc: MGG_09312 [Magnaporthe grisea 70-15] gi|145013226|gb|EDJ97867.1| MGG_09312 [Magnaporthe grisea 70-15]
  misc_feature (35)..(147): NCBI GI: 116181930 Blast Desc: CHGG_01593 [Chaetomium globosum CBS 148.51] gi|88185890|gb|EAQ93358.1| CHGG_01593 [Chaetomium globosum CBS 148.51]
  misc_feature (3)..(77): NCBI GI: 121705510 Blast Desc: C6 transcription factor, [Aspergillus clavatus NRRL 1] gi|119399164|gb|EAW09592.1| C6 transcription factor, [Aspergillus clavatus NRRL 1]
  misc_feature (33)..(65): NCBI GI: 258568642 Blast Desc: [Uncinocarpus reesii 1704] gi|237906511|gb|EEP80912.1| [Uncinocarpus reesii 1704]
  misc_feature (34)..(140): NCBI GI: 115397261 Blast Desc: conserved [Aspergillus terreus NIH2624] gi|114192413|gb|EAU34113.1| conserved [Aspergillus terreus NIH2624]
MFGTLKAGKKANAGSMVFVEQNKHIRSSSGVPHIACTTCRDRKLKCTGEPTGCKRCRSSHTKCEYPPASEDKRGKGRRTTEPVPPAPEPAESSAAFNAPSLRDNAQKAGGKSADIGLENSNLEFDLSLAGMSDFMNSGSFEEMLLMDSPALLDRMSATGLGIGDSDFLSQLSDIEIPHISPGFPIDPSHFAHGSGSGSGSISSGSTPPGMNLDPALSNNFFVPRAEWQPKPMSVQSPQSTSDKTSNGLRSSMSWTNSVSSKSSPRELSRTNSTTESSKQQQQLKRPLPDSSPSSSDSDSRGEQCRCSEKALRLLERLPGNSERWSGVGSESEMPDISMSRKSSTSTDRADGSPEADLRLPGPNMTFAQAAAHFLGPFSRHVALFSMISACGSCVHKSSFCMVLLMVAQRLSSRLNSLMRTHGSPRTPSAESSSGKLTLTVCGQPVEYDDAVPLLATLLAGKICKMAASILTVKAVCTAARWTPYAKGFEELETSLRDRMSELELMM

SEQ ID NO: 26211 - DNA, 1458 bp, Muscodor strobelii
  misc_feature: SGI cDNA ID NO. 568958
  misc_feature: Encodes the peptide sequence at SEQ ID NO 26212
atggattacacgacgtgcataattgctctgtcggtctgcctctttctcgtcatcaaagtcctacgatcgaaatggcggcttcagccgctggacgcccccctgtttttcaacactaccggagattttcgtgccatgcttcgagaaggttacgagaagggtagtggcgtattccgtattccaacgtccaatctgccgatgtacatcgtatccccgaagtacctgcaggagctgcacaagctaccggagagatctatgagcttcaggcgtgagatgtacgatcgctttttgggacggtacactgcatttgcatctaacgaggatgctatggtcaaggcaatcaagattgacctaaccaaatcgattgacaatcttctccctagcatgtcagaggaagcagattttgcaattgcgaattctgtgaatgcatctcgtgatatttggaccaagatccccctgcacccgacctcaacccgattgatcgcgtatctctctgggcgtacgtttgtcgggctaccgctgtcccgaaatcctgaatggatcgatgctgcaatcaatgttacgctcaatgcaatgggcggatcggggaagctatggcagtatccgtcatggtcttggccgattgttcagtattttctccctgagacgaaaggcgtcaagctttactttgacaagaccgcggaaatgctggtgccgatcctgaatcagaggcgacacgccatggctagtcctgatttcaaaccagtatccgatatgactcaatggcttgtgcaacacgcaaagggcgatgcctggagtctcaaatatcatacccgacagcacattgtcctcaatattgctgcgattcacaccacaagcggacagttaacgaacacgttatacgagcttgcgaaacggcccgaatacctcgaaccgctacgaaaagaattagaagacaatctcgaaaaagatggaagcttgacgaaggctggcctatatagaatgaagaaaatggacagtttcttcagagaggtgcagcggctgagtgtacctgggctcgtttctgtgaaccgcaaggtattgcagcccgtgacgttgtccgacggtacaaacctaccagtaaatacatctattgctgtcgcagctgacgcggtcgctcgggacattcggatctgggataatgcatcagaattcgatggtttcaggttcgagaagctccgcacaacagaagctgacgacaaccaatttcaatttacatccatcaacgagaaaagtcttagttttggacatggtcgatccgcctgccccggtcggttcttcgctgcggcggagctgaaaatccttctgtcgaagctcataatgcagtatgatctgaaacttctcgacagtgacccaggacagatccatggattcttcgaagtcataggaggaccggaccatacccgtgagatactaatcaagccgcgtactgtggctcactag

SEQ ID NO: 26212 - protein, 485 aa, Muscodor strobelii
  misc_feature: SGI Peptide ID NO. 568958
  misc_feature (18)..(480): Pfam Id: PF00067 Pfam Desc: Cytochrome P450
  misc_feature (272)..(480): Pfam Id: PF00067 Pfam Desc: Cytochrome P450
  misc_feature (6)..(482): NCBI GI: 169635726 Blast Desc: cytochrome P450 monooxygenase [Botryotinia fuckeliana]
  misc_feature (30)..(453): NCBI GI: 156045918 Blast Desc: SS1G_09235 [Sclerotinia sclerotiorum 1980] gi|154693631|gb|EDN93369.1| SS1G_09235 [Sclerotinia sclerotiorum 1980]
  misc_feature (57)..(481): NCBI GI: 238845677 Blast Desc: GliF [Microsporum canis CBS 113480]
  misc_feature (43)..(479): NCBI GI: 256724873 Blast Desc: NECHADRAFT_77014 [Nectria haematococca mpVI 77-13-4]
  misc_feature (4)..(484): NCBI GI: 212542733 Blast Desc: cytochrome P450, [Penicillium marneffei ATCC 18224] gi|210066428|gb|EEA20521.1| cytochrome P450, [Penicillium marneffei ATCC 18224]
  misc_feature (41)..(481): NCBI GI: 212542745 Blast Desc: cytochrome P450, [Penicillium marneffei ATCC 18224] gi|210066434|gb|EEA20527.1| cytochrome P450, [Penicillium marneffei ATCC 18224]
  misc_feature (66)..(449): NCBI GI: 238840157 Blast Desc: phoma betae P450 monooxygenase No.2 [Microsporum canis CBS 113480]
  misc_feature (44)..(451): NCBI GI: 67522282 Blast Desc: AN1598.2 [Aspergillus nidulans FGSC A4] gi|40745149|gb|EAA64305.1| AN1598.2 [Aspergillus nidulans FGSC A4]
  misc_feature (44)..(451): NCBI GI: 259486929 Blast Desc: TPA: cytochrome P450, (Eurofung) [Aspergillus nidulans FGSC A4]
  misc_feature (44)..(451): NCBI GI: 119494789 Blast Desc: cytochrome P450 monooxygenase, [Neosartorya fischeri NRRL 181] gi|119412362|gb|EAW22303.1| cytochrome P450 monooxygenase, [Neosartorya fischeri NRRL 181]
  misc_feature (44)..(454): SWISSPROT Homolog: EC 1.14.13.78 Ent-kaurene oxidase
MDYTTCIIALSVCLFLVIKVLRSKWRLQPLDAPLFFNTTGDFRAMLREGYEKGSGVFRIPTSNLPMYIVSPKYLQELHKLPERSMSFRREMYDRFLGRYTAFASNEDAMVKAIKIDLTKSIDNLLPSMSEEADFAIANSVNASRDIWTKIPLHPTSTRLIAYLSGRTFVGLPLSRNPEWIDAAINVTLNAMGGSGKLWQYPSWSWPIVQYFLPETKGVKLYFDKTAEMLVPILNQRRHAMASPDFKPVSDMTQWLVQHAKGDAWSLKYHTRQHIVLNIAAIHTTSGQLTNTLYELAKRPEYLEPLRKELEDNLEKDGSLTKAGLYRMKKMDSFFREVQRLSVPGLVSVNRKVLQPVTLSDGTNLPVNTSIAVAADAVARDIRIWDNASEFDGFRFEKLRTTEADDNQFQFTSINEKSLSFGHGRSACPGRFFAAAELKILLSKLIMQYDLKLLDSDPGQIHGFFEVIGGPDHTREILIKPRTVAH

SEQ ID NO: 26213 - DNA, 453 bp, Muscodor strobelii
  misc_feature: SGI EST ID NO. CUFF.61788.0
  misc_feature: Variant of the nucleotide sequence at SEQ ID NO 26211
cgattgttcagtattttctccctgagacgaaaggcgtcaagctttactttgacaagaccgcggaaatgctggtgccgatcctgaatcagaggcgacacgccatggctagtcctgatttcaaaccagtatccgatatgactcaatggcttgtgcaacacgcaaagggcgatgcctggagtctcaaatatcatacccgacagcacattgtcctcaatattgctgcgattcacaccacaagcggacagttaacgaacacgttatacgagcttgcgaaacggcccgaatacctcgaaccgctacgaaaagaattagaagacaatctcgaaaaagatggaagcttgacgaaggctggcctatatagaatgaagaaaatggacagtttcttcagagaggtgcagcggctgagtgtacctgggctcggtgaacattttcgacagcgggttgatatgcact

SEQ ID NO: 26214 - DNA, 3768 bp, Muscodor strobelii
  misc_feature: SGI cDNA ID NO. 568959
  misc_feature: Encodes the peptide sequence at SEQ ID NO 26215
atgggggccactggctcaacgaagcaaatttcgcctcgtggcggcgtaggggcagctactccagttgccccggtacgattgcttctcgagttgtttgatacgagagactggatagtgatgatcgtgagtggtattgcggctatagtatcaggagcaatattgccaatagtcacggttattgttggaagtgtcgcacagtcgactcgatcatattatcaaggccatacggaagcacaaagtcttacgccgcgaatcgtacaactcgtgtattattacctttatctaaccgcggcgcaatttgtctctgcttatgtatcgactgcgggtttcgtgacgggcggcgagcgcattacgcagaaattacgagaaaagtacctcgaggcggtcctccgacaagacatagcatttttcgacaaccttgcatccggagagatcgctcagcgcattttggacgacattaatcaacttcaagatgcgcttacagggaagctatccctgacccttggatcggtcgcgacatttgtgacggcgttcatcgttattcttattgaaggatggaaattaggcctcatcatgatatccgcaattgtcgcgatcactggaacgatgacagtcggaggctggttcatggtgcgctatgcgaaagtgacagccgtcgctaatgccaacgcagcctctgcggcccaggagtctctcgaggaatatcggcatgttgccgcgatgggtatgcaagacgctctattcacaagatatagcaagctcgtgcatcttgcgagtcgcgcaagtattcgcggacgatgggctcttgctactatgattgctgtcatgaatgccagcattgtctggtcaaatggccttgcgttctgggagggctctcgacttctcgctacgaacgacgagacgctaggagctcttgttactactctactgtcagtttccaccggtgcatttgcattgggaagtattgcaccgcacgtgcaagcgttcgtcgcaagtgttggtgcatcgacgaagatctttgaagtcatccagcgcgagtctgactcggatccacagtcaacaaagggaaaacaactgtcagaagtcaagggtcggattgaactaaagaatgttcttttcaggtacccttcgaggcctgaaacgacagtcctggactcgctaagtcttgtagctgaacctggtcagattactgccctggttggtccgtcggggtccgggaagagcaccatcgtagaactcatagagcgattctacagaccttcagaaggatcgatagagctcgatggtgtcaacgtttcagagctaaatgtcaaatggctacgtcgaaacatcgccatggtcggacaggagccgttcctcttcaatcgatcaatctacgaaaatattagctacggcctcggcgaagaacaacgcagatcgttgtcggcagccgatcttgagaagaggatcatagccgccgctgaagcagccaacgcgatggagttcatcaataatctaccagatggacttcttacaaaagttggcgagcgaggacatctcctatctggtggccagcgacaaagagttgctatcgctagagctattataaaagaaccttctatcttactgctggatgaggtgacttctgcactggacgtcaagtctgaggaacaagtccagaaaggtattgcggccgccgccactgggcgaacaacaatcatcattgcgcacaggctttcgacaatcaaatctgcggacaaaatcgtagtgatgaagaaaggcgcgatcgcagaatcaggcaaacatgatgaattggtgcgacttgacggtatctacgccggtatggtgaccaagcagcacctcgaaaacagaaaagagcgagacgaagccgactccgatgtcgtcatcaagcaggaagtcaacaattcaaatttcgcagacgagaaaaagaccatcgacattcagagcaagctcggcgatgaagaatcgtttgacgacaccccgcagacacagcgtacacccgaatctctcttttcgctttttgccttcgtatatacgctcaataaacccgaaaagtggtatatacttgcaggattggtgttctctgtgctcactggtggcctcactactctcttagcctttttctacgcgagttcgatccaaaccttgacgatcaattcaccgacatcacccaagttcagtagcgaaatctcattttgggggctaatgtggctcacgctgggtctactgttgctgctcttttggtccatccaaggatttgccttcgcctactcggctgagaaactagcgacaagagcgaaagaacagctctttcgatcaatgcttgcacaggacatcgccttctttgaaagcggcgctctagggacaggcaagatcgctgacgtcctctccgcgtcggtaaatggactagcaggtatgagtgcagtcacacttgggacaatactgaactgcgctgggattataatctcggcgattgttgccactcttgctgtagcctggaagatgtctctcgtatgctccgcgacaataccaatcattcttctctctggatgggctcacttgaagattctgtcgattctggaaaagaagtcgaaagctgcctatgaagcatctgcaacttacgcctctgaggcctctacgtcaatgcgaacggtcgcatccctgggacttgagtcgcacatcctaaaggaacatcatatcatccttgagggacaaaggcgattatcggcgatctcgactttcaagtcatctgcgctgtttgccctgtcgcagagtatcaagtaccccgtcgcagcacttgccttctggtggggcgggcgactgattgtctacgatcactacagtcaatttcagtattttttctgttacagtggagtcattgctggtgccttcgcggctggtactgtgttttcatttgcgcctgacatgagccgcgcccgggagagtgcgacgaccatcaaggagattctggagcggaaaccaaagcttggaaacgagaaagggacttgtacgccaatgtctgattgccaaggcgcagtaactttccgcagcacgtcatttgcctatcccggccggcccgatcgtacggttctcaagggctttgatcttcatgtgcggccgggagagtatgtcgcgctttgcggaccaagtggcagcggaaagagcaccattgtatcactgcttgagcgatttcacgatccgactcagggtgcagtactactagacgggcaagatatcagacagatctccctacacgatttcagaaagcagttgtcattggtcagtcaagagtctgctctctttaatgggacgatccgaaataatatcgccctcgggtgctcgtggagagatgtatctgataacgagatccgagatgcctgttcgagggcgaacatcctcgaattcatcgagtccttaccagatggattcgacactgaagtcggagcaagaggggtcatgctctcaggaggtcagcgacaaagaatcagcatagcaagagccttggtgagaaatcccagggtcctgattcttgatgaggcaacttccgcactcgacacagagtcggaacgtgcggttcagcaagcaattggcgaggcggcgaaagacagaactacgatatccattgcgcatcggttgagcacaattcaaagtgccgacagaatcattgtgctcgaaaacggcgagattttggaacaaggcactcacgccgaactactcgatcgcaacggccgctacgcggacatggtccgacagcaaagcgttggctaa

SEQ ID NO: 26215 - protein, 1255 aa, Muscodor strobelii
  misc_feature: SGI Peptide ID NO. 568959
  misc_feature (40)..(319): Pfam Id: PF00664 Pfam Desc: ABC transporter transmembrane region
  misc_feature (688)..(969): Pfam Id: PF00664 Pfam Desc: ABC transporter transmembrane region
  misc_feature (394)..(587): Pfam Id: PF00005 Pfam Desc: ABC transporter
  misc_feature (1041)..(1227): Pfam Id: PF00005 Pfam Desc: ABC transporter
  misc_feature (27)..(1254): NCBI GI: 255932997 Blast Desc: Pc12g11510 [Penicillium chrysogenum Wisconsin 54-1255] gi|211582588|emb|CAP80778.1| Pc12g11510 [Penicillium chrysogenum Wisconsin 54-1255]
  misc_feature (34)..(1255): NCBI GI: 156051760 Blast Desc: SS1G_07287 [Sclerotinia sclerotiorum 1980] gi|154705065|gb|EDO04804.1| SS1G_07287 [Sclerotinia sclerotiorum 1980]
  misc_feature (25)..(1221): NCBI GI: 238839262 Blast Desc: multidrug resistance protein 4 [Microsporum canis CBS 113480]
  misc_feature (36)..(1254): NCBI GI: 145253787 Blast Desc: An17g01770 [Aspergillus niger] gi|134083978|emb|CAK43073.1| protein product [Aspergillus niger]
  misc_feature (36)..(1255): NCBI GI: 121712662 Blast Desc: ABC multidrug transporter Mdr1 [Aspergillus clavatus NRRL 1] gi|119402095|gb|EAW12516.1| ABC multidrug transporter Mdr1 [Aspergillus clavatus NRRL 1]
  misc_feature (36)..(1255): NCBI GI: 5456701 Blast Desc: AF071411_1 multidrug resistance protein MDR [Emericella nidulans] gi|6856159|gb|AAF29805.1|AF173826_1 ABC-transporter [Emericella nidulans]
  misc_feature (34)..(1255): NCBI GI: 242793959 Blast Desc: ABC multidrug transporter Mdr1 [Talaromyces stipitatus ATCC 10500] gi|218718860|gb|EED18280.1| ABC multidrug transporter Mdr1 [Talaromyces stipitatus ATCC 10500]
  misc_feature (34)..(1255): NCBI GI: 212535716 Blast Desc: ABC multidrug transporter Mdr1 [Penicillium marneffei ATCC 18224] gi|210070413|gb|EEA24503.1| ABC multidrug transporter Mdr1 [Penicillium marneffei ATCC 18224]
  misc_feature (36)..(1255): NCBI GI: 121711956 Blast Desc: multidrug resistance protein 1, 2, 3 (p glycoprotein 1, 2, 3) [Aspergillus clavatus NRRL 1] gi|119401745|gb|EAW12167.1| multidrug resistance protein 1, 2, 3
  misc_feature (36)..(1255): NCBI GI: 119498541 Blast Desc: ABC multidrug transporter Mdr1 [Neosartorya fischeri NRRL 181] gi|119414192|gb|EAW24131.1| ABC multidrug transporter Mdr1 [Neosartorya fischeri NRRL 181]
  misc_feature (31)..(1250): SWISSPROT Homolog: EC 3.6.3.44 Xenobiotic-transporting ATPase
MGATGSTKQISPRGGVGAATPVAPVRLLLELFDTRDWIVMIVSGIAAIVSGAILPIVTVIVGSVAQSTRSYYQGHTEAQSLTPRIVQLVYYYLYLTAAQFVSAYVSTAGFVTGGERITQKLREKYLEAVLRQDIAFFDNLASGEIAQRILDDINQLQDALTGKLSLTLGSVATFVTAFIVILIEGWKLGLIMISAIVAITGTMTVGGWFMVRYAKVTAVANANAASAAQESLEEYRHVAAMGMQDALFTRYSKLVHLASRASIRGRWALATMIAVMNASIVWSNGLAFWEGSRLLATNDETLGALVTTLLSVSTGAFALGSIAPHVQAFVASVGASTKIFEVIQRESDSDPQSTKGKQLSEVKGRIELKNVLFRYPSRPETTVLDSLSLVAEPGQITALVGPSGSGKSTIVELIERFYRPSEGSIELDGVNVSELNVKWLRRNIAMVGQEPFLFNRSIYENISYGLGEEQRRSLSAADLEKRIIAAAEAANAMEFINNLPDGLLTKVGERGHLLSGGQRQRVAIARAIIKEPSILLLDEVTSALDVKSEEQVQKGIAAAATGRTTIIIAHRLSTIKSADKIVVMKKGAIAESGKHDELVRLDGIYAGMVTKQHLENRKERDEADSDVVIKQEVNNSNFADEKKTIDIQSKLGDEESFDDTPQTQRTPESLFSLFAFVYTLNKPEKWYILAGLVFSVLTGGLTTLLAFFYASSIQTLTINSPTSPKFSSEISFWGLMWLTLGLLLLLFWSIQGFAFAYSAEKLATRAKEQLFRSMLAQDIAFFESGALGTGKIADVLSASVNGLAGMSAVTLGTILNCAGIIISAIVATLAVAWKMSLVCSATIPIILLSGWAHLKILSILEKKSKAAYEASATYASEASTSMRTVASLGLESHILKEHHIILEGQRRLSAISTFKSSALFALSQSIKYPVAALAFWWGGRLIVYDHYSQFQYFFCYSGVIAGAFAAGTVFSFAPDMSRARESATTIKEILERKPKLGNEKGTCTPMSDCQGAVTFRSTSFAYPGRPDRTVLKGFDLHVRPGEYVALCGPSGSGKSTIVSLLERFHDPTQGAVLLDGQDIRQISLHDFRKQLSLVSQESALFNGTIRNNIALGCSWRDVSDNEIRDACSRANILEFIESLPDGFDTEVGARGVMLSGGQRQRISIARALVRNPRVLILDEATSALDTESERAVQQAIGEAAKDRTTISIAHRLSTIQSADRIIVLENGEILEQGTHAELLDRNGRYADMVRQQSVG

SEQ ID NO: 26216 - DNA, 1084 bp, Muscodor strobelii
  misc_feature: SGI EST ID NO. CUFF.61805.0
  misc_feature: Variant of the nucleotide sequence at SEQ ID NO 26214
cgcggctggtactgtgttttcatttgcgcctgacatgagccgcgcccgggagagtgcgacgaccatcaaggagattctggagcggaaaccaaagcttggaaacgagaaagggacttgtacgccaatgtctgattgccaaggcgcagtaactttccgcagcacgtcatttgcctatcccggccggcccgatcgtacggttctcaagggctttgatcttcatgtgcggccgggagagtatgtcgcgctttgcggaccaagtggcagcggaaagagcaccattgtatcactgcttgagcgatttcacgatccgactcagggtgcagtactactagacgggcaagatatcagacagatctccctacacgatttcagaaagcagttgtcattggtcagtcaagagtctgctctctttaatgggacgatccgaaataatatcgccctcgggtgctcgtggagagatgtatctgataacgagatccgagatgcctgttcgagggcgaacatcctcgaattcatcgagtccttaccagatggattcgacactgaagtcggagcaagaggggtcatgctctcaggaggtcagcgacaaagaatcagcatagcaagagccttggtgagaaatcccagggtcctgattcttgatgaggcaacttccgcactcgacacagagtcggaacgtgcggttcagcaagcaattggcgaggcggcgaaagacagaactacgatatccattgcgcatcggttgagcacaattcaaagtgccgacagaatcattgtgctcgaaaacggcgagattttggaacaaggcactcacgccgaactactcgatcgcaacggccgctacgcggacatggtccgacagcaaagcgttggctaaatgtaaaacatagttctagtctcgattcggacttattggtatcagttcttatgtacatatgataatggtgcgagctttgtctatactcatccactgtccttgtttgacgccggattcggaacgccacgttttgctagatagaggcggccttgtttttataatgggaataatactgattaacccttacttcaaaagtttttccgggta

SEQ ID NO: 26217 - DNA, 1374 bp, Muscodor strobelii
  misc_feature: SGI cDNA ID NO. 568960
  misc_feature: Encodes the peptide sequence at SEQ ID NO 26218
atgcaatgcgtcgccgtgcacttcttcctctttctactactttccccaattgtgcggaggctctggcgttgtctcaaagcacttgacagtctgagatatcgtcacggtattcccttcgtctactttctatgtggtttgttcacgttcttccaagcagtctcatactgctgggaaaatgctactgtcgttgatatcgcccatttcctctcgtgggtctttgaagtattatctgaactttggtcgacaggcaagccggcccctgtcaatcgcgctcgcaccacgcgaccacaagttgtctacagcaaacgcggcccccagaatgtggttcacactgccacggcctactctcctcgcagaatgggcaatatgattgagttcattcaccacaaatggatcttcggtgtcaatgtgattggcactttgagtgagtattaccttcgcttctttaactttgtgtgggaatgtaatctcttctggtatgcactcctcccggtcgctgtttgctactggggcgcgcaggtctggttctacgtgcagcaaaatttcttcgggctattctacgatctcggtcggggtgcgagcgagccaaactttcgtggttgggctttggctcggttccgcgagtggctggcgcatgttaacatcttcactccgcaacgcgttcaccccatgtcggatccgtatcgtggctatctcaacactcttccacaacgcgggggcgaacgcccgattattgacggcgtgactcctcagcgacaaacgactctacgagcacctcctaacacaatagagattctgggccacctgatggaggagttcgtgcgcaatgaccccgatgatcatatcacaattcgggcatcttatcttgaacgcggtctaatggcacttcgacgcacaatcacgaaagccgtcccgttggacgataatggtggtgctagaaaccttgctgatgtcagggactcggctgaccagtttggtggtgagatctaccatccgcatcgtgacggcacctctcacgtcgtacttcatcccgaggatgcacgcgttgtcctcgaagccggatggggtcaacgccatccattcaccgtgcagcaccaattttggaagcgggtatggcaattctattggtataagtacatgaatttccgcttgcctgtacctgaaggtctaatgatcctctattcacctcgtcacgaaggtgatatagaggtaatccgccagattattcgagctgccgtttggaacagtaccggtggtcgcgtcaatcctctcactgcgggtacctatcctgtccctcctgtacccggagctcctaccgttgtccccgataatcgtactgataatgcgcctgtcattatgacatcagataactag

SEQ ID NO: 26218 - protein, 457 aa, Muscodor strobelii
  misc_feature: SGI Peptide ID NO. 568960
  misc_feature (196)..(421): NCBI GI: 171681046 Blast Desc: protein product [Podospora anserina] gi|170940481|emb|CAP65709.1| protein product [Podospora anserina]
  misc_feature (230)..(414): NCBI GI: 145239681 Blast Desc: An08g03700 [Aspergillus niger] gi|134076998|emb|CAK45407.1| protein product [Aspergillus niger]
  misc_feature (186)..(422): NCBI GI: 171696258 Blast Desc: protein product [Podospora anserina] gi|170948371|emb|CAP60535.1| protein product [Podospora anserina]
  misc_feature (186)..(422): NCBI GI: 116182028 Blast Desc: CHGG_01642 [Chaetomium globosum CBS 148.51] gi|88185939|gb|EAQ93407.1| CHGG_01642 [Chaetomium globosum CBS 148.51]
  misc_feature (176)..(418): NCBI GI: 189189464 Blast Desc: conserved [Pyrenophora tritici-repentis Pt-1C-BFP] gi|187972677|gb|EDU40176.1| conserved [Pyrenophora tritici-repentis Pt-1C-BFP]
  misc_feature (180)..(427): NCBI GI: 169607679 Blast Desc: SNOG_06898 [Phaeosphaeria nodorum SN15] gi|160701466|gb|EAT85549.2| SNOG_06898 [Phaeosphaeria nodorum SN15]
  misc_feature (218)..(414): NCBI GI: 225560087 Blast Desc: conserved [Ajellomyces capsulatus G186AR]
  misc_feature (186)..(418): NCBI GI: 258568862 Blast Desc: conserved [Uncinocarpus reesii 1704] gi|237906621|gb|EEP81022.1| conserved [Uncinocarpus reesii 1704]
  misc_feature (218)..(414): NCBI GI: 240278838 Blast Desc: conserved [Ajellomyces capsulatus H143]
  misc_feature (186)..(414): NCBI GI: 261203475 Blast Desc: conserved [Ajellomyces dermatitidis SLH14081] gi|239586736|gb|EEQ69379.1| conserved [Ajellomyces dermatitidis SLH14081]
MQCVAVHFFLFLLLSPIVRRLWRCLKALDSLRYRHGIPFVYFLCGLFTFFQAVSYCWENATVVDIAHFLSWVFEVLSELWSTGKPAPVNRARTTRPQVVYSKRGPQNVVHTATAYSPRRMGNMIEFIHHKWIFGVNVIGTLSEYYLRFFNFVWECNLFWYALLPVAVCYWGAQVWFYVQQNFFGLFYDLGRGASEPNFRGWALARFREWLAHVNIFTPQRVHPMSDPYRGYLNTLPQRGGERPIIDGVTPQRQTTLRAPPNTIEILGHLMEEFVRNDPDDHITIRASYLERGLMALRRTITKAVPLDDNGGARNLADVRDSADQFGGEIYHPHRDGTSHVVLHPEDARVVLEAGWGQRHPFTVQHQFWKRVWQFYWYKYMNFRLPVPEGLMILYSPRHEGDIEVIRQIIRAAVWNSTGGRVNPLTAGTYPVPPVPGAPTVVPDNRTDNAPVIMTSDN

SEQ ID NO: 26219 - DNA, 532 bp, Muscodor strobelii
  misc_feature: SGI EST ID NO. CUFF.61808.0
  misc_feature: Variant of the nucleotide sequence at SEQ ID NO 26217
cgattattgacggcgtgactcctcagcgacaaacgactctacgagcacctcctaacacaatagagattctgggccacctgatggaggagttcgtgcgcaatgaccccgatgatcatatcacaattcgggcatcttatcttgaacgcggtctaatggcacttcgacgcacaatcacgaaagccgtcccgttggacgataatggtggtgctagaaaccttgctgatgtcagggactcggctgaccagtttggtggtgagatctaccatccgcatcgtgacggcacctctcacgtcgtacttcatcccgaggatgcacgcgttgtcctcgaagccggatggggtcaacgccatccattcaccgtgcagcaccaattttggaagcgggtatggcaattctattggtataagtacatgaatttccgcttgcctgtacctgaaggtctaatgatcctctattcacctcgtcacgaaggtgatatagaggtaatccgccagattattcgagctgccgtttggaacagtaccggtggtcg

SEQ ID NO: 26220 - DNA, 1032 bp, Muscodor strobelii
  misc_feature: SGI cDNA ID NO. 568961
  misc_feature: Encodes the peptide sequence at SEQ ID NO 26221
atgaatccttcaatacaaaaacaggctcaatcccatgtgagcagcgaggatgaaaggatcgacagcgctgacgatccatcatcactcccattttacaagcggaaaaaggtcattttcatcattgtcggcgccatggttgcagtaatagctctcgcattaggtcttggcctcggacttggccttgctgaagcttgcgatgggcacaagcaatctacgacatcagctgcgagcccaacttcgagtactgcgagcccgaccgccacgactaattcaatcagtggaaccaatgatggtgatgttgctcagccgacagttggaaccacttgggactaccctcttggtttctccctcacaacttcaaatgtgaaggccagcacagtcttctacccagtggatctcgaggatacatctgccgacactatctcgaaacttacaagcgcaggtcacacgatagtctgctacttcagcgctggcagttacgaggactggcgtgaggacgccgaccagtttcctaaatctgccataggcaatgggcttgatgggtgggagggtgagaactggcttgacacaaccgactcgactgtccgcagcattatggcagctcgcattcaaagtgccgccgataagggctgcgttggaatagatgctgacaacatcgacggctacggcaacgactctggtttcgacctgactgaagatactgccgtcgactacatcaccttccttgctgatacggcacacggtctgggcttggcgtacggcctcaagaacggcggtgatatcgtcaaaagagtgattgacgtatccgagtgggttattaacgagcagtgcgctgcgtacgaggaatgtgacctgtatgccccgtttattagcgctggcaagcccgtcttccacgtcgaatacaccgatgacgacgacgctacctcggtcagctcatccgcgctcgcaaaggcctgcgatgcatctggccaaagcggattctcaactgttgtcaagcacatgtcccttgataactgggctgtgtactgctaa

SEQ ID NO: 26221 - protein, 343 aa, Muscodor strobelii
  misc_feature: SGI Peptide ID NO. 568961
  misc_feature (76)..(343): NCBI GI: 242812117 Blast Desc: endo alpha-1,4 polygalactosaminidase, [Talaromyces stipitatus ATCC 10500] gi|218714231|gb|EED13654.1| endo alpha-1,4 polygalactosaminidase, [Talaromyces stipitatus ATCC 10500]
  misc_feature (100)..(343): NCBI GI: 259486105 Blast Desc: TPA: endo alpha-1,4 polygalactosaminidase, (AFU_orthologue; AFUA_3G07890) [Aspergillus nidulans FGSC A4]
  misc_feature (100)..(339): NCBI GI: 67524991 Blast Desc: AN2953.2 [Aspergillus nidulans FGSC A4] gi|40744348|gb|EAA63524.1| AN2953.2 [Aspergillus nidulans FGSC A4]
  misc_feature (40)..(343): NCBI GI: 255932111 Blast Desc: Pc12g07780 [Penicillium chrysogenum Wisconsin 54-1255] gi|211582231|emb|CAP80405.1| Pc12g07780 [Penicillium chrysogenum Wisconsin 54-1255]
  misc_feature (97)..(343): NCBI GI: 212544304 Blast Desc: endo alpha-1,4 polygalactosaminidase, [Penicillium marneffei ATCC 18224] gi|210065275|gb|EEA19369.1| endo alpha-1,4 polygalactosaminidase, [Penicillium marneffei ATCC 18224]
  misc_feature (36)..(343): NCBI GI: 169767870 Blast Desc: [Aspergillus oryzae RIB40] gi|238484787|ref|XP_002373632.1| endo alpha-1,4 polygalactosaminidase, [Aspergillus flavus NRRL3357] protein endo
  misc_feature (7)..(343): NCBI GI: 46136739 Blast Desc: FG09885.1 [Gibberella zeae PH-1]
  misc_feature (102)..(343): NCBI GI: 71000261 Blast Desc: endo alpha-1,4 polygalactosaminidase [Aspergillus fumigatus Af293] gi|66852462|gb|EAL92787.1| endo alpha-1,4 polygalactosaminidase, [Aspergillus fumigatus Af293] endo A1163]
  misc_feature (102)..(343): NCBI GI: 121705082 Blast Desc: endo alpha-1,4 polygalactosaminidase, [Aspergillus clavatus NRRL 1] gi|119398950|gb|EAW09378.1| endo alpha-1,4 polygalactosaminidase, [Aspergillus clavatus NRRL 1]
  misc_feature (102)..(343): NCBI GI: 119492620 Blast Desc: endo alpha-1,4 polygalactosaminidase, [Neosartorya fischeri NRRL 181] gi|119411814|gb|EAW21757.1| endo alpha-1,4 polygalactosaminidase, [Neosartorya fischeri NRRL 181]
MNPSIQKQAQSHVSSEDERIDSADDPSSLPFYKRKKVIFIIVGAMVAVIALALGLGLGLGLAEACDGHKQSTTSAASPTSSTASPTATTNSISGTNDGDVAQPTVGTTWDYPLGFSLTTSNVKASTVFYPVDLEDTSADTISKLTSAGHTIVCYFSAGSYEDWREDADQFPKSAIGNGLDGWEGENWLDTTDSTVRSIMAARIQSAADKGCVGIDADNIDGYGNDSGFDLTEDTAVDYITFLADTAHGLGLAYGLKNGGDIVKRVIDVSEWVINEQCAAYEECDLYAPFISAGKPVFHVEYTDDDDATSVSSSALAKACDASGQSGFSTVVKHMSLDNWAVYC

SEQ ID NO: 26222 - DNA, 1629 bp, Muscodor strobelii
  misc_feature: SGI EST ID NO. CUFF.61855.0
  misc_feature: Variant of the nucleotide sequence at SEQ ID NO 26220
taattatctcatctccccgcatccggcctaagcctcagtgcgattgggagccctcacacgccagtcatcatcgtcgcattatttaagccaagccacgttcgcccgtagacagccctagggggtgttcttttgtcaaaaaagcttaaatcatttagcttagagctgaaaacaaggcgtagacgtgatcattcacgatcgtcagcagggttcgcggttccgccgtggttcccttgaaacgagaggctagaaattgctgtgtttcatcgcagcttggaggatctctgccggtcaataggggctgcattgtgtaacaatgaatccttcaatacaaaaacaggctcaatcccatgtgagcagcgaggatgaaaggatcgacagcgctgacgatccatcatcactcccattttacaagcggaaaaaggtcattttcatcattgtcggcgccatggttgcagtaatagctctcgcattaggtcttggcctcggacttggccttgctgaagcttgcgatgggcacaagcaatctacgacatcagctgcgagcccaacttcgagtactgcgagcccgaccgccacgactaattcaatcagtggaaccaatgatggtgatgttgctcagccgacagttggaaccacttgggactaccctcttggtttctccctcacaacttcaaatgtgaaggccagcacagtcttctacccagtggatctcgaggatacatctgccgacactatctcgaaacttacaagcgcaggtcacacgatagtctgctacttcagcgctggcagttacgaggactggcgtgaggacgccgaccagtttcctaaatctgccataggcaatgggcttgatgggtgggagggtgagaactggcttgacacaaccgactcgactgtccgcagcattatggcagctcgcattcaaagtgccgccgataagggctgcgttggaatagatgctgacaacatcgacggctacggcaacgactctggtttcgacctgactgaagatactgccgtcgactacatcaccttccttgctgatacggcacacggtctgggcttggcgtacggcctcaagaacggcggtgatatcgtcaaaagagtgattgacgtatccgagtgggttattaacgagcagtgcgctgcgtacgaggaatgtgacctgtatgccccgtttattagcgctggcaagcccgtcttccacgtcgaatacaccgatgacgacgacgctacctcggtcagctcatccgcgctcgcaaaggcctgcgatgcatctggccaaagcggattctcaactgttgtcaagcacatgtcccttgataactgggctgtgtactgctaaagtggacaatctcatgcaaacagtaaacatttcgttggagacgaacatctatgattgtgtacattacttcttatgtgtatatagcacttcctttcttgtcacatacttcgtcgaatagatgttctcttttgacacaaaatagcggcccggaacttgctcgtagccatgcatcttcggtgtgtgtaaagataccagcttcaaagctcaagcctcctgcatatgggaagtgattgcgtcagcagagcaatcaatgcgattgcatcatttgctccttgggtatcggc

SEQ ID NO: 26223 - DNA, 834 bp, Muscodor strobelii
  misc_feature: SGI cDNA ID NO. 568962
  misc_feature: Encodes the peptide sequence at SEQ ID NO 26224
atgatcatcacaaagctagtcgcagcatcatgtgcattttcatgtctggtatctgcggctggggtgtacgagcgccccctcgcctacgtttatgcgctcagtggcggcaaggcgttacctcaatatagtgacgactatatcgttgaacaattcaagaaggtcgatcgtggtatcactgccctcgtccccttcatgctcaacgttgtgaatcctgagaaatacaagccgttcatcacgaggctgcaggggatgaacatcacgattatccctgcagtaggtggcccgccagccaacgatgatctctcgtctcccgacagtctagctatcatcgacggctacaaacagttcggcgattatatccgatttgaaactggcgcgggctatatagagaaatggggtgttcagactatccaaaaggcagtcacatatgctgccaaaaacggtttcaaacacatcatggtgaacccttggcctgtccaagatgggaaagctgtcgagctcaccggtcccgtcgaagcgtcgttcgacaatgtgctaggagaggcgccggagaagtggtatccctcaaatcagaagagaatcgagctcatccgcgattacaagaaaagcgtcgagattctcgtcaactacgagagcccaggtcagcaaatagagctcgctaacgccgggaaagcagctgcaatcaaagatatgcagatcactgtcgaccagatcaatggacagtacaggagcgaaaatctacgctgggctccaccactaggaggttcatatgatgccttcgatctgggcacttgggattggattgcgaggactctcagcaaacagggtgaatga

SEQ ID NO: 26224 - protein, 277 aa, Muscodor strobelii
  misc_feature: SGI Peptide ID NO. 568962
MIITKLVAASCAFSCLVSAAGVYERPLAYVYALSGGKALPQYSDDYIVEQFKKVDRGITALVPFMLNVVNPEKYKPFITRLQGMNITIIPAVGGPPANDDLSSPDSLAIIDGYKQFGDYIRFETGAGYIEKWGVQTIQKAVTYAAKNGFKHIMVNPWPVQDGKAVELTGPVEASFDNVLGEAPEKWYPSNQKRIELIRDYKKSVEILVNYESPGQQIELANAGKAAAIKDMQITVDQINGQYRSENLRWAPPLGGSYDAFDLGTWDWIARTLSKQGE

SEQ ID NO: 26225 - DNA, 1385 bp, Muscodor strobelii
  misc_feature: SGI EST ID NO. CUFF.61824.0
  misc_feature: Variant of the nucleotide sequence at SEQ ID NO 26223
gtcggtacttataggattcagcttcaggatcagaacgagaaggtaaagctggagataatcaacacttatgcatgcgacagccatcatccatctcgctgctgcagagagtagatcaagacaagaaggcagatcatgtttgccgcgagcctcttgccattccacacgaactaacacagctagaccccaacaccatccaaaatggttgcgggatatggttgccaacgttacactagacatagaatacaaaatggacatttagcgcccgcagtctgagaggtgtatactcctcctccttatcatcccataaaacactacgaaagcacatttacaatgatcatcacaaagctagtcgcagcatcatgtgcattttcatgtctggtatctgcggctggggtgtacgagcgccccctcgcctacgtttatgcgctcagtggcggcaaggcgttacctcaatatagtgacgactatatcgttgaacaattcaagaaggtcgatcgtggtatcactgccctcgtccccttcatgctcaacgttgtgaatcctgagaaatacaagccgttcatcacgaggctgcaggggatgaacatcacgattatccctgcagtaggtggcccgccagccaacgatgatctctcgtctcccgacagtctagctatcatcgacggctacaaacagttcggcgattatatccgatttgaaactggcgcgggctatatagagaaatggggtgttcagactatccaaaaggcagtcacatatgctgccaaaaacggtttcaaacacatcatggtgaacccttggcctgtccaagatgggaaagctgtcgagctcaccggtcccgtcgaagcgtcgttcgacaatgtgctaggagaggcgccggagaagtggtatccctcaaatcagaagagaatcgagctcatccgcgattacaagaaaagcgtcgagattctcgtcaactacgagagcccaggtcagcaaatagagctcgctaacgccgggaaagcagctgcaatcaaagatatgcagatcactgtcgaccagatcaatggacagtacaggagcgaaaatctacgctgggctccaccactaggaggttcatatgatgccttcgatctgggcacttgggattggattgcgaggactctcagcaaacagggtgaatgagagttcagccttcagacaacgcggctgcaacgaggcgactgacagaggacgctcctcatatcccgcgagaggttcccgaccgacgactagcagggcagctaacggtcacatgtaaatgcagacttctcttgaaaagtcacagatttgtgcaacgcctataattctttactaaactcaatatcatctctgtgagacattgctagcgaacagagcatcgttcg

SEQ ID NO: 26226 - DNA, 651 bp, Muscodor strobelii
  misc_feature: SGI cDNA ID NO. 568963
  misc_feature: Encodes the peptide sequence at SEQ ID NO 26227
atgctgaagcggaagcgcgaaagatcagaggacatcgcaccggcacgcctgagcgatccggatcctcccataaaaatcgaaccccgagcggaagatgatatccataccagaccagagttcgaagaagtttacattaagaatgatcccgacgacccgatgattccgagactcaaaaacagcacgaaagcgacttcgaagcaaaaaagcaaaaggaagggaaacaaaccgaaattgccacacgtcataacggccaacgccaagataacgcctataatctacatcaatcctcgtaaacatgtgtattgtcaaccggttctgccgcggcagcttagaagctggtcccccgattattactggctgagggtaacggataagagacgtactgtgatcaagatcaagttctggggacgggatctgatagaactagccgtcccaaaggcgatcgtcttcaaatatgacatgtgccgtccaccgccagatccagacaaggcgccggctatatttcgtttctacggtgaattccgcgaccgggaactctacgagaagtttgccgagaaacagcaggccacactggaggggatgagtgccatcgggcgaggtagcggaagcgaggaagatggagaaagaaagcaaagagcaatggaaccatga

SEQ ID NO: 26227 - protein, 216 aa, Muscodor strobelii
  misc_feature: SGI Peptide ID NO. 568963
MLKRKRERSEDIAPARLSDPDPPIKIEPRAEDDIHTRPEFEEVYIKNDPDDPMIPRLKNSTKATSKQKSKRKGNKPKLPHVITANAKITPIIYINPRKHVYCQPVLPRQLRSWSPDYYWLRVTDKRRTVIKIKFWGRDLIELAVPKAIVFKYDMCRPPPDPDKAPAIFRFYGEFRDRELYEKFAEKQQATLEGMSAIGRGSGSEEDGERKQRAMEP

SEQ ID NO: 26228 - DNA, 1476 bp, Muscodor strobelii
  misc_feature: SGI cDNA ID NO. 568964
  misc_feature: Encodes the peptide sequence at SEQ ID NO 26229
atgtcgtcgtcgccggcacgcaagcgggatagcgacgatgatgcctcaaatgaaaacaggcatagctttgaggctaccagtgccagagcatcagaagataacgacaccaccagccgggacgcgctcttaagccaagaccccatcgccatatcgtcaatcgcttctttagagccggcatcagacatcaatgtcggcgcgccagcaaaaagaaacatcaagttgaaaatcgcagcagcgacatactcattcttcctggttggattcataccttcagctatcggcgtcataattccccacctcgaggagcattactccctaggtgacgccgtcgtgtcactcatctttgtctgctcgcctttgggctatatcgctgcggccttcacgaacagcttcatccacctgaactggggtcagcggggtatcgcgttctttgcttcgtcgtgtgcaataatattcaccttcgtcgcgtgctttcatcccccttatccggtctttctcctcttcgcggtgttgtattactatggcgccggcctactagatggctcctggtcggcatgggcaggcggcatgaagaatgcgaatatcgttcagggtatactacacagtggactatctatcggggccagtatagggccgatccttgctggcgcgttaatagagctgggaaagaacccttggtatagatggtactatgtactgactcccctcaccgtcgtcgaagccgtcgtcctgctttgggcgttttggtatgatgatggggatatgtatcgctcgcaataccacgacagccgcgatgacgacggcgatgattctgacatcagcaaatgggcacccttcaaacatgtagtcacatggatttgcggcgtttattttctatcatatgttgggagcgaagcttcaatcaatggatggatcgtcacgttcatgcgccgcgtccgcgaagcagacccgtatctagcaagcctcagctcgtccttcttctggattggagtgactctaggccgcatcactctggggtatgtcactgatcgagcaggtgtacgcatggccactaccgtatacatcgtcttcgccattctcctacaggctatattcgcattcataccttcacctaccctctctgcagtaattattctcttcatcggatacttctttgggcctttgtttccgagcgggctagtcatgttgacgaggtccttggaccgctcattgcatgttcgtgctgttgccattgctgtgacgttcggacagattggcggtgcattgatcccgtctggtctgggtgctctgtcggagatggttggcatgaaggtctttcaggcagttatcttcgcatggctgttagtcacactagcgctttggtgtagtttccctagcttgcctgccgagggtgaagatagatataagcgtgtacaaggtgaggatgagagtgatgaaaggcggcgaagtgaagaagagacgcccatgatggcttga

SEQ ID NO: 26229 - protein, 491 aa, Muscodor strobelii
  misc_feature: SGI Peptide ID NO. 568964
  misc_feature (79)..(424): Pfam Id: PF07690 Pfam Desc: Major Facilitator Superfamily
  misc_feature (82)..(479): NCBI GI: 169623642 Blast Desc: SNOG_15065 [Phaeosphaeria nodorum SN15] gi|111056488|gb|EAT77608.1| SNOG_15065 [Phaeosphaeria nodorum SN15]
  misc_feature (73)..(460): NCBI GI: 189210810 Blast Desc: conserved [Pyrenophora tritici-repentis Pt-1C-BFP] gi|187977829|gb|EDU44455.1| conserved [Pyrenophora tritici-repentis Pt-1C-BFP]
  misc_feature (1)..(465): NCBI GI: 242802937 Blast Desc: MFS transporter, [Talaromyces stipitatus ATCC 10500] gi|218717419|gb|EED16840.1| MFS transporter, [Talaromyces stipitatus ATCC 10500]
  misc_feature (75)..(460): NCBI GI: 46111049 Blast Desc: FG02406.1 [Gibberella zeae PH-1]
  misc_feature (25)..(482): NCBI GI: 171690146 Blast Desc: protein product [Podospora anserina] gi|170945021|emb|CAP71132.1| protein product [Podospora anserina]
  misc_feature (2)..(465): NCBI GI: 189189700 Blast Desc: conserved [Pyrenophora tritici-repentis Pt-1C-BFP] gi|187972795|gb|EDU40294.1| conserved [Pyrenophora tritici-repentis Pt-1C-BFP]
  misc_feature (78)..(458): NCBI GI: 255943945 Blast Desc: Pc20g01810 [Penicillium chrysogenum Wisconsin 54-1255] gi|211587475|emb|CAP85510.1| Pc20g01810 [Penicillium chrysogenum Wisconsin 54-1255]
  misc_feature (81)..(483): NCBI GI: 169597887 Blast Desc: SNOG_01735 [Phaeosphaeria nodorum SN15] gi|160707611|gb|EAT91384.2| SNOG_01735 [Phaeosphaeria nodorum SN15]
  misc_feature (69)..(465): NCBI GI: 240277266 Blast Desc: MFS transporter [Ajellomyces capsulatus H143]
  misc_feature (21)..(481): NCBI GI: 46116926 Blast Desc: FG04305.1 [Gibberella zeae PH-1]
MSSSPARKRDSDDDASNENRHSFEATSARASEDNDTTSRDALLSQDPIAISSIASLEPASDINVGAPAKRNIKLKIAAATYSFFLVGFIPSAIGVIIPHLEEHYSLGDAVVSLIFVCSPLGYIAAAFTNSFIHLNWGQRGIAFFASSCAIIFTFVACFHPPYPVFLLFAVLYYYGAGLLDGSWSAWAGGMKNANIVQGILHSGLSIGASIGPILAGALIELGKNPWYRWYYVLTPLTVVEAVVLLWAFWYDDGDMYRSQYHDSRDDDGDDSDISKWAPFKHVVTWICGVYFLSYVGSEASINGWIVTFMRRVREADPYLASLSSSFFWIGVTLGRITLGYVTDRAGVRMATTVYIVFAILLQAIFAFIPSPTLSAVIILFIGYFFGPLFPSGLVMLTRSLDRSLHVRAVAIAVTFGQIGGALIPSGLGALSEMVGMKVFQAVIFAWLLVTLALWCSFPSLPAEGEDRYKRVQGEDESDERRRSEEETPMMA

SEQ ID NO: 26230 - DNA, 2711 bp, Muscodor strobelii
  misc_feature: SGI EST ID NO. CUFF.61934.1
  misc_feature: Variant of the nucleotide sequence at SEQ ID NO 26228
caccgttttaggcccctgtcacgtcattcgctgccattattatcgtcaacttcaggagcgttgcttctcaacttcctcatacctatcccagtatcagcatgtcgtcgtcgccggcacgcaagcgggatagcgacgatgatgcctcaaatgaaaacaggcatagctttgaggctaccagtgccagagcatcagaagataacgacaccaccagccgggacgcgctcttaagccaagaccccatcgccatatcgtcaatcgcttctttagagccggcatcagacatcaatgtcggcgcgccagcaaaaagaaacatcaagttgaaaatcgcagcagcgacatactcattcttcctggttggattcataccttcagctatcggcgtcataattccccacctcgaggagcattactccctaggtgacgccgtcgtgtcactcatctttgtctgctcgcctttgggctatatcgctgcggccttcacgaacagcttcatccacctgaactggggtcagcggggtatcgcgttctttgcttcgtcgtgtgcaataatattcaccttcgtcgcgtgctttcatcccccttatccggtctttctcctcttcgcggtgttgtattactatggcgccggcctactagatggctcctggtcggcatgggcaggcggcatgaagaatgcgaatatcgttcagggtatactacacagtggactatctatcggggccagtatagggccgatccttgctggcgcgttaatagagctgggaaagaacccttggtatagatggtactatgtactgactcccctcaccgtcgtcgaagccgtcgtcctgctttgggcgttttggtatgatgatggggatatgtatcgctcgcaataccacgacagccgcgatgacgacggcgatgattctgacatcagcaaatgggcacccttcaaacatgtagtcacatggatttgcggcgtttattttctatcatatgttgggagcgaagcttcaatcaatggatggatcgtcacgttcatgcgccgcgtccgcgaagcagacccgtatctagcaagcctcagctcgtccttcttctggattggagtgactctaggccgcatcactctggggtatgtcactgatcgagcaggtgtacgcatggccactaccgtatacatcgtcttcgccattctcctacaggctatattcgcattcataccttcacctaccctctctgcagtaattattctcttcatcggatacttctttgggcctttgtttccgagcgggctagtcatgttgacgaggtccttggaccgctcattgcatgttcgtgctgttgccattgctgtgacgttcggacagattggcggtgcattgatcccgtctggtctgggtgctctgtcggagatggttggcatgaaggtctttcaggcagttatcttcgcatggctgttagtcacactagcgctttggtgtagtttccctagcttgcctgccgagggtgaagatagatataagcgtgtacaaggtgaggatgagagtgatgaaaggcggcgaagtgaagaagagacgcccatgatggcttgatgagcttaagaagttaaagcttgcatatagttcggtcgttggtgggcataagtaatgcatagcaacgattccgaatgagaagttcgagttcgctctaatcccttccgagaaatgctgcactaaaattcctcccagagccttccatgtgtcttcagacactcaggcataatccctagttcatggttccattgctctttgctttctttctccatcttcctcgcttccgctacctcgcccgatggcactcatcccctccagtgtggcctgctgtttctcggcaaacttctcgtagagttcccggtcgcggaattcaccgtagaaacgaaatatagccggcgccttgtctggatctggcggtggacggcacatgtcatatttgaagacgatcgcctttgggacggctagttctatcagatcccgtccccagaacttgatcttgatcacagtacgtctcttatccgttaccctcagccagtaataatcgggggaccagcttctaagctgccgcggcagaaccggttgacaatacacatgtttacgaggattgatgtagattataggcgttatcttggcgttggccgttatgacgtgtggcaatttcggtttgtttcccttccctgtaaacgaaatgtgaagcccatgtccaatatgactctctgttggatcgaaagggcaatggtctataagatcctcggagaacagccaatacttcttcgcgaaatcaattgggcttctttttttgacctgtttcggtcgcgcttcctcagcttaatgcgtgaattcgaccaagagaccattttagcgaaaatgtctccagcttcctgtcgatacttttgcttttttgcttcgaagtcgctttcgtgctgtttttgagtctcggaatcatcgggtcgtcgggatcattcttaatgtaaacttcttcgaactctggtctggtatggatatcatcttccgctcggggttcgatttttatgggaggatccggatcgctcaggcgtgccggtgcgatgtcctctgatctttcgcgcttccgcttcagcatggtgagtgagggttttccttcggagatgataacaaccgcaaataattgtaagacgtctgtaaacgatgtatgatccgttgttaccaaacatgtat

SEQ ID NO: 26231 - DNA, 1689 bp, Muscodor strobelii
  misc_feature: SGI cDNA ID NO. 568965
  misc_feature: Encodes the peptide sequence at SEQ ID NO 26232
atgaatgagataccagagggcttcatcgccaactacacccagaaaatgaatgcctcctcttctagagcccctagggcttctgtggactcgaatatgtctacgaatgcacagcgaatggcggaactccgtgctgagatgaggacgaatcaggagcagattgagcgtctgacacatgctcatcaggctatcaaagatgccgtttctgggatccacgccagtcaagatctcctgatggttaccccgcgccaggccgtcaacgaaacggccgccctcgtcgatgatgcagcagccacccgaacggcaaacatgagggcagatgaacgatgtttggcccaaggttcctctggcacacccgagcagcagcaaaatcagcagcctaagaccgataaagaaggctgggtcgacgatggctactatcaacagaatccatggtatggcgagaagaagaaaaagcccgtctacagtctaggaggacctcttccgcaccgcaaccggttcagcaaacagaagaagaacaaaaagggcaaagccaaaggaaacggggatctggagaaaggtgaaggaaacgtgtcatcatcgaaacctcctagcaaccaccgacagatatcagatgacacgttgagagctggcactgatgaggatgtcgactaccacgaggggacaggcaagacaacacagaacaatccctggaatgtcgacttcaaagaaggcatgagtggtggtcacagtgccgagaaggcacctggctacgaagatgggtcgaagtacaaagtcgacggcgagcccgttggccagcgagaggacgatgaggctgaagagggtggagaaaatcccgacgagcttcgcaactggtgggctcgactgagaaacaagtaccctgagcctctcgccgagtttctatgtacggccatgtccactttcctgggtatctgcgcaaccttgagtatcaacttgtcatccaagcaagagaaccagtatgggtcatatgaaactgcttgttgggcttggggctttgcctttatggttggcatctatattggcggtggcatcagcggtgcacacatgaacccggcaatatcgatctgcctgtctatcttccgaggctttccttggcgccaatgcggcatatatatagtcatccagtttattgcgtcctttaccgctgctgctctagcttatgcagtgtactatgatgccattcactatgttgacccggatatgacatcgtcttacaagaacttcttttcgtatccccaggaatgggtgacaaacggcggcgccctcgtgacacaattcgttgcaggtggtgttatgacaatctcggtctttgctcttggtgatgatcagaacaatcctccgggagcggggatgcatgccgttgtgcttggctttcttcaagtcgcacttaagatgtcattgggatataacaccggctcggccttaaatccagcttcggacttcggcccacgtgttctcacctatgtggttggttatcgaacacaagagcagttccagaatgcatggtggatttatgggccctgggctggagccctcgctgggtcaatcgcgggctgtgttatatacgacggcttcatcttcactggctccgaatcccccattaattaccgcctaccgaagtctctgaaaacaagactatccaagctcactaaggtcaccaagaagtcttaa

SEQ ID NO: 26232 - protein, 562 aa, Muscodor strobelii
  misc_feature: SGI Peptide ID NO. 568965
  misc_feature (280)..(528): Pfam Id: PF00230 Pfam Desc: Major intrinsic protein
  misc_feature (296)..(528): Pfam Id: PF00230 Pfam Desc: Major intrinsic protein
  misc_feature (100)..(549): NCBI GI: 46115876 Blast Desc: FG03780.1 [Gibberella zeae PH-1]
  misc_feature (81)..(546): NCBI GI: 189210804 Blast Desc: glycerol uptake facilitator protein [Pyrenophora tritici-repentis Pt-1C-BFP] gi|187977826|gb|EDU44452.1| glycerol uptake facilitator protein [Pyrenophora tritici-repentis
  misc_feature (257)..(560): NCBI GI: 169623674 Blast Desc: SNOG_15081 [Phaeosphaeria nodorum SN15] gi|160705023|gb|EAT77624.2| SNOG_15081 [Phaeosphaeria nodorum SN15]
  misc_feature (133)..(561): NCBI GI: 238497285 Blast Desc: aquaporin, [Aspergillus flavus NRRL3357] gi|220694758|gb|EED51102.1| aquaporin, [Aspergillus flavus NRRL3357]
  misc_feature (132)..(551): NCBI GI: 121704501 Blast Desc: MIP transporter, [Aspergillus clavatus NRRL 1] gi|119398659|gb|EAW09088.1| MIP transporter, [Aspergillus clavatus NRRL 1]
  misc_feature (133)..(557): NCBI GI: 156061255 Blast Desc: SS1G_02770 [Sclerotinia sclerotiorum 1980] gi|154700174|gb|EDN99912.1| SS1G_02770 [Sclerotinia sclerotiorum 1980]
  misc_feature (115)..(561): NCBI GI: 119501641 Blast Desc: MIP transporter, [Neosartorya fischeri NRRL 181] gi|119415743|gb|EAW25680.1| MIP transporter, [Neosartorya fischeri NRRL 181]
  misc_feature (262)..(561): NCBI GI: 145248249 Blast Desc: An13g02350 [Aspergillus niger] gi|134081124|emb|CAK41634.1| protein product [Aspergillus niger]
  misc_feature (221)..(542): NCBI GI: 154308225 Blast Desc: BC1G_07858 [Botryotinia fuckeliana B05.10] gi|150852943|gb|EDN28135.1| BC1G_07858 [Botryotinia fuckeliana B05.10]
  misc_feature (279)..(542): NCBI GI: 156058820 Blast Desc: SS1G_03422 [Sclerotinia sclerotiorum 1980] gi|154701209|gb|EDO00948.1| SS1G_03422 [Sclerotinia sclerotiorum 1980]
MNEIPEGFIANYTQKMNASSSRAPRASVDSNMSTNAQRMAELRAEMRTNQEQIERLTHAHQAIKDAVSGIHASQDLLMVTPRQAVNETAALVDDAAATRTANMRADERCLAQGSSGTPEQQQNQQPKTDKEGWVDDGYYQQNPWYGEKKKKPVYSLGGPLPHRNRFSKQKKNKKGKAKGNGDLEKGEGNVSSSKPPSNHRQISDDTLRAGTDEDVDYHEGTGKTTQNNPWNVDFKEGMSGGHSAEKAPGYEDGSKYKVDGEPVGQREDDEAEEGGENPDELRNWWARLRNKYPEPLAEFLCTAMSTFLGICATLSINLSSKQENQYGSYETACWAWGFAFMVGIYIGGGISGAHMNPAISICLSIFRGFPWRQCGIYIVIQFIASFTAAALAYAVYYDAIHYVDPDMTSSYKNFFSYPQEWVTNGGALVTQFVAGGVMTISVFALGDDQNNPPGAGMHAVVLGFLQVALKMSLGYNTGSALNPASDFGPRVLTYVVGYRTQEQFQNAWWIYGPWAGALAGSIAGCVIYDGFIFTGSESPINYRLPKSLKTRLSKLTKVTKKS

SEQ ID NO: 26233 - DNA, 1047 bp, Muscodor strobelii
  misc_feature: SGI cDNA ID NO. 568966
  misc_feature: Encodes the peptide sequence at SEQ ID NO 26234
atgtccactcagacagtattccgactcacctcgaagacaggcttcgaagcaatcaaagcagtccaagagccaatcccagtccctgccgctcatgaagtcctcatcagaattcgaggcgtgggtctaaactatcgtgatatcgccatcgcgaacgatacttatcccctatattcgaaacccaatgtaatactatgcagcgatatggcgggcgaagtggtgtctgttggtgatcacgtcagagagctggctgtgggtgatttggtcacctcgccagtgagcctcgtcgcagattacggctatgttcataaccaagcagcgccaacactcgctggggatgtcgacggagtattgcgacagtacatgacccttgctgcgaatgttccggtcaagttacccaagtcttcgccgtacagtctcgctcaatgggcatccctcgctggcgtaggcatgactgcttggaacaccttttatgggaataaagcgctggttcccggcgacgtagtattgctacaaggaaccggaggcgtatcgctagctgcggcgatgctcgcaaaagctgccggtgcaaaagtcatcttgacctcatccagcgacaagaagctcgcgtttgtaaaatcaaaatacaatgtcgactataccatcaactacaagaccacgccgaactggggtgctgaggtcaatcgcatcacggacgggcacggtgctgatcacatactagaagttggcgggcttgagacatttaagcaaagcctggagtgcgttgcacaaggtggtgtgttgtcagtcatcggatttctaacgggcaacccgcagggcgagaagatgcctgatgttgctatggcagcatttgtcaagaactgtgtgatccgtggcatacttgccgggacgcgacagaatttggaagactgcatgaggttcatggtcaatgctaagcctctccacatagtagacagagtcttcgactttaaccgagacgatatcatcgctgcattgaagtacctcgaatctggcaagaatgttgggaaagtgtgcattagtctcgattag

SEQ ID NO: 26234 - protein, 348 aa, Muscodor strobelii
  misc_feature: SGI Peptide ID NO. 568966
  misc_feature (30)..(131): Pfam Id: PF08240 Pfam Desc: Alcohol dehydrogenase GroES-like domain
  misc_feature (164)..(309): Pfam Id: PF00107 Pfam Desc: Zinc-binding dehydrogenase
  misc_feature (1)..(348): NCBI GI: 256721564 Blast Desc: NECHADRAFT_37345 [Nectria haematococca mpVI 77-13-4]
  misc_feature (1)..(348): NCBI GI: 199428775 Blast Desc: DEHA2A00154p [Debaryomyces hansenii]
  misc_feature (1)..(347): NCBI GI: 255956769 Blast Desc: Pc21g21650 [Penicillium chrysogenum Wisconsin 54-1255] gi|211590848|emb|CAP97062.1| Pc21g21650 [Penicillium chrysogenum Wisconsin 54-1255]
  misc_feature (1)..(348): NCBI GI: 50405399 Blast Desc: DEHA0A00154g [Debaryomyces hansenii CBS767]
  misc_feature (3)..(347): NCBI GI: 145231204 Blast Desc: An01g14780 [Aspergillus niger] gi|134055996|emb|CAK44175.1| protein product [Aspergillus niger]
  misc_feature (2)..(348): NCBI GI: 39975167 Blast Desc: MGG_00270 [Magnaporthe grisea 70-15] gi|145018858|gb|EDK03137.1| MGG_00270 [Magnaporthe grisea 70-15]
  misc_feature (1)..(312): NCBI GI: 262098500 Blast Desc: conserved [Phytophthora infestans T30-4]
  misc_feature (2)..(348): NCBI GI: 85089847 Blast Desc: NCU09285 [Neurospora crassa OR74A] gi|28919466|gb|EAA28901.1| NCU09285 [Neurospora crassa OR74A]
  misc_feature (10)..(348): NCBI GI: 242783487 Blast Desc: alcohol dehydrogenase, zinc-containing, [Talaromyces stipitatus ATCC 10500] gi|218720344|gb|EED19763.1| alcohol dehydrogenase, zinc-containing, [Talaromyces stipitatus ATCC
  misc_feature (10)..(347): NCBI GI: 71006732 Blast Desc: UM01885.1 [Ustilago maydis 521] gi|46097533|gb|EAK82766.1| UM01885.1 [Ustilago maydis 521]
  misc_feature (24)..(348): SWISSPROT Homolog: EC 1.1.1.1 Alcohol dehydrogenase
MSTQTVFRLTSKTGFEAIKAVQEPIPVPAAHEVLIRIRGVGLNYRDIAIANDTYPLYSKPNVILCSDMAGEVVSVGDHVRELAVGDLVTSPVSLVADYGYVHNQAAPTLAGDVDGVLRQYMTLAANVPVKLPKSSPYSLAQWASLAGVGMTAWNTFYGNKALVPGDVVLLQGTGGVSLAAAMLAKAAGAKVILTSSSDKKLAFVKSKYNVDYTINYKTTPNWGAEVNRITDGHGADHILEVGGLETFKQSLECVAQGGVLSVIGFLTGNPQGEKMPDVAMAAFVKNCVIRGILAGTRQNLEDCMRFMVNAKPLHIVDRVFDFNRDDIIAALKYLESGKNVGKVCISLD

SEQ ID NO: 26235 - DNA, 1998 bp, Muscodor strobelii
  misc_feature: SGI cDNA ID NO. 568967
  misc_feature: Encodes the peptide sequence at SEQ ID NO 26236
atgatcgcccacgccgctatagctgaaagcaaggtcactggttcacagatctctcaaaacttttcggtgaatgactgcagcaccattgagtttggccatcgtgggtttggtatggattttggagacggtcaacctccagacgacaccatcaagggccatgttgcccaatggatcaaaggcgacagaagcgatggaggcgacgggggccatttaacgataaagacgcgtcacccaaatacttgcgaatggctctttcagcacccggccttcgatacatggctgaaggcgagtgagtctacgagtatactcttctctgctccaccaggtgctgtcccggatgctgtccgccgactgtacgattccgatataagaaatgatttagcctatctgaataatgtcgagaccgctaaaaacgtcataatagcactagcttcacagatcagccgaattcacattacgctcgacggcctagatgaatgtcgagaccgtacagtcctgttacctgttctcataacgctactgaaatcatcaatgcacggcattgtgaagtggtttttgacaagtagaccagaacggcatatctgcaaagaaattctcaagacctctattcacgcgatagagtcgcccatggattcaatcaaaaaagatattaggagcttcatgtacgacagctgccgtgatgataaatggctccacaccatcaacgaaagtgtcgaaaagtcggaagggaattttctctgggcgactatgatgcttcaagtctaccaggacaacgcgttctctgacgaggaaactatgaaagtggagcttgagaaatttcctcggggcctaaatagcctatatctacgtactatccaccgtctttccaaacgcaaaccgtctcaaagggatctagctcggagaatcttcgcctttctggtagcatcagttcagccattaagactaagtgagctttcacatgctctggcagtagtcccatcacagtccttctcttactggtccaaatctatacctgagccatctttgattgaagatctctgttcaagcttggtcgtatttgactattcaacttctggctgtttccaagatccactgcttagatttactcacaaatctgtgcatgacttcttcttacagagtgcggtgcgagaagaggcggaagaccttctagccttgcatgaaccgacccagtgggataagactttgttcgacgaggcacgccaaaaatacttcttgacgatttcaaaaagtatcggcgcacccccggcgaccgaagttttcttcacatcggaggaagcagcgaatcaggagctaggagaaacctgtcttcgttatctcatagactcgcgatacggagagcaggaaatacagccaggattcatcaacaaccaggatcacgcattcctaaagtacgccgctgtgttctggcacagacatctcggcatcacaaaacccactgcccgaatactatatcgggttgagagatttatggatagctccaatttctggaactgcgtcaccgtgcagtcttatattgcaccacatctttatgcaatttactatcaagatcgcaattcaccgagttactccatggcatctcgccctccatcgtcgagtgacgtagaactacactatggatctccgataccaccatggataaacacaagcaaagcgaatgatttcgatgccttcgtaacacaatggtttcgagtattaaattcatacccgggaaacctgagccattgttacatggatgatgactggcgattgcgatggccaaatgcaccgatcaaaattacaactcgtgtctcctgcacgtctaatgatggtatggcttgggacgacaggttcattgcagcagcacaagaacagcataaggactggacccggaacaaaaatcccgaagcaatgatgaacgagggcctcgaatttggattctacggcgaggccacaatcacgcagtcctacagcagtagctgtgcagtggagatcagataa

SEQ ID NO: 26236 - protein, 665 aa, Muscodor strobelii
  misc_feature: SGI Peptide ID NO. 568967
  misc_feature (48)..(582): NCBI GI: 46138979 Blast Desc: FG11004.1 [Gibberella zeae PH-1]
  misc_feature (73)..(583): NCBI GI: 145243742 Blast Desc: An11g03870 [Aspergillus niger] gi|134079064|emb|CAK48373.1| protein product [Aspergillus niger]
  misc_feature (72)..(409): NCBI GI: 258565149 Blast Desc: [Uncinocarpus reesii 1704] gi|237907020|gb|EEP81421.1| [Uncinocarpus reesii 1704]
  misc_feature (134)..(384): NCBI GI: 212532817 Blast Desc: multiple ankyrin repeats single kh domain protein, [Penicillium marneffei ATCC 18224] gi|210071929|gb|EEA26018.1| multiple ankyrin repeats single kh domain protein, [Penicillium
  misc_feature (97)..(351): NCBI GI: 169856712 Blast Desc: CC1G_09901 [Coprinopsis cinerea okayama7#130] gi|116503881|gb|EAU86776.1| CC1G_09901 [Coprinopsis cinerea okayama7#130]
  misc_feature (105)..(382): NCBI GI: 242815175 Blast Desc: ankyrin repeat and socs box protein, [Talaromyces stipitatus ATCC 10500] gi|218714857|gb|EED14280.1| ankyrin repeat and socs box protein, [Talaromyces stipitatus ATCC 10500]
  misc_feature (143)..(490): NCBI GI: 119482337 Blast Desc: NFIA_092610 [Neosartorya fischeri NRRL 181] gi|119409351|gb|EAW19300.1| conserved [Neosartorya fischeri NRRL 181]
  misc_feature (152)..(383): NCBI GI: 169850859 Blast Desc: CC1G_10703 [Coprinopsis cinerea okayama7#130] gi|116506781|gb|EAU89676.1| CC1G_10703 [Coprinopsis cinerea okayama7#130]
  misc_feature (110)..(377): NCBI GI: 238508580 Blast Desc: Pfs, NACHT and Ankyrin domain protein [Aspergillus flavus NRRL3357] gi|220688371|gb|EED44724.1| Pfs, NACHT and Ankyrin domain protein [Aspergillus flavus NRRL3357]
  misc_feature (97)..(378): NCBI GI: 169856605 Blast Desc: CC1G_11473 [Coprinopsis cinerea okayama7#130] gi|116503946|gb|EAU86841.1| CC1G_11473 [Coprinopsis cinerea okayama7#130]
MIAHAAIAESKVTGSQISQNFSVNDCSTIEFGHRGFGMDFGDGQPPDDTIKGHVAQWIKGDRSDGGDGGHLTIKTRHPNTCEWLFQHPAFDTWLKASESTSILFSAPPGAVPDAVRRLYDSDIRNDLAYLNNVETAKNVIIALASQISRIHITLDGLDECRDRTVLLPVLITLLKSSMHGIVKWFLTSRPERHICKEILKTSIHAIESPMDSIKKDIRSFMYDSCRDDKWLHTINESVEKSEGNFLWATMMLQVYQDNAFSDEETMKVELEKFPRGLNSLYLRTIHRLSKRKPSQRDLARRIFAFLVASVQPLRLSELSHALAVVPSQSFSYWSKSIPEPSLIEDLCSSLVVFDYSTSGCFQDPLLRFTHKSVHDFFLQSAVREEAEDLLALHEPTQWDKTLFDEARQKYFLTISKSIGAPPATEVFFTSEEAANQELGETCLRYLIDSRYGEQEIQPGFINNQDHAFLKYAAVFWHRHLGITKPTARILYRVERFMDSSNFWNCVTVQSYIAPHLYAIYYQDRNSPSYSMASRPPSSSDVELHYGSPIPPWINTSKANDFDAFVTQWFRVLNSYPGNLSHCYMDDDWRLRWPNAPIKITTRVSCTSNDGMAWDDRFIAAAQEQHKDWTRNKNPEAMMNEGLEFGFYGEATITQSYSSSCAVEIR

SEQ ID NO: 26237 - DNA, 1896 bp, Muscodor strobelii
  misc_feature: SGI cDNA ID NO. 568968
  misc_feature: Encodes the peptide sequence at SEQ ID NO 26238
atgacaacagacatggacagcccacacatcatcaatgaacagaccacgtcaccgctgaagtgtgaagtcaaaacatggcatattatccgtgatgggaagggcaaaaagcttcgtgttcctgcttcaaatatcaccgaagagaaattggctattattgagcccgagaaaaatgccttggtcctcgagcgagaattcgacaagaatggccaatcccttgggacaacccttaccatcaatgcgccgcaaatactcagaaccttgagaatcgcagtgggtagccatccttcggtcgctgcagacttttcagagccttttgcactttctagcccattccaagtactttatcatcactgggaggacctacatgcatacaagacagagctaaataacgcagacgatgacacgcggatgtatctaaacctcctcctcaggttcatggagtcagagataggttcgtctaaaagatctatagagaaaatagtcaccagcggccgctgcgagtttgagaccctatggcttatatacaagccaggtgccccagttgtcacacatatggattctcgcgattggttgatgagagttgcaagaactgcttaccaggaaaatcataccgatggtaaatggttggaagtacactgtctgtacactagcaatgatgggaggaatactgacgtggcgaaacgggttatcaaaatctaccagaagaagattttcccacagggactcccagcaaacattattgatctcccagtctatccacgtaagtattgggtcggaaccgaggtcttggaagagcggcttcagtctagaggggttagatttgtggaactgagcagcagtcttttggttcagcaatatgatggctgtgcttattacgccaaagagatacctcctagctacttccatcctgaagaatccacctgggagcctgtctggcgctcgtactatgagaaaggtcgtgttattctggaccggcgctcatacttggaagaacatttcgattcgcccgtatcagtcccacaggatcaatcggtgcttaacttgacgcactgtccaccttatgtcttcggctattcctgcagtcgtaaagcttggggccggttctttatagaagatgtgcgggaggcaacctggagaacaaatcctttcttagatcttgagctaccaagcgatcataaagcgcttgtacaagctctagtatcctcacacaacttcccggttgattctcacaatcaagctgaacagaaaggcaaggggctggtctgtttacttcatggcccaccaggctccggaaagacactgacggcagagtgcgctgccgagctcacgcgcaaggctttgattagctgctctatgtcggaactcaacaagcataacacgccgtggtattttgagcatcgcctgggcgaagttctgcgactggcgaccacttggaaagcgatagtactacttgacgaggccgacgtgtttcttgaagcgaggcaggatgaatccccggctgttgctgagcgcaatgctctcgtcgccgtgtttcttcgacatctagagtatttttccggcatcgtatttcttacgacaaatcgtattcaagtattcgacacagctatgaagtcgagggtccatcttgctctcgggtataccttgccagacaaagcagcgcgtcatatgatatggcgccacaacattcgcaaattaccaattgaggaggtggatccccatttagacggcagattgtttgacgctgtttcgaatgaggcgctaaatggtcgcgaaatctccaacaccgtgaccacagctagtacattggcccggttcaacaaggagccgcttggactccagcatatacagatggtccggtctgtgagaaaggacttcgagatatcacttgcgatgtag

SEQ ID NO: 26238 - protein, 631 aa, Muscodor strobelii
  misc_feature: SGI Peptide ID NO. 568968
  misc_feature (421)..(606): Pfam Id: PF00004 Pfam Desc: ATPase family associated with various cellular activities (AAA)
  misc_feature (18)..(626): NCBI GI: 46138977 Blast Desc: FG11003.1 [Gibberella zeae PH-1]
  misc_feature (20)..(624): NCBI GI: 171693837 Blast Desc: protein product [Podospora anserina] gi|170946867|emb|CAP73671.1| protein product [Podospora anserina]
  misc_feature (58)..(631): NCBI GI: 39940826 Blast Desc: MGG_11021 [Magnaporthe grisea 70-15] gi|145010948|gb|EDJ95604.1| MGG_11021 [Magnaporthe grisea 70-15]
  misc_feature (19)..(626): NCBI GI: 240110384 Blast Desc: ATPase, AAA family protein [Coccidioides posadasii C735 delta SOWgp]
  misc_feature (40)..(623): NCBI GI: 261357186 Blast Desc: conserved [Verticillium albo-atrum VaMs.102]
  misc_feature (37)..(621): NCBI GI: 256731079 Blast Desc: NECHADRAFT_48916 [Nectria haematococca mpVI 77-13-4]
  misc_feature (75)..(623): NCBI GI: 171684197 Blast Desc: protein product [Podospora anserina] gi|170942059|emb|CAP67711.1| protein product [Podospora anserina]
  misc_feature (56)..(623): NCBI GI: 256726505 Blast Desc: NECHADRAFT_39197 [Nectria haematococca mpVI 77-13-4]
  misc_feature (2)..(630): NCBI GI: 85115272 Blast Desc: NCU08641 [Neurospora crassa OR74A] gi|28926644|gb|EAA35613.1| [Neurospora crassa OR74A]
  misc_feature (75)..(622): NCBI GI: 255947784 Blast Desc: Pc22g06290 [Penicillium chrysogenum Wisconsin 54-1255] gi|211591676|emb|CAP97917.1| Pc22g06290 [Penicillium chrysogenum Wisconsin 54-1255]
MTTDMDSPHIINEQTTSPLKCEVKTWHIIRDGKGKKLRVPASNITEEKLAIIEPEKNALVLEREFDKNGQSLGTTLTINAPQILRTLRIAVGSHPSVAADFSEPFALSSPFQVLYHHWEDLHAYKTELNNADDDTRMYLNLLLRFMESEIGSSKRSIEKIVTSGRCEFETLWLIYKPGAPVVTHMDSRDWLMRVARTAYQENHTDGKWLEVHCLYTSNDGRNTDVAKRVIKIYQKKIFPQGLPANIIDLPVYPRKYWVGTEVLEERLQSRGVRFVELSSSLLVQQYDGCAYYAKEIPPSYFHPEESTWEPVWRSYYEKGRVILDRRSYLEEHFDSPVSVPQDQSVLNLTHCPPYVFGYSCSRKAWGRFFIEDVREATWRTNPFLDLELPSDHKALVQALVSSHNFPVDSHNQAEQKGKGLVCLLHGPPGSGKTLTAECAAELTRKALISCSMSELNKHNTPWYFEHRLGEVLRLATTWKAIVLLDEADVFLEARQDESPAVAERNALVAVFLRHLEYFSGIVFLTTNRIQVFDTAMKSRVHLALGYTLPDKAARHMIWRHNIRKLPIEEVDPHLDGRLFDAVSNEALNGREISNTVTTASTLARFNKEPLGLQHIQMVRSVRKDFEISLAM

SEQ ID NO: 26239 - DNA, 523 bp, Muscodor strobelii
  misc_feature: SGI EST ID NO. CUFF.61894.0
  misc_feature: Variant of the nucleotide sequence at SEQ ID NO 26237
ccagcggccgctgcgagtttgagaccctatggcttatatacaagccaggtgccccagttgtcacacatatggattctcgcgattggttgatgagagttgcaagaactgcttaccaggaaaatcataccgatggtaaatggttggaagtacactgtctgtacactagcaatgatgggaggaatactgacgtggcgaaacgggttatcaaaatctaccagaagaagattttcccacagggactcccagcaaacattattgatctcccagtctatccacgtaagtattgggtcggaaccgaggtcttggaagagcggcttcagtctagaggggttagatttgtggaactgagcagcagtcttttggttcagcaatatgatggctgtgcttattacgccaaagagatacctcctagctacttccatcctgaagaatccacctgggagcctgtctggcgctcgtactatgagaaaggtcgtgttattctggaccggcgctcatacttggaagaacatttcgattcgcc

SEQ ID NO: 26240 - DNA, 348 bp, Muscodor strobelii
  misc_feature: SGI cDNA ID NO. 568969
  misc_feature: Encodes the peptide sequence at SEQ ID NO 26241
atgcacagctcaacgctcgctctactcgcttccgctgctctggccagcgcagtggccattcctaccaccggcaccgttgtcgtcgaaaagaatctcggcggtgtcaccggtcagaggaccaacaccaccatcaccgtgcctctcgactgggaccaaccagtatacaacgaggaggctttcgctgcagtgtctaccttgtatctcacagagcctaccagcgcctactgctctacattcgatgtcaatggaaacggaatccctggcgccgacttctctgtcggtcttcctgctcatctgtctaccaacacggtcaagattggctctctgagatgcttctatggcgagtga

SEQ ID NO: 26241 - protein, 115 aa, Muscodor strobelii
  misc_feature: SGI Peptide ID NO. 568969
MHSSTLALLASAALASAVAIPTTGTVVVEKNLGGVTGQRTNTTITVPLDWDQPVYNEEAFAAVSTLYLTEPTSAYCSTFDVNGNGIPGADFSVGLPAHLSTNTVKIGSLRCFYGE

SEQ ID NO: 26242 - DNA, 600 bp, Muscodor strobelii
  misc_feature: SGI cDNA ID NO. 568970
  misc_feature: Encodes the peptide sequence at SEQ ID NO 26243
atgaagtgggatgacgcaaaacaagaccagctgattggagcaatcctccaatatgccgacctcctcccttctgactcgcttgtctttggccgaatcaaggactggaaacccgtgcaccaggccgtagttgctcaaggcttccaatgttccagtgatgctattcagaccaaatgggttgaaatccataaggctcttgagatcgagcttgccaccgttgccatccccgtcggagcttctcctcgtctgaagctctctcttgtatctggcatccccatccccattgagagcgtaaactctgccgcaagtacctctgccaccaacaaccattcgaacaaccattcggacaaccattcggacaacaatctcaaccgcactccctctgttcctccagctgtcacaatcgagggcgatgtggccactatggctcttttcaccggctctcttaatcgccaggacgaggacgacctatccaattacaagcgcaacctcagcacattgagcaatgaacagctctacgaatctcagaaggaacttactttggtggtacgggcctatcacggtgagattgccaggcgacgtggtgatggagaggcggattga

SEQ ID NO: 26243 - protein, 199 aa, Muscodor strobelii
  misc_feature: SGI Peptide ID NO. 568970
MKWDDAKQDQLIGAILQYADLLPSDSLVFGRIKDWKPVHQAVVAQGFQCSSDAIQTKWVEIHKALEIELATVAIPVGASPRLKLSLVSGIPIPIESVNSAASTSATNNHSNNHSDNHSDNNLNRTPSVPPAVTIEGDVATMALFTGSLNRQDEDDLSNYKRNLSTLSNEQLYESQKELTLVVRAYHGEIARRRGDGEAD

SEQ ID NO: 26244 - DNA, 525 bp, Muscodor strobelii
  misc_feature: SGI cDNA ID NO. 568971
  misc_feature: Encodes the peptide sequence at SEQ ID NO 26245
atgatcgagatgaaagagccaaaacggctggtggatacccagtacaactccaaacgaaccaaccctttcactgagagccaagacgaacccgatagcgccgttgagcataatgaacatcctgatgtcgttttcgagctagaccacatgcttcggctcggagctcaacatacaagcaagaaagccctcggtactcagtatgcagctgctatcaatttcctcttcaacgtctccctcgcggccagagcccgagtcaaaaaatccagcaagttcgcccgtcgcaccatcattaagcggtacattgctgtcaagcaaagagagctcgacgaacactctcgcaaggtctacagactcaatacctccttcctctcatccatgaacacattggtccccgtatcgggcaattcactcgtgacgagaagaaccttatgggcacacccgagcgcgctcagagctgtctctctcaaatctcatccgaaaagtgccaccttgactatatctcaccggcgtgacgcacaacctaactag

SEQ ID NO: 26245 - protein, 174 aa, Muscodor strobelii
  misc_feature: SGI Peptide ID NO. 568971
MIEMKEPKRLVDTQYNSKRTNPFTESQDEPDSAVEHNEHPDVVFELDHMLRLGAQHTSKKALGTQYAAAINFLFNVSLAARARVKKSSKFARRTIIKRYIAVKQRELDEHSRKVYRLNTSFLSSMNTLVPVSGNSLVTRRTLWAHPSALRAVSLKSHPKSATLTISHRRDAQPN

SEQ ID NO: 26246 - DNA, 1344 bp, Muscodor strobelii
  misc_feature: SGI cDNA ID NO. 568972
  misc_feature: Reduced expression when VOC is produced
  misc_feature: Encodes the peptide sequence at SEQ ID NO 26247
atgccgaacctcctcgttcgaattctcgccccagtcaccaccatcttcctgctcctccttctcaccatccaacacctcaaccccgatctaacactctccaacatctttaaccccaccaaagggcaccaaacaaacacccctctcaacatcaacacaacaacgcccaacatgccagaccaaggctaccgcacagtatcctacttcgtaaactgggcaatatacgcacgatcgcacagaccgcaagacctccccgcgtcccacctaacacacatcctttactccttcgcgaatgtgcgtccggaatcaggcgaagtctacctaaccgattcctggtccgacacagacatccactgggaaggcgactcctggaacgactcaggcacaaacctgtacggatgtctcaagcaactcaacctcctcaagaaaaaacaccggaatttgaaagtcttgctgtctgtgggaggctggacatacagtagtaactttgccgcacccgcaagcacaccagaaggaaggaagcggttcgcagagagttgcgtagaactagtgaagaacctaggattcgacgggatagacatagactgggagtatccccaatccccccaacaagcctccgactacactctcttgctccaaaccgttcgcgccgcactagacgcctactctccgcatcaccacctagagctcacagtcgcctgccccgccggctcacaaaactacaacaaactcgatatggagggaatggacaaatacctcgacttctggaacttaatggcgtacgactacgccgggtcatgggattccgtatcaggccaccaatcgaatctctttccctcttcctccaaccctgcttccacacctttcaataccgtcgacgccataaacgcgtatacatcccgcggcgttcaccccagtaaattagtcctcggcatgccgctctacggacgagccttccaggccaccgcaggcccagggcagccatattccggcacgggacagggaacgtgggaagcaggggtctacgattataaagcccttcccctacctaattccaaggttcacaccgatactgagagtggtgctacgtattgctatgatgaagcgtcgaagacgatggtgagctacgatacggtcgcgatggcaaggaagaaagcggagtttattcgggagaagggactaggtggcgcgatgtggtgggagagtagcgctgataagaagggtgaggaaagtctgattggtaatgttgttgaggttttgggtggtaaggacgctttggaacgaaaggagaattgcgttaggtatcccgagagtaagtatgataatttgaggggcgggtttgcttga

SEQ ID NO: 26247 - protein, 447 aa, Muscodor strobelii
  misc_feature: SGI Peptide ID NO. 568972
  misc_feature (62)..(404): Pfam Id: PF00704 Pfam Desc: Glycosyl hydrolases family 18
  misc_feature (46)..(446): NCBI GI: 157420104 Blast Desc: endochitinase [Chaetomium cupreum]
  misc_feature (61)..(446): NCBI GI: 85076562 Blast Desc: endochitinase 1 precursor [Neurospora crassa OR74A] gi|28916979|gb|EAA26709.1| endochitinase 1 precursor [Neurospora crassa OR74A]
  misc_feature (63)..(446): NCBI GI: 39973265 Blast Desc: MGG_07927 [Magnaporthe grisea 70-15] gi|145012744|gb|EDJ97398.1| MGG_07927 [Magnaporthe grisea 70-15]
  misc_feature (61)..(446): NCBI GI: 171679840 Blast Desc: protein product [Podospora anserina] gi|170939546|emb|CAP64773.1| protein product [Podospora anserina]
  misc_feature (58)..(446): NCBI GI: 189306742 Blast Desc: chitinase [Chaetomium thermophilum] gi|189306744|gb|ACD86397.1| chitinase [Chaetomium thermophilum]
  misc_feature (60)..(446): NCBI GI: 256729039 Blast Desc: glycoside hydrolase family 18 [Nectria haematococca mpVI 77-13-4]
  misc_feature (60)..(446): NCBI GI: 46138849 Blast Desc: FG10939.1 [Gibberella zeae PH-1]
  misc_feature (62)..(446): NCBI GI: 227463451 Blast Desc: chitinase [Isaria fumosorosea]
  misc_feature (57)..(446): NCBI GI: 126032289 Blast Desc: TPA: TPA_inf: chitinase 18-7 [Hypocrea jecorina]
  misc_feature (41)..(446): NCBI GI: 115353433 Blast Desc: endochitinase [Chaetomium globosum] gi|115353435|gb|ABI95487.1| endochitinase [Chaetomium globosum]
  misc_feature (61)..(446): SWISSPROT Homolog: EC 3.2.1.14 Chitinase
  misc_feature: Useful for introducing or modulating the production of volatile compounds
MPNLLVRILAPVTTIFLLLLLTIQHLNPDLTLSNIFNPTKGHQTNTPLNINTTTPNMPDQGYRTVSYFVNWAIYARSHRPQDLPASHLTHILYSFANVRPESGEVYLTDSWSDTDIHWEGDSWNDSGTNLYGCLKQLNLLKKKHRNLKVLLSVGGWTYSSNFAAPASTPEGRKRFAESCVELVKNLGFDGIDIDWEYPQSPQQASDYTLLLQTVRAALDAYSPHHHLELTVACPAGSQNYNKLDMEGMDKYLDFWNLMAYDYAGSWDSVSGHQSNLFPSSSNPASTPFNTVDAINAYTSRGVHPSKLVLGMPLYGRAFQATAGPGQPYSGTGQGTWEAGVYDYKALPLPNSKVHTDTESGATYCYDEASKTMVSYDTVAMARKKAEFIREKGLGGAMWWESSADKKGEESLIGNVVEVLGGKDALERKENCVRYPESKYDNLRGGFA

SEQ ID NO: 26248 - DNA, 207 bp, Muscodor strobelii
  misc_feature: SGI cDNA ID NO. 568973
  misc_feature: Encodes the peptide sequence at SEQ ID NO 26249
atggcaaggaagaaagcggagtttattcgggagaagggactaggtggcgcgatgtggtgggagagtagcgctgataagaagggtgaggaaagtctgattggtaatgttgttgaggttttgggtggtaaggacgctttggaacgaaaggagaattgcgttaggtatcccgagagtaagtatgataatttgaggggcgggtttgcttga

SEQ ID NO: 26249 - protein, 68 aa, Muscodor strobelii
  misc_feature: SGI Peptide ID NO. 568973
  misc_feature (1)..(25): Pfam Id: PF00704 Pfam Desc: Glycosyl hydrolases family 18
  misc_feature (1)..(67): NCBI GI: 157420104 Blast Desc: endochitinase [Chaetomium cupreum]
  misc_feature (1)..(67): NCBI GI: 39973265 Blast Desc: MGG_07927 [Magnaporthe grisea 70-15] gi|145012744|gb|EDJ97398.1| MGG_07927 [Magnaporthe grisea 70-15]
  misc_feature (1)..(67): NCBI GI: 115353433 Blast Desc: endochitinase [Chaetomium globosum] gi|115353435|gb|ABI95487.1| endochitinase [Chaetomium globosum]
  misc_feature (1)..(67): NCBI GI: 189306742 Blast Desc: chitinase [Chaetomium thermophilum] gi|189306744|gb|ACD86397.1| chitinase [Chaetomium thermophilum]
  misc_feature (1)..(67): NCBI GI: 85076562 Blast Desc: endochitinase 1 precursor [Neurospora crassa OR74A] gi|28916979|gb|EAA26709.1| endochitinase 1 precursor [Neurospora crassa OR74A]
  misc_feature (1)..(67): NCBI GI: 171679840 Blast Desc: protein product [Podospora anserina] gi|170939546|emb|CAP64773.1| protein product [Podospora anserina]
  misc_feature (1)..(67): NCBI GI: 261355019 Blast Desc: endochitinase [Verticillium albo-atrum VaMs.102]
  misc_feature (2)..(67): NCBI GI: 126032289 Blast Desc: TPA: TPA_inf: chitinase 18-7 [Hypocrea jecorina]
  misc_feature (1)..(67): NCBI GI: 61968001 Blast Desc: acidic chitinase [Lecanicillium lecanii] gi|61968003|gb|AAX56961.1| acidic chitinase [Lecanicillium lecanii]
  misc_feature (1)..(67): NCBI GI: 227463451 Blast Desc: chitinase [Isaria fumosorosea]
  misc_feature (1)..(68): SWISSPROT Homolog: EC 3.2.1.14 Chitinase
MARKKAEFIREKGLGGAMWWESSADKKGEESLIGNVVEVLGGKDALERKENCVRYPESKYDNLRGGFA

SEQ ID NO: 26250 - DNA, 462 bp, Muscodor strobelii
  misc_feature: SGI cDNA ID NO. 568974
  misc_feature: Reduced expression when VOC is produced
  misc_feature: Encodes the peptide sequence at SEQ ID NO 26251
atgcagatcttcgtcaagaccctcacgggcaagactatcaccctcgaggtggagtcatccgacaccatcgacaatgtcaagtccaagatccaggacaaggagggcatccccccggaccaacagcgcttgatcttcgccggcaagcagctcgaggacggccgcaccctctccgactacaacatccagaaggagtccaccctccacctcgtcctgcgcctgcgtggtggcgccaagaagaggaagaagaaggtctacaccacccccaagaagatcaagcacaagcgcaagaagaccaagttggccgtcctcaagtactacaaggtcgacggcgacggcaagatcgagcgcctgcgccgcgagtgccccgccgacacctgcggtgccggtgtcttcatggccgccatgcaggaccgccagtactgcggccgctgccacctgacctacgtcttcgacaagcagtaa

SEQ ID NO: 26251 - protein, 153 aa, Muscodor strobelii
  misc_feature: SGI Peptide ID NO. 568974
  misc_feature (101)..(147): Pfam Id: PF01599 Pfam Desc: Ribosomal protein S27a
  misc_feature (6)..(74): Pfam Id: PF00240 Pfam Desc: Ubiquitin family
  misc_feature (1)..(153): NCBI GI: 46138853 Blast Desc: FG10941.1 [Gibberella zeae PH-1]
  misc_feature (1)..(152): NCBI GI: 154276232 Blast Desc: ubiquitin/79aa fusion protein [Ajellomyces capsulatus NAm1] gi|150414034|gb|EDN09399.1| ubiquitin/79aa fusion protein [Ajellomyces capsulatus NAm1]
  misc_feature (1)..(152): NCBI GI: 70999548 Blast Desc: ubiquitin (UbiC) [Aspergillus fumigatus Af293] gi|119491683|ref|XP_001263336.1| ubiquitin [Neosartorya fischeri NRRL 181] gi|66852130|gb|EAL92455.1| ubiquitin (UbiC), fumigatus
  misc_feature (1)..(152): NCBI GI: 261200543 Blast Desc: ubiquitin/40S ribosomal protein S27a [Ajellomyces dermatitidis SLH14081] gi|239593744|gb|EEQ76325.1| ubiquitin/40S ribosomal protein S27a [Ajellomyces dermatitidis SLH14081] S27a
  misc_feature (1)..(153): NCBI GI: 258563894 Blast Desc: ubiquitin [Uncinocarpus reesii 1704] gi|237908199|gb|EEP82600.1| ubiquitin [Uncinocarpus reesii 1704]
  misc_feature (1)..(152): NCBI GI: 119187547 Blast Desc: ubiquitin [Coccidioides immitis RS] gi|240108155|gb|EER26329.1| ubiquitin/S27a fusion protein, [Coccidioides posadasii C735 delta SOWgp]
  misc_feature (1)..(152): NCBI GI: 71021009 Blast Desc: UM04588.1 [Ustilago maydis 521] gi|46100329|gb|EAK85562.1| UM04588.1 [Ustilago maydis 521]
  misc_feature (1)..(152): NCBI GI: 189210976 Blast Desc: ubiquitin [Pyrenophora tritici-repentis Pt-1C-BFP] gi|187977912|gb|EDU44538.1| ubiquitin [Pyrenophora tritici-repentis Pt-1C-BFP]
  misc_feature (1)..(152): NCBI GI: 225555889 Blast Desc: ubiquitin [Ajellomyces capsulatus G186AR] gi|240278620|gb|EER42126.1| ubiquitin/79aa fusion protein [Ajellomyces capsulatus H143]
  misc_feature (1)..(153): NCBI GI: 145604825 Blast Desc: ubiquitin [Magnaporthe grisea 70-15] gi|145012745|gb|EDJ97399.1| ubiquitin [Magnaporthe grisea 70-15]
  misc_feature: Useful for introducing or modulating the production of volatile compounds
MQIFVKTLTGKTITLEVESSDTIDNVKSKIQDKEGIPPDQQRLIFAGKQLEDGRTLSDYNIQKESTLHLVLRLRGGAKKRKKKVYTTPKKIKHKRKKTKLAVLKYYKVDGDGKIERLRRECPADTCGAGVFMAAMQDRQYCGRCHLTYVFDKQ

SEQ ID NO: 26252 - DNA, 2701 bp, Muscodor strobelii
  misc_feature: SGI EST ID NO. CUFF.62028.0
  misc_feature: Variant of the nucleotide sequence at SEQ ID NO 26250
tctctactagtgcgggtctgcggcatcccaccaacatttgtgaagtgcggctcctcctcctcaacctccaactttttatttcctcttcctcccaaacctcaccgctacacggttgcttaggacggcaatacatcattgtctaggcaatcatgcagatcttcgtcaagaccctcacgggcaagactatcaccctcgaggtggagtcatccgacaccatcgacaatgtcaagtccaagatccaggacaaggagggcatccccccggaccaacagcgcttgatcttcgccggcaagcagctcgaggacggccgcaccctctccgactacaacatccagaaggagtccaccctccacctcgtcctgcgcctgcgtggtggcgccaagaagaggaagaagaaggtctacaccacccccaagaagatcaagcacaagcgcaagaagaccaagttggccgtcctcaagtactacaaggtcgacggcgacggcaagatcgagcgcctgcgccgcgagtgccccgccgacacctgcggtgccggtgtcttcatggccgccatgcaggaccgccagtactgcggccgctgccacctgacctacgtcttcgacaagcagtaaacagacctagctcctgcggcacaaaacgtttgacgactcgactcggcatatgactacagaatcatgatcacgacggtatcgaccagggaaaatctcggtgtgcatggatgcatggagttcttgtcatgacggtacttggtagcatatccagatgactttagctagtctgtctgtctgcgaatacgatcgtgtctaaacgttactatgctgcgtagtctgtcgttgtgatacttgacgtgttgtatggattcgagtcgcctccctcgagtcggggcgcctgtctatgtgttaaagttgtccaggtaagtgatacttcagtgtatgaaggtcaactatacacaaaaggcggaataattcatcgtggtatcatatctcataaaacattttctctaagctctactctgtcaatactccccatgccatatgcttctcgttttgggtacggcttttcctactcccatatcctctctctggttctcaatcacgatatccacacccatctatctaaccgcaacagccacacaccaaagctgctgtgaacagatccgcccgcaagcaagcaatgcatccgcaatcaggaagataactcatctcaacgccgccactcaagcaaacccgcccctcaaattatcatacttactctcgggatacctaacgcaattctcctttcgttccaaagcgtccttaccacccaaaacctcaacaacattaccaatcagactttcctcacccttcttatcagcgctactctcccaccacatcgcgccacctagtcccttctcccgaataaactccgctttcttccttgccatcgcgaccgtatcgtagctcaccatcgtcttcgacgcttcatcatagcaatacgtagcaccactctcagtatcggtgtgaaccttggaattaggtaggggaagggctttataatcgtagacccctgcttcccacgttccctgtcccgtgccggaatatggctgccctgggcctgcggtggcctggaaggctcgtccgtagagcggcatgccgaggactaatttactggggtgaacgccgcgggatgtatacgcgtttatggcgtcgacggtattgaaaggtgtggaagcagggttggaggaagagggaaagagattcgattggtggcctgatacggaatcccatgacccggcgtagtcgtacgccattaagttccagaagtcgaggtatttgtccattccctccatatcgagtttgttgtagttttgtgagccggcggggcaggcgactgtgagctctaggtggtgatgcggagagtaggcgtctagtgcggcgcgaacggtttggagcaagagagtgtagtcggaggcttgttggggggattggggatactcccagtctatgtctatcccgtcgaatcctaggttcttcactagttctacgcaactctctgcgaaccgcttccttccttctggtgtgcttgcgggtgcggcaaagttactactgtatgtccagcctcccacagacagcaagactttcaaattccggtgttttttcttgaggaggttgagttgcttgagacatccgtacaggtttgtgcctgagtcgttccaggagtcgccttcccagtggatgtctgtgtcggaccaggaatcggttaggtagacttcgcctgattccggacgcacattcgcgaaggagtaaaggatgtgtgttaggtgggacgcggggaggtcttgcggtctgtgcgatcgtgcgtatattgcccagtttacgaagtaggatactgtgcggtagccttggtctggcatgttgggcgttgttgtgttgatgttgagaggggtgtttgtttggtgccctttggtggggttaaagatgttggagagtgttagatcggggttgaggtgttggatggtgagaaggaggagcaggaagatggtggtgactggggcgagaattcgaacgaggaggttcggcatacggagaaatggatgtgtcgattttataaatgtgatgctgtgctagtctttctgaggtttgggatcccggattcacggcactgttacttggcgggggagcttgtgtggggttcgaagtggcgatgctgagttggcttgttt

SEQ ID NO: 26253 - DNA, 360 bp, Muscodor strobelii
  misc_feature: SGI cDNA ID NO. 568975
  misc_feature: Reduced expression when VOC is produced
  misc_feature: Encodes the peptide sequence at SEQ ID NO 26254
atggtcaagaagagaaagaacaacggccgcaacaagaagggccgcggccacaccaagcccatccgctgcagcaactgctcgcgatgcacgcccaaggacaaggccatcaagagattcaccatccgcaacatggtcgagtctgccgccatccgtgatatctctgatgcctccgtcttcgccgagtacaccgtccccaagatgtacctcaagctgcagtactgcgtctcttgtgccatccacggcaagatcgtccgtgtccgatctcgcgagggccgccgcaaccgtgctcctcccccgcgtgttcgctacaacaaggatggcaagaaggtgctccccactcaggccgccaagactgcttag

SEQ ID NO: 26254 - protein, 119 aa, Muscodor strobelii
  misc_feature: SGI Peptide ID NO. 568975
  misc_feature (1)..(114): Pfam Id: PF01283 Pfam Desc: Ribosomal protein S26e
  misc_feature (1)..(119): NCBI GI: 85076554 Blast Desc: 40S ribosomal protein S26E [Neurospora crassa OR74A] gi|171679836|ref|XP_001904864.1| protein product [Podospora anserina] gi|67477362|sp|P21772.2|RS26_NEUCR RecName: Full=40S
  misc_feature (1)..(119): NCBI GI: 3076 Blast Desc: ribosomal protein [Neurospora crassa]
  misc_feature (1)..(119): NCBI GI: 116204185 Blast Desc: 40S ribosomal protein S26 [Chaetomium globosum CBS 148.51] gi|88176104|gb|EAQ83572.1| 40S ribosomal protein S26 [Chaetomium globosum CBS 148.51]
  misc_feature (1)..(119): NCBI GI: 39973269 Blast Desc: MGG_07929 [Magnaporthe grisea 70-15] gi|59802946|gb|AAX07677.1| 40S ribosomal protein S26-like protein [Magnaporthe grisea] gi|145012746|gb|EDJ97400.1| MGG_07929 grisea
  misc_feature (1)..(119): NCBI GI: 261206282 Blast Desc: 40S ribosomal protein S26 [Ajellomyces dermatitidis SLH14081] gi|239592937|gb|EEQ75518.1| 40S ribosomal protein S26 [Ajellomyces dermatitidis SLH14081] gi|239610890|gb|EEQ87877.1|
  misc_feature (1)..(119): NCBI GI: 154278495 Blast Desc: 40s ribosomal protein s26 [Ajellomyces capsulatus NAm1] gi|150413646|gb|EDN09029.1| 40s ribosomal protein s26 [Ajellomyces capsulatus NAm1]
  misc_feature (1)..(119): NCBI GI: 225560597 Blast Desc: 40S ribosomal protein S26E [Ajellomyces capsulatus G186AR]
  misc_feature (1)..(119): NCBI GI: 226281863 Blast Desc: 40S ribosomal protein S26 [Paracoccidioides brasiliensis Pb01]
  misc_feature (1)..(119): NCBI GI: 212528294 Blast Desc: 40S ribosomal protein S26 [Penicillium marneffei ATCC 18224] gi|242766802|ref|XP_002341243.1| 40S ribosomal protein S26 [Talaromyces stipitatus ATCC 10500] gi|210073702|gb|EEA27789.1|
  misc_feature (1)..(116): NCBI GI: 169618016 Blast Desc: SNOG_12195 [Phaeosphaeria nodorum SN15] gi|189194759|ref|XP_001933718.1| 40S ribosomal protein S26E [Pyrenophora tritici-repentis Pt-1C-BFP] SNOG_12195 nodorum SN15]
  misc_feature: Useful for introducing or modulating the production of volatile compounds
MVKKRKNNGRNKKGRGHTKPIRCSNCSRCTPKDKAIKRFTIRNMVESAAIRDISDASVFAEYTVPKMYLKLQYCVSCAIHGKIVRVRSREGRRNRAPPPRVRYNKDGKKVLPTQAAKTA

SEQ ID NO: 26255 - DNA, 1057 bp, Muscodor strobelii
  misc_feature: SGI EST ID NO. CUFF.62468.0
  misc_feature: Variant of the nucleotide sequence at SEQ ID NO 26253
gggcagtcttgattgcagctaacttttccatctgcctcccgccaatatttcaacccactccgacaccttctggactccagcttctgctcgacaactaaaccgacagcacaagtccacacaccaaccttcaacatggtcaagaagagaaagaacaacggccgcaacaagaagggccgcggccacaccaagcccatccgctgcagcaactgctcgcgatgcacgcccaaggacaaggccatcaagagattcaccatccgcaacatggtcgagtctgccgccatccgtgatatctctgatgcctccgtcttcgccgagtacaccgtccccaagatgtacctcaagctgcagtactgcgtctcttgtgccatccacggcaagatcgtccggtacgtcatccctcacgggaaagactgcgctctcgtctgtcatggcgagagtcgtatgcgctcgagaagagccttggccgactctcgagtgtccctcctccccgtcgtcccatcgtttttccaacgataccccctccgacaaattcctaccatccttcctcctccgcgttcccgacccaccgatttctttgacaacaatactgacaaaacgaaacagtgtccgatctcgcgagggccgccgcaaccgtgctcctcccccgcgtgttcgctacaacaaggatggcaagaaggtgctccccactcaggccgccaagactgcttagtagccttcttgttcccatggtttgacgtgtttgtttttcggaaaagggccggcggagatctggtctacggaaatgggttcacttgcatgacgaagggtttatgccatgatatcactagtaatgacctgcatgacctgaaaattgagtcatttttgctacggcaaacaaacattcctctgtcttgcattgtttaccttgacgtgcgtgacatggcgaacttgacgatgttgagttcctaattattgtgcctgatgacaatgaatcatcgaccaccttctttcaatacatgtcgaactagttcttgacctcacgcctcatcttttgcagaggcagtgccaccgatctaac

SEQ ID NO: 26256 - DNA, 327 bp, Muscodor strobelii
  misc_feature: SGI cDNA ID NO. 568976
  misc_feature: Encodes the peptide sequence at SEQ ID NO 26257
atgcatgaaatatccaattcaagatgcctgaccgtctcgccaagagaaatcaaggtcaaggctctacccgcgcctcgcaacagccgtcttcaaggctccttaagcccccaagagccgatcggtgaaaaggacaacccgtcagatgaagcaactgaagatgaagcgggtaaggctgaagccgaaatatcatcccgagaagctatacccggggccgaatctccgccctccgtaaatgctacacgcgaacaagggcgcttgtctttaagcagaatcgttagatcggtggcactgcctctgcaaaagatgaggcgtgaggtcaagaactag

SEQ ID NO: 26257 - protein, 108 aa, Muscodor strobelii
  misc_feature: SGI Peptide ID NO. 568976
MHEISNSRCLTVSPREIKVKALPAPRNSRLQGSLSPQEPIGEKDNPSDEATEDEAGKAEAEISSREAIPGAESPPSVNATREQGRLSLSRIVRSVALPLQKMRREVKN

SEQ ID NO: 26258 - DNA, 3807 bp, Muscodor strobelii
  misc_feature: SGI cDNA ID NO. 568977
  misc_feature: Encodes the peptide sequence at SEQ ID NO 26259
atgaaagaaaatcacaacttcgataagaaaccatcccagtaccagtaccgactcaagcaatggagagtcaaaaagaatacaacgaaagatgtttggaactatgtagctcatagagttcataagaggaagcagattgataaaccctcacaggtcatcctacacggcgtccctgtacctgaggaaagactgctgaaagagatccaaagatatacacatatccctgcagctactgatttcggaaagagagcacatagtccacggacacctgaaggagctatgattcacgttcgcagcccaagtgttacggaacttgacgttgttatctggccagacacacttccttggttccaatttgagtacaagcttgacccattgctattacaccgaccatccgactttttagaaaatctctggatcccgtttgaattagaaacaacggagcagcgatataggcaacaagaatgttcacttaccttctttccgattacgagggatatttcagcgcttcccgaagcgatcatcgactactctaagaagattccagaaagctatgaaaaccggaaccagcaaaccggatcggtagtacaatcacagaatcctcactcaatagctatgcacgtggtaaaggccatattctatcgtttgtcgaataagctcaacttacatgacgatgactatgatcatgtagattaccgggtacttcgaaagcgacacgatcagtttgtcatacgacttgttgaagcgctttcaagcagcaatccacagatgatatctgatctcctctcagatcgctgcagaacagcaaatgcaatcaaagaagccatataccaggccgcaattcgggaaaagagttacgcaattatttcaagtctcctggaatttggtgttcatcccgaactgcccgtaggactccacggacttcctgcgttgatcttgtcccggggcttaatccagatgaactttagttataatctagtgaaacttagcatgagtggtttagagattgcagctgctacagttgatacccgccttggcagaattctattagaggcgggagcaaatgccaacatctctaaccctggcgattttccgccactctcaataattggatttcttcgcgagggcgaagaaacttccaaagagacaatggaatttgtcgagatgctaattgaacatggcgccgagcttaaccaatcgcagtgtgggaatacaatgaagagttccatgcttaatggagctattgcacaacacgatactcggcttgccgaattcttaattcagcagggtgccaacgaaatattaaacgatggttctcctggcggctcaggcggacttggaacctggcattcacttcaactccagccactttgtcagaggattccgcccttgctccttgcaattgtttcaggtagtaagccgataattgagcagctactgcaaccaattctctcggacccgacccaatttcacccgagtttcatcaaagatatcattactacttcttgctttgcgggagatgctgctgttgtctctcaacttctaccagtctcgaacgttgatttcagaaattgggtggatggcgtcacacctctagtggcagtagcctggaatcttgatcttaccatcgccgagatgttattggccgcgggtgcagatactggtccaaagcacagtacccatggcgatgataccaggtgtgtggaagttcccgctccgatacatgttgctgcgttccatggcaatgaaaagcttgtgcggatcctgataggacgtggagccagtcgcaatgtaccagtacaccacaagaagccgaggtggtccagtgaacggatctggccattgcctttcggcgtctcaactccacttcagctcgccttaaaaagcgcagacattgaaacgattacccttctcttgccggactccaagcttgtcggtggtgaattagccgaggcgatcaatctaggcgatcgactcatcatctcagagcttatgcttaaaggggccgacatcctgtttggcattgaaggtcttacaacacgtttcgaatcagcaacagcaacagggtatatagaggctttatctctctatttcgaattgggtggaaagtataggtctacagagcttcatagagctacgaagctcgctatagaattggaggatcactctttagtgacgcctttgttgaactctcgtcaagccggtccaattgacagccacgaagcctcatgtatagttctggctctagaacactccgaatgggatcttgcacgctgcctgctagaatcgctaacctatgggccttcgagatctttttacggaccagcgaacaatgcagatcctgtgcatgaactggacaccagtattattttcaatggatatcccgaccatcgtggcgctggcataacaccactctgggccgcttatcgctctggtaacgaatcaatcatcaaagaaatgatccagcaaggatacagccttgaaaggtctgaccaagactcgtttgtaatatccgctatcaattataaagacgaacgagcaatttctattagagaactacttttatcaacagcacagtttgagaatatgaatgaagcaggccgtcagatgctccttttttgcgcaatcagacaatgtaatctgcaaacaacacgagcctacatcaagcttatcggtaacttgaattttacactttgtggatccaacccggatcagactccattgaagctagctgtgagcatcaaccgaatcgatttagttagcgagctgcttgatgcaggagctgacatcgactattctggatataaaaagaggaatgacagagaaagacgagcattgtcagtggcagtagctcacgggcacgacgacatcgtcgaattactcatagccagaggagcgaaaataaatggatcacccccgactcgtaatcgaagaactgcattaaaaatagcagcagttcatggcaagctcggcttagtgaagctgctggttgagaatggagcggatataaacatactgccagcaaaacgcagtgttactgccctagagggggcagcatggatgggtagactcgacatcgtgcaatatcttctagacatgggtgcgaatgtaagtggcgagatgaggatatattatgtgagatccgtctggtttgcaactcgatacggtcaccataccatcgcgaattacttaagagaatatggactatggaccgagcatgaccagatactctacgatcatccgatgacgagagaggattatgggtattttctttacgatgaacaagcagaagactggcagtttctgccgtatgtagaaaattctgatgatactgatgagtgcagcagcgttgggtcgagaagcgagaattctcccaccgaggatggtacttgcgatagtacacctggagaagatgaagacacttcttatgtcgacgatggatcgttggctgtacgagatggagtagagggagacattgctggttcatttagtcttacgacagataacttcgacacgcgtgaatcagacggccagcgacactcgattgatagagctcacgagactacgatggtgatattgacagcacctggccgagaacgagaattgggtgatcaacgacatgacaccgaatctgagcttaccgcagacgagacaacgcgcagagtattggaggagcaagcaccggggttgcagacccatctaatgccggagctggctgatgagccacctctcatggctgctgtggagttcattacgtggaatgatcctttcttcggagctgacgagatcgaagatttatgggatatctga

SEQ ID NO: 26259 - protein, 1268 aa, Muscodor strobelii
  misc_feature: SGI Peptide ID NO. 568977
  misc_feature (975)..(1007): Pfam Id: PF00023 Pfam Desc: Ankyrin repeat
  misc_feature (799)..(831): Pfam Id: PF00023 Pfam Desc: Ankyrin repeat
  misc_feature (902)..(934): Pfam Id: PF00023 Pfam Desc: Ankyrin repeat
  misc_feature (572)..(600): Pfam Id: PF00023 Pfam Desc: Ankyrin repeat
  misc_feature (156)..(1079): NCBI GI: 225684431 Blast Desc: conserved [Paracoccidioides brasiliensis Pb03]
  misc_feature (1)..(1075): NCBI GI: 119500700 Blast Desc: Ankyrin repeat protein [Neosartorya fischeri NRRL 181] gi|119415272|gb|EAW25210.1| Ankyrin repeat protein [Neosartorya fischeri NRRL 181]
  misc_feature (333)..(1063): NCBI GI: 115966413 Blast Desc: : similar to ankyrin 2,3/unc44 [Strongylocentrotus purpuratus]
  misc_feature (333)..(1063): NCBI GI: 115772666 Blast Desc: : similar to ankyrin 2,3/unc44, partial [Strongylocentrotus purpuratus]
  misc_feature (379)..(1063): NCBI GI: 115668641 Blast Desc: : similar to ankyrin 2,3/unc44 [Strongylocentrotus purpuratus] gi|115929638|ref|XP_001182096.1| : similar to ankyrin 2,3/unc44 [Strongylocentrotus purpuratus]
  misc_feature (900)..(1101): NCBI GI: 115492243 Blast Desc: [Aspergillus terreus NIH2624] gi|114197609|gb|EAU39309.1| [Aspergillus terreus NIH2624]
  misc_feature (383)..(1063): NCBI GI: 115729676 Blast Desc: : similar to ankyrin 2,3/unc44, partial [Strongylocentrotus purpuratus] gi|115894622|ref|XP_797753.2| : similar to ankyrin 2,3/unc44, partial [Strongylocentrotus
  misc_feature (346)..(1037): NCBI GI: 115877255 Blast Desc: : similar to ankyrin 2,3/unc44, partial [Strongylocentrotus purpuratus] gi|115970262|ref|XP_001190373.1| : similar to ankyrin 2,3/unc44, partial [Strongylocentrotus
  misc_feature (631)..(1077): NCBI GI: 256730275 Blast Desc: NECHADRAFT_82615 [Nectria haematococca mpVI 77-13-4]
  misc_feature (333)..(1037): NCBI GI: 115738318 Blast Desc: : similar to ankyrin 2,3/unc44 [Strongylocentrotus purpuratus] gi|115939511|ref|XP_001189858.1| : similar to ankyrin 2,3/unc44 [Strongylocentrotus purpuratus]
MKENHNFDKKPSQYQYRLKQWRVKKNTTKDVWNYVAHRVHKRKQIDKPSQVILHGVPVPEERLLKEIQRYTHIPAATDFGKRAHSPRTPEGAMIHVRSPSVTELDVVIWPDTLPWFQFEYKLDPLLLHRPSDFLENLWIPFELETTEQRYRQQECSLTFFPITRDISALPEAIIDYSKKIPESYENRNQQTGSVVQSQNPHSIAMHVVKAIFYRLSNKLNLHDDDYDHVDYRVLRKRHDQFVIRLVEALSSSNPQMISDLLSDRCRTANAIKEAIYQAAIREKSYAIISSLLEFGVHPELPVGLHGLPALILSRGLIQMNFSYNLVKLSMSGLEIAAATVDTRLGRILLEAGANANISNPGDFPPLSIIGFLREGEETSKETMEFVEMLIEHGAELNQSQCGNTMKSSMLNGAIAQHDTRLAEFLIQQGANEILNDGSPGGSGGLGTWHSLQLQPLCQRIPPLLLAIVSGSKPIIEQLLQPILSDPTQFHPSFIKDIITTSCFAGDAAVVSQLLPVSNVDFRNWVDGVTPLVAVAWNLDLTIAEMLLAAGADTGPKHSTHGDDTRCVEVPAPIHVAAFHGNEKLVRILIGRGASRNVPVHHKKPRWSSERIWPLPFGVSTPLQLALKSADIETITLLLPDSKLVGGELAEAINLGDRLIISELMLKGADILFGIEGLTTRFESATATGYIEALSLYFELGGKYRSTELHRATKLAIELEDHSLVTPLLNSRQAGPIDSHEASCIVLALEHSEWDLARCLLESLTYGPSRSFYGPANNADPVHELDTSIIFNGYPDHRGAGITPLWAAYRSGNESIIKEMIQQGYSLERSDQDSFVISAINYKDERAISIRELLLSTAQFENMNEAGRQMLLFCAIRQCNLQTTRAYIKLIGNLNFTLCGSNPDQTPLKLAVSINRIDLVSELLDAGADIDYSGYKKRNDRERRALSVAVAHGHDDIVELLIARGAKINGSPPTRNRRTALKIAAVHGKLGLVKLLVENGADINILPAKRSVTALEGAAWMGRLDIVQYLLDMGANVSGEMRIYYVRSVWFATRYGHHTIANYLREYGLWTEHDQILYDHPMTREDYGYFLYDEQAEDWQFLPYVENSDDTDECSSVGSRSENSPTEDGTCDSTPGEDEDTSYVDDGSLAVRDGVEGDIAGSFSLTTDNFDTRESDGQRHSIDRAHETTMVILTAPGRERELGDQRHDTESELTADETTRRVLEEQAPGLQTHLMPELADEPPLMAAVEFITWNDPFFGADEIEDLWDI

SEQ ID NO: 26260 - DNA, 613 bp, Muscodor strobelii
  misc_feature: SGI EST ID NO. CUFF.61915.0
  misc_feature: Variant of the nucleotide sequence at SEQ ID NO 26258
ctcacaggtcatcctacacggcgtccctgtacctgaggaaagactgctgaaagagatccaaagatatacacatatccctgcagctactgatttcggaaagagagcacatagtccacggacacctgaaggagctatgattcacgttcgcagcccaagtgttacggaacttgacgttgttatctggccagacacacttccttggttccaatttgagtacaagcttgacccattgctattacaccgaccatccgactttttagaaaatctctggatcccgtttgaattagaaacaacggagcagcgatataggcaacaagaatgttcacttaccttctttccgattacgagggatatttcagcgcttcccgaagcgatcatcgactactctaagaagattccagaaagctatgaaaaccggaaccagcaaaccggatcggtagtacaatcacagaatcctcactcaatagctatgcacgtggtaaaggccatattctatcgtttgtcgaataagctcaacttacatgacgatgactatgatcatgtagattaccgggtacttcgaaagcgacacgatcagtttgtcatacgacttgttgaagcgctttcaagcagc

SEQ ID NO: 26261 - DNA, 1629 bp, Muscodor strobelii
  misc_feature: SGI cDNA ID NO. 568978
  misc_feature: Reduced expression when VOC is produced
  misc_feature: Encodes the peptide sequence at SEQ ID NO 26262
atgaagttctcttccgcagccgccagcgctgcggtgggagctctcactctcgcctcatccgcttctgctgctagctacgacgacatccccgtcatcgccgccaagggccagcacttcttctactccaacaatggctcccagttcttcatgatgggcgttgcctatcagcaaaactaccaggccaacggttccgtctccagtaatgctaagtacactgaccctctggccgacgctgctagctgcgagcgcgatatccccttcctgaaggagctcaacaccaacgtcatccgtgtgtacgccattaaccctgatctggaccatgatgactgcatgtcgcagctcgcctccaacgacatctatgtcgtcgccgacttgggtgaaccccagacgtccatcgactctaatgatgccgagtggaacctgcctttgtacgagcgttacacttccgtcgtcgacacccttcagaaatacaacaacgtgattggcttcttcgccgggaacgaagtcgtcgagctagccaaccaaaccgctgctgctgctttcgtcaaggctgccgtgcgtgacaccaagcagtacatcggtaacaaggggtaccgtgacacgctcggagttggctatgccactgccgatgtgcctgcacgtgaccagctcgccgactactttgcttgcgagcctgaatctggtactaactctaccattgacttctggggctataacgtctactcgtggtgcggtgatagtaactacgtggactcctcgtacggcgagcgcgaggatttcttccgtgactaccctgttcccgttttcttcgccgagtatggttgcaaccagggtcttcccggtggcttctacagccgacccttcacggaggtcgctgttctctacggtaacatgactgacgtcttctctggtggtattgtctaccaatactttgacgacgtaaaccacttcggtctcgtctcgctcgacggtaatgatgtcaagaccgctgccgatttcaagtctctcaagaaccagttggccaaggtcacgcttagcccgacccaggccagcaactacaaggccaccaacaccgcccgtgcctgccctacccaggataagagctggttggttcaggcatcccctatccctcccaatgtgaacccccagctctgcgactgtgaagtggcctctttgacctgcaccatcaattcggacgacgcagagtcatacggcgaccagttcgactacatttgtggcaagggatactgcgacggcattcagcacaatgcgactagtggcacttacggtgccatctctggttgctcgcctaagcaacagcttgcttttgtcgccaaccagtactaccaggaccaggacgactctaacaaggccagcgcttgtgacttcagtggcctggctagcacccaaacccctcaaaccactggcaactgcaaggccctgcttgatgctgccggtactgatggcaccggtaatgtcgccagtgagactggaggcgatgccagcgattccggaaacgccgctgcgaacggtcttgccaccccgctgttcttcaactttggtgctaccatctttactggctacgctatccttgctgtcgtctccggtgttggtatgattgtactataa

SEQ ID NO: 26262 - protein, 542 aa, Muscodor strobelii
  misc_feature: SGI Peptide ID NO. 568978
  misc_feature (16)..(344): Pfam Id: PF03198 Pfam Desc: Glycolipid anchored surface protein (GAS1)
  misc_feature (392)..(480): Pfam Id: PF07983 Pfam Desc: X8 domain
  misc_feature (10)..(542): NCBI GI: 169626432 Blast Desc: SNOG_16503 [Phaeosphaeria nodorum SN15] gi|111054988|gb|EAT76108.1| SNOG_16503 [Phaeosphaeria nodorum SN15]
  misc_feature (23)..(542): NCBI GI: 189206447 Blast Desc: 1,3-beta-glucanosyltransferase gel3 precursor [Pyrenophora tritici-repentis Pt-1C-BFP] gi|187975651|gb|EDU42277.1| 1,3-beta-glucanosyltransferase gel3
  misc_feature (1)..(542): NCBI GI: 223974769 Blast Desc: [Zea mays]
  misc_feature (1)..(542): NCBI GI: 169764401 Blast Desc: [Aspergillus oryzae RIB40] gi|83764526|dbj|BAE54670.1| protein product [Aspergillus oryzae]
  misc_feature (1)..(542): NCBI GI: 121710102 Blast Desc: 1,3-beta-glucanosyltransferase, [Aspergillus clavatus NRRL 1] gi|119400817|gb|EAW11241.1| 1,3-beta-glucanosyltransferase, [Aspergillus clavatus NRRL 1]
  misc_feature (1)..(542): NCBI GI: 119480261 Blast Desc: 1,3-beta-glucanosyltransferase, [Neosartorya fischeri NRRL 181] gi|119408313|gb|EAW18262.1| 1,3-beta-glucanosyltransferase, [Neosartorya fischeri NRRL 181]
  misc_feature (1)..(542): NCBI GI: 115389900 Blast Desc: protein EPD1 precursor [Aspergillus terreus NIH2624] gi|114194851|gb|EAU36551.1| protein EPD1 precursor [Aspergillus terreus NIH2624]
  misc_feature (1)..(542): NCBI GI: 159123878 Blast Desc: 1,3-beta-glucanosyltransferase, [Aspergillus fumigatus A1163]
  misc_feature (1)..(542): NCBI GI: 70982931 Blast Desc: 1,3-beta-glucanosyltransferase [Aspergillus fumigatus Af293] gi|66844618|gb|EAL84955.1| 1,3-beta-glucanosyltransferase, [Aspergillus fumigatus Af293]
  misc_feature (1)..(542): NCBI GI: 70989629 Blast Desc: 1,3-beta-glucanosyltransferase [Aspergillus fumigatus Af293] gi|229890272|sp|B0XVI5.1|GEL4_ASPFC RecName: Full=1,3-beta-glucanosyltransferase gel4; AltName: Full=Glucan 4;
  misc_feature: Useful for introducing or modulating the production of volatile compounds
MKFSSAAASAAVGALTLASSASAASYDDIPVIAAKGQHFFYSNNGSQFFMMGVAYQQNYQANGSVSSNAKYTDPLADAASCERDIPFLKELNTNVIRVYAINPDLDHDDCMSQLASNDIYVVADLGEPQTSIDSNDAEWNLPLYERYTSVVDTLQKYNNVIGFFAGNEVVELANQTAAAAFVKAAVRDTKQYIGNKGYRDTLGVGYATADVPARDQLADYFACEPESGTNSTIDFWGYNVYSWCGDSNYVDSSYGEREDFFRDYPVPVFFAEYGCNQGLPGGFYSRPFTEVAVLYGNMTDVFSGGIVYQYFDDVNHFGLVSLDGNDVKTAADFKSLKNQLAKVTLSPTQASNYKATNTARACPTQDKSWLVQASPIPPNVNPQLCDCEVASLTCTINSDDAESYGDQFDYICGKGYCDGIQHNATSGTYGAISGCSPKQQLAFVANQYYQDQDDSNKASACDFSGLASTQTPQTTGNCKALLDAAGTDGTGNVASETGGDASDSGNAAANGLATPLFFNFGATIFTGYAILAVVSGVGMIVL

SEQ ID NO: 26263 - DNA, 2517 bp, Muscodor strobelii
  misc_feature: SGI cDNA ID NO. 568979
  misc_feature: Encodes the peptide sequence at SEQ ID NO 26264
atggcaaaagactacaacaacgtgggtcaagaggagacaaacaagcagcccaggatgaatggcataaatggcatgaatggggcgagcaaagttaatggcgtcaacggtaccaacggtgccaatggccaaagcaagagggtacccctctgtggccccacggccgatgctgctcggtatgagctgaccagtccgacggctctgccgaaggccggagctttcctctggaatcagcagatgatgatccagatgacatgccggggttatgccacggcacagttcatgcagccggagccatccaagtatgtccatgctcccaatcttgaagcgagaactttcatgcaaccggagcagaactattatgctcaccaccccggccgttttgtgtatgtcaaagacgaggagaatccatcccggatcttctcggcgccacatgagccggtccgggccaagccggatcgattcgtcttctcggccgggaagaacgacatccgttggacggtggaaagccttggcatccgcattgagatgacgctgaacatcccaacgcatgatgtggcagagctctggaccgtcaatgttaccaatctgaccgacaagccaaggaagataagtgtgtacccttactttcccttcgggtacatgtcttggatgaaccagtcaggagaatggcgggaggatctctgtggtattgttgccagcagcatcacgccgtaccaaaaggccgaggagtacttcaagaacaaactcttgaaagacaagtcgtacttcgtctgcgagacgccacccactgcatatgaagcgatgcaaaatgccttcgaaggcgaaggcggacttcaggccccttctgccatcgtagagcaagaggaacttagccgtggcgatgctcgttacgaaacaccagcaggtactgtccaatatcgtcttgcgatgaagcccaacgagaacaagactcttcgtttcctcttcggccctgctctcgacgacgaggagatcatctcactgaaggccaaatatctctctgtcaaaggatttgctcgttgccaggtagactatgcaaactacatcgccaagggagccggctgtctgcaaattcagactccggaccctcacatcgacaacttcgtgaacaactggctgccgcgtcagtgtttctatcatggagatgtaaatcgtctaactaccgatcctcagacacgtaactacctgcaggataacatggggatgtcattcatctctccttcggttacacgccgtgcattcctcactgcgctcgcgcagcaagaagccaccggtgccatgcccgatggtattctactcgcagagggtgcagagttgaaatacatcaaccagatcccacataccgaccactgtgtctggcttccggtaacactagaggtgtatctctccgagacagcagattataccctattatctgaaaaggtactgggcatccatggagacacctacacagtttttgaacgcatctctcgcgccgtcgattggctcctatccgcgcgcgatgaacgcggcctatcctatatcgcccaaggcgactggtgcgaccccatgaacatggtcggctacaaaggcaaaggcgtatcgggctggctcacgctcgccacaggcttcgcctgcaaactctgggccgagatctgcacacagcaaaacaagcccgatctcgcatccaagtacctagcaggcgcaaaagccgtcaacgatgcagcaaacaaatacatgtggaattcatcatcgacctggttcgcgcggggtataacagacgacggcgtaaccttcggagtatcaaccgacaccgaaggcgccatctggcttaacccgcaaacctggtccatcctgtccggcgccgcatcaccgtctcaaaccaaatccattttggcatctgtagagaaacatctctcaacaccatacggctacctaatgttcgacccgccttacaccgggatgcgcgaggacatcggccgcgtaacccagaaatatcccggctccgcagaaaacggctcaatatacaaccacgcagcagtcttctacgcacactccctttactccctggactccccttcatcagcagacagcgcatacgccgtcctcgagaagttaatccctggtccaaaggacgaggactacatcacgcgcgggcaactaccaatctacatcccaaactactaccgcggcgcccaccgtctgtacccccgcaccgccggtcgatcctcacagctatttaacaccggaaccgtgtcctgggcataccgatgtttcatcgaaggactctgcggtctccgtggtgacgcccagggtctcgtgatccgaccccagttgcccagtcactgggacgagatgaaagtccgtcgtatcttccgaggcgccgaattcgtgatcgacgtacgacgcgccgacgtcgacgaagtgatcgttcgacacggaagtaaggtcttgcccgaatgccgattcacgaacatccaggcgggagagacgtacaaggtcttcgtctctgtaccgtag

SEQ ID NO: 26264 - protein, 838 aa, Muscodor strobelii
  misc_feature: SGI Peptide ID NO. 568979
  misc_feature (122)..(232): Pfam Id: PF06165 Pfam Desc: Glycosyltransferase family 36
  misc_feature (122)..(220): Pfam Id: PF06165 Pfam Desc: Glycosyltransferase family 36
  misc_feature (45)..(838): NCBI GI: 171678834 Blast Desc: protein product [Podospora anserina] gi|170937487|emb|CAP62145.1| protein product [Podospora anserina]
  misc_feature (44)..(838): NCBI GI: 85089905 Blast Desc: NCU09425 [Neurospora crassa OR74A] gi|28919496|gb|EAA28929.1| NCU09425 [Neurospora crassa OR74A]
  misc_feature (45)..(838): NCBI GI: 116204471 Blast Desc: CHGG_10119 [Chaetomium globosum CBS 148.51] gi|88176247|gb|EAQ83715.1| CHGG_10119 [Chaetomium globosum CBS 148.51]
  misc_feature (46)..(838): NCBI GI: 169603800 Blast Desc: SNOG_04908 [Phaeosphaeria nodorum SN15] gi|111066179|gb|EAT87299.1| SNOG_04908 [Phaeosphaeria nodorum SN15]
  misc_feature (46)..(838): NCBI GI: 39977285 Blast Desc: MGG_06545 [Magnaporthe grisea 70-15] gi|145016014|gb|EDK00504.1| MGG_06545 [Magnaporthe grisea 70-15]
  misc_feature (49)..(835): NCBI GI: 192359066 Blast Desc: cyclic beta-1, 2- glucan synthetase, , cgs94A [Cellvibrio japonicus Ueda107] gi|190685231|gb|ACE82909.1| cyclic beta-1, 2- glucan synthetase, , cgs94A [Cellvibrio japonicus
  misc_feature (55)..(838): NCBI GI: 90020553 Blast Desc: NdvB protein [Saccharophagus degradans 2-40] gi|89950153|gb|ABD80168.1| b-glycan phosphorylase [Saccharophagus degradans 2-40]
  misc_feature (49)..(838): NCBI GI: 285016904 Blast Desc: ndvb protein (glycosyltransferase family 36 ) [Xanthomonas albilineans] gi|283472122|emb|CBA14629.1| ndvb protein (glycosyltransferase family 36 ) [Xanthomonas
  misc_feature (67)..(731): NCBI GI: 189196468 Blast Desc: PTRG_04239 [Pyrenophora tritici-repentis Pt-1C-BFP] gi|187980451|gb|EDU47077.1| PTRG_04239 [Pyrenophora tritici-repentis Pt-1C-BFP]
  misc_feature (53)..(838): NCBI GI: 253574014 Blast Desc: NdvB protein [Paenibacillus sp. oral taxon 786 str. D14] gi|251846491|gb|EES74497.1| NdvB protein [Paenibacillus sp. oral taxon 786 str. D14]
MAKDYNNVGQEETNKQPRMNGINGMNGASKVNGVNGTNGANGQSKRVPLCGPTADAARYELTSPTALPKAGAFLWNQQMMIQMTCRGYATAQFMQPEPSKYVHAPNLEARTFMQPEQNYYAHHPGRFVYVKDEENPSRIFSAPHEPVRAKPDRFVFSAGKNDIRWTVESLGIRIEMTLNIPTHDVAELWTVNVTNLTDKPRKISVYPYFPFGYMSWMNQSGEWREDLCGIVASSITPYQKAEEYFKNKLLKDKSYFVCETPPTAYEAMQNAFEGEGGLQAPSAIVEQEELSRGDARYETPAGTVQYRLAMKPNENKTLRFLFGPALDDEEIISLKAKYLSVKGFARCQVDYANYIAKGAGCLQIQTPDPHIDNFVNNWLPRQCFYHGDVNRLTTDPQTRNYLQDNMGMSFISPSVTRRAFLTALAQQEATGAMPDGILLAEGAELKYINQIPHTDHCVWLPVTLEVYLSETADYTLLSEKVLGIHGDTYTVFERISRAVDWLLSARDERGLSYIAQGDWCDPMNMVGYKGKGVSGWLTLATGFACKLWAEICTQQNKPDLASKYLAGAKAVNDAANKYMWNSSSTWFARGITDDGVTFGVSTDTEGAIWLNPQTWSILSGAASPSQTKSILASVEKHLSTPYGYLMFDPPYTGMREDIGRVTQKYPGSAENGSIYNHAAVFYAHSLYSLDSPSSADSAYAVLEKLIPGPKDEDYITRGQLPIYIPNYYRGAHRLYPRTAGRSSQLFNTGTVSWAYRCFIEGLCGLRGDAQGLVIRPQLPSHWDEMKVRRIFRGAEFVIDVRRADVDEVIVRHGSKVLPECRFTNIQAGETYKVFVSVP

SEQ ID NO: 26265 - DNA, 1935 bp, Muscodor strobelii
  misc_feature: SGI cDNA ID NO. 568980
  misc_feature: Elevated expression when VOC is produced
  misc_feature: Encodes the peptide sequence at SEQ ID NO 26266
atgcgcggcagtggcggataccacagtgagcaagatggctcggttgatgttctcaagcgcagcatcccaaactcggaagtgcctaattttgaccctgccggtggtcaaaaaaaggaagacatcagcaacgaaagacggcattcttcgggatttggtataccggttgaacgtaatcaggatgatattgatgtcttgagggatattgacgccttgattgcacaagcaaatgatgaaggggatatcgaagaactaaaacaacacaaactgtcactacagaatcacttagatgctcttgaatccagaaagcgaaaaaagcagcatgggaaaagagtagagcaagacacagagcaagatactgctgtaattgacaggcgacaggagccctacagtctatcgaaggtgaaggcagaaaagttaatacttgattatactgccgatacgccctccgaagttcatcaggtatcagagaaagaccaatcaccatttctccaactccgtggcagtcgtttcattcccattggacctgacggccaaccacgacagccttctacagttcgtgaaaatcagtctatcacaagccccatcagaggccccacaagtccatgctcacagcgcgaaatcaatggcagcttggcagcgggagaatggcatgtcgctggggttgtaaatggaattgacatccaagcgttagccgatactggtgctaacataaatgcgatctcaaagagcgaagcagacaagatcggcttgattccagagaagacgagtgccggcagcaccatccgactaccttctgggaagacctgccactctctcggtatcgctaatgtcaatttcaactttgacggagaggaaacggttcacattttgcggtgcatcatagtagatcgcttggaatacagcatggtcgtctgctacgatttcttgcaaaagactgaaacattgacaacacacttcaaacagagaatcaaagaagtcgcaaagtcttgtatgcacaggatccctctttgtctattagaggatgtcgatgtcgccggcgccaaggacaccagagcacggatgagtggtatcatcaatgggcaactggcaaacgtcgtaccagatacgggctctggcattatggcagtatcggctaaatacgctaagagacttgggcttcacgttgatacaacgagaacaacaaaggttgtcttcgcagatggcagctgtgcaactacgtcaggtattgtcaatgcaacgtggaatttcctaccaccagatccacagtccgaaatacgcacatgtctagacgatgggggacaggcgcttgatccggaagggacaaagcgtgtagtgggattatcagatgccgaaggtgcagacaactccgagactgaaggcaatacatgggattacgattgggaatatgagtggcacgttattgatgacctgcctgtcgatgctattctcagtctgagcttcatcaagcggcatgacgtcttcggcagacatcaacatgcgttcgtaggcgcacctccacctcctaatatagcggagatattcggcatatgtgagctcccgggagggagtaaggagttgaaaagcttagctggggagttcatatctgatctaaactcgccaaatccgttctccctcaacatgatcgtgcgcgagagtgcccggcggggcgagattcagagacggatcgaagatcttcaaccacatgcccaaagcatgcaacggcttatggaacaagcaagggtcgagtcatgggagcgtatactggccaccaaggagaacggagaggactggtctcagctccgcactgagtacttgcaaggtctgcgttcacattcgacccagctctcgtggccccagcgcgccacagagatgtcaatcgcagaccctcaagatgaatcgaagaatagaagaggactgtggcgctggcgctggtag

SEQ ID NO: 26266 - protein, 644 aa, Muscodor strobelii
  misc_feature: SGI Peptide ID NO. 568980
  misc_feature (215)..(585): NCBI GI: 256726541 Blast Desc: NECHADRAFT_79593 [Nectria haematococca mpVI 77-13-4]
  misc_feature (172)..(593): NCBI GI: 115491263 Blast Desc: [Aspergillus terreus NIH2624] gi|114197119|gb|EAU38819.1| [Aspergillus terreus NIH2624]
  misc_feature (210)..(586): NCBI GI: 145610933 Blast Desc: MGG_00796 [Magnaporthe grisea 70-15] gi|145018267|gb|EDK02546.1| MGG_00796 [Magnaporthe grisea 70-15]
  misc_feature (45)..(147): NCBI GI: 256734529 Blast Desc: [Nectria haematococca mpVI 77-13-4]
  misc_feature (45)..(142): NCBI GI: 46107264 Blast Desc: FG00515.1 [Gibberella zeae PH-1]
  misc_feature (229)..(585): NCBI GI: 169616614 Blast Desc: SNOG_11480 [Phaeosphaeria nodorum SN15] gi|111060068|gb|EAT81188.1| SNOG_11480 [Phaeosphaeria nodorum SN15]
  misc_feature (45)..(140): NCBI GI: 261355995 Blast Desc: conserved [Verticillium albo-atrum VaMs.102]
  misc_feature (17)..(134): NCBI GI: 156062590 Blast Desc: SS1G_01411 [Sclerotinia sclerotiorum 1980] gi|154696747|gb|EDN96485.1| SS1G_01411 [Sclerotinia sclerotiorum 1980]
  misc_feature (45)..(127): NCBI GI: 85112227 Blast Desc: NCU00499 [Neurospora crassa OR74A] gi|28926080|gb|EAA35067.1| conserved [Neurospora crassa OR74A]
  misc_feature (17)..(134): NCBI GI: 154308816 Blast Desc: BC1G_07936 [Botryotinia fuckeliana B05.10] gi|150852562|gb|EDN27754.1| BC1G_07936 [Botryotinia fuckeliana B05.10]
  misc_feature: Useful for introducing or modulating the production of volatile compounds
MRGSGGYHSEQDGSVDVLKRSIPNSEVPNFDPAGGQKKEDISNERRHSSGFGIPVERNQDDIDVLRDIDALIAQANDEGDIEELKQHKLSLQNHLDALESRKRKKQHGKRVEQDTEQDTAVIDRRQEPYSLSKVKAEKLILDYTADTPSEVHQVSEKDQSPFLQLRGSRFIPIGPDGQPRQPSTVRENQSITSPIRGPTSPCSQREINGSLAAGEWHVAGVVNGIDIQALADTGANINAISKSEADKIGLIPEKTSAGSTIRLPSGKTCHSLGIANVNFNFDGEETVHILRCIIVDRLEYSMVVCYDFLQKTETLTTHFKQRIKEVAKSCMHRIPLCLLEDVDVAGAKDTRARMSGIINGQLANVVPDTGSGIMAVSAKYAKRLGLHVDTTRTTKVVFADGSCATTSGIVNATWNFLPPDPQSEIRTCLDDGGQALDPEGTKRVVGLSDAEGADNSETEGNTWDYDWEYEWHVIDDLPVDAILSLSFIKRHDVFGRHQHAFVGAPPPPNIAEIFGICELPGGSKELKSLAGEFISDLNSPNPFSLNMIVRESARRGEIQRRIEDLQPHAQSMQRLMEQARVESWERILATKENGEDWSQLRTEYLQGLRSHSTQLSWPQRATEMSIADPQDESKNRRGLWRWRW

SEQ ID NO: 26267 - DNA, 1366 bp, Muscodor strobelii
  misc_feature: SGI EST ID NO. CUFF.61940.0
  misc_feature: Variant of the nucleotide sequence at SEQ ID NO 26265
ttcacattttgcggtgcatcatagtagatcgcttggaatacagcatggtcgtctgctacgatttcttgcaaaagactgaaacattgacaacacacttcaaacagagaatcaaagaagtcgcaaagtcttgtatgcacaggatccctctttgtctattagaggatgtcgatgtcgccggcgccaaggacaccagagcacggatgagtggtatcatcaatgggcaactggcaaacgtcgtaccagatacgggctctggcattatggcagtatcggctaaatacgctaagagacttgggcttcacgttgatacaacgagaacaacaaaggttgtcttcgcagatggcagctgtgcaactacgtcaggtattgtcaatgcaacgtggaatttcctaccaccagatccacagtccgaaatacgcacatgtctagacgatgggggacaggcgcttgatccggaagggacaaagcgtgtagtgggattatcagatgccgaaggtgcagacaactccgagactgaaggcaatacatgggattacgattgggaatatgagtggcacgttattgatgacctgcctgtcgatgctattctcagtctgagcttcatcaagcggcatgacgtcttcggcagacatcaacatgcgttcgtaggcgcacctccacctcctaatatagcggagatattcggcatatgtgagctcccgggagggagtaaggagttgaaaagcttagctggggagttcatatctgatctaaactcgccaaatccgttctccctcaacatgatcgtgcgcgagagtgcccggcggggcgagattcagagacggatcgaagatcttcaaccacatgcccaaagcatgcaacggcttatggaacaagcaagggtcgagtcatgggagcgtatactggccaccaaggagaacggagaggactggtctcagctccgcactgagtacttgcaaggtctgcgttcacattcgacccagctctcgtggccccagcgcgccacagagatgtcaatcgcagaccctcaagatgaatcgaagaatagaagaggactgtggcgctggcgctggtagaagacccagaatttttccatgtttcttatctcattgcctttgcctcgtattgaatgccgatccaattgattgttttcagtcgtaaaatcggagcattcgtttcacctagtcatctacaaatattagcatatgaccttcaggaggattctcattgtcaatctatctcagcgctttccgtattcattcatcctactctttgaggaaaataccgcagtgaagcttcgtcctcggcacaaactttgcgatgtggaattcgcgctcgttacacatttgatgcgcctgggacgagc

SEQ ID NO: 26268 - DNA, 915 bp, Muscodor strobelii
  misc_feature: SGI cDNA ID NO. 568981
  misc_feature: Encodes the peptide sequence at SEQ ID NO 26269
atgtcggaacatatagagctcggcaacatttttcaacatccgtctacaagcagaacatcaccaggttacccaagatgggcgtcgtggatcgcgtcagatccagacagcgagcctctcgtcttccggaaatttgatgaactggcatctctcaatattctctatctacagggtgagatgctggatatagaaaatcaattgagagacctagacagagaggacatgcgacgtccagatatagattccgtgaatgccgcccgtcaatgggaggtattggttgcgcaagccgcatcatccatgtcatcagactcggagtcgacggatacggtgtcgaaagcaactatacgagctaggagacgaatgaaactcatattgagattgcggaccactatcaaggaataccatgaggcactggcgcttctaagcaaggtcgcgcatttgcaagcgccgagccagcgagtcttaggagcgttgagacaaatgttcaattctgagggcttccctattctcgatggccaagctagagagtacctcgatgccaatgatctcgttgcgcttagaagcccgacctcagatccgttgtccgactatctaagaaagacgtgggcagtcaaaacgaaagatgccccagagggccaaccaagcattggacgtttcgaggagcaaattatcgcacgctgggtcaatttgttcaccatattatatgcgaccgtgttacttatcggacctatcttcggcctatactttgcgcggagcccatcggcgaagttggctcttattgccatcttcacggccgcctttgccggatgtgtgtcgctaattaccgccgctcggcgagctgaaatattctttggcacagcaacgtatgcagcagtattggtggtatttgttaacaatggggacttatcgggtgactaa

SEQ ID NO: 26269 - protein, 304 aa, Muscodor strobelii
  misc_feature: SGI Peptide ID NO. 568981
  misc_feature (22)..(296): NCBI GI: 256726540 Blast Desc: NECHADRAFT_79592 [Nectria haematococca mpVI 77-13-4]
  misc_feature (12)..(282): NCBI GI: 115491261 Blast Desc: [Aspergillus terreus NIH2624] gi|114197118|gb|EAU38818.1| [Aspergillus terreus NIH2624]
  misc_feature (22)..(286): NCBI GI: 169609999 Blast Desc: SNOG_08091 [Phaeosphaeria nodorum SN15] gi|111063247|gb|EAT84367.1| SNOG_08091 [Phaeosphaeria nodorum SN15]
  misc_feature (14)..(293): NCBI GI: 189196947 Blast Desc: conserved [Pyrenophora tritici-repentis Pt-1C-BFP] gi|187980759|gb|EDU47385.1| conserved [Pyrenophora tritici-repentis Pt-1C-BFP]
  misc_feature (22)..(280): NCBI GI: 169616612 Blast Desc: SNOG_11479 [Phaeosphaeria nodorum SN15] gi|111060067|gb|EAT81187.1| SNOG_11479 [Phaeosphaeria nodorum SN15]
  misc_feature (16)..(281): NCBI GI: 256734893 Blast Desc: NECHADRAFT_75615 [Nectria haematococca mpVI 77-13-4]
  misc_feature (19)..(286): NCBI GI: 256731937 Blast Desc: NECHADRAFT_80821 [Nectria haematococca mpVI 77-13-4]
  misc_feature (18)..(301): NCBI GI: 256724957 Blast Desc: NECHADRAFT_91425 [Nectria haematococca mpVI 77-13-4]
  misc_feature (22)..(301): NCBI GI: 46126473 Blast Desc: FG07614.1 [Gibberella zeae PH-1]
  misc_feature (19)..(286): NCBI GI: 145610931 Blast Desc: [Magnaporthe grisea 70-15] gi|145018266|gb|EDK02545.1| [Magnaporthe grisea 70-15]
MSEHIELGNIFQHPSTSRTSPGYPRWASWIASDPDSEPLVFRKFDELASLNILYLQGEMLDIENQLRDLDREDMRRPDIDSVNAARQWEVLVAQAASSMSSDSESTDTVSKATIRARRRMKLILRLRTTIKEYHEALALLSKVAHLQAPSQRVLGALRQMFNSEGFPILDGQAREYLDANDLVALRSPTSDPLSDYLRKTWAVKTKDAPEGQPSIGRFEEQIIARWVNLFTILYATVLLIGPIFGLYFARSPSAKLALIAIFTAAFAGCVSLITAARRAEIFFGTATYAAVLVVFVNNGDLSGD

SEQ ID NO: 26270 - DNA, 1170 bp, Muscodor strobelii
  misc_feature: SGI EST ID NO. CUFF.61945.0
  misc_feature: Variant of the nucleotide sequence at SEQ ID NO 26268
cgcaataccattcgggcgtgaaatatgtcggaacatatagagctcggcaacatttttcaacatccgtctacaagcagaacatcaccaggttacccaagatgggcgtcgtggatcgcgtcagatccagacagcgagcctctcgtcttccggaaatttgatgaactggcatctctcaatattctctatctacagggtgagatgctggatatagaaaatcaattgagagacctagacagagaggacatgcgacgtccagatatagattccgtgaatgccgcccgtcaatgggaggtattggttgcgcaagccgcatcatccatgtcatcagactcggagtcgacggatacggtgtcgaaagcaactatacgagctaggagacgaatgaaactcatattgagattgcggaccactatcaaggaataccatgaggcactggcgcttctaagcaaggtcgcgcatttgcaagcgccgagccagcgagtcttaggagcgttgagacaaatgttcaattctgagggcttccctattctcgatggccaagctagagagtacctcgatgccaatgatctcgttgcgcttagaagcccgacctcagatccgttgtccgactatctaagaaagacgtgggcagtcaaaacgaaagatgccccagagggccaaccaagcattggacgtttcgaggagcaaattatcgcacgctgggtcaatttgttcaccatattatatgcgaccgtgttacttatcggacctatcttcggcctatactttgcgcggagcccatcggcgaagttggctcttattgccatcttcacggccgcctttgccggatgtgtgtcgctaattaccgccgctcggcgagctgaaatattctttggcacagcaacgtatgcagcagtattggtggtatttgttaacaatggggacttatcgggtgactaattgggcggtgagagttcatcgtcccgtcgaaatacaaagctagtcatagctatgcttctgatgtagggtgatatctcttggcttaatttaactctcatacaatgaagatccttgtatgggaacctttgttgtaatgatgacccttcattcctgagtgatgcgagggtgatagaactgcgcaacttaaaaatctactcatcacgtagtctatggctatggtattaatctagt

SEQ ID NO: 26271 - DNA, 2526 bp, Muscodor strobelii
  misc_feature: SGI cDNA ID NO. 568982
  misc_feature: Encodes the peptide sequence at SEQ ID NO 26272
atgcctgcacggacgcgtgcgcgcgacaatgcttcggcaaatgttgtatacaaacccacgcctcctgctcccaagcagcaagaatttccctataaacgtcgcacagtcaagaagacatacgggcggccaaaccctgctcggaaattaaggcaggggacactaacccagatggattttacgtcttcagctatgcaggacttctttgatgaggaagacgatgaggatgaaaaggagaatcaagaaccagagctcatgaacctctcaaagccaaaaacgaaagcaaaggcaaagtctcgctcaaacagacgaaagactaccggtgatgtgctagaaatgggtgaacttgagctggaggaagaatcgccgcgaagatccaaacgacgaaagactctaggagatgcacccagctctgctgcatcaagcagctttcatacgcagactttgacacagtttcttgggactaaagatgaggacgaacaagaaaagtggcagatcaacgattcagaagatgaccaagacgacgaagacgacgacgatatcctaatcatggaaacccctagaaaagatcaaaaatctcacccccatggatcacagggcaattccgagtcagccgttccaagcttaatcaaatcatcgacacctgccaatcgcgagaagaaggcagatctatcttctgttcaatcactcgagactcctttgattttgcgaaataacccaatatctagggactcgcccttgataacaaagtcaatgaatgtggacgagctttcgccaatcctcaagaagtcaccagccgtgaggagacttgggaggataccatcagatgctgtcattccagattcatacagcactgcccatgattcttcccccgtacagtcttcagcatccactgtcaaggcgactccctccaagaagctgcgctttgatctaccagacgacaaggagaatgttacaccaggtagaacaaagcccaaatctccgaagccgaagagccaagctccaaaacggccaccactgcaagaaattcccgactctgatgaggaagctgatttcgatgagactgaagatgagaccgagagtgaggatgaacacgacgatgagagcccagatagccccacgcctaaacgcttccgtaatgtcgcgccctcagccgacaatgtcgaagaagagcttgccggtgccgattacggaatcggagaagaaacacaagcagtcttgatatcgtctgcaagatcactttcacagagtcgcgagcttggcgcaagctcgagtgccgccaaaacatcctcacaggagcctgaagctttgaaactatcagaagataccgatggcgaccaggacgcgggggattcagcatcggtgcagattatagaagagactcctgccgcaacaccctctgaacatgcggacgacgatgatgacaaggatgctgagaacaaagatcccgaggacgatgtgtctccacaaacgcaagcattcggagcattcgcctacactcaatgtatggagagccaacgtgtacctctggacacaatccgcgctatgggtccgcagaatcatcgttcagacatcatggtttcgctacatccagagcacatcgcgaagattgtgaatagaaccaagaaccatgagttcagagcctggaagatccccgacgaggttcgtcgtgtatggatctacattacaaggccagagatgcagctgaaatacatgtgcatgttcggtccgccaaaatcccaaggagagatcacagacgaaaacggtattggcaaccgagagttcaacgaagggcaaaaagtggcgaagttcgcgtacgagatactacaggtctacgagttgaacaatcccgtctcgctggcagagatgaaagaaaaaggctgggtcaatggcccgcctcagaaatatgctttcataccccctgctgtcgtcggcgaactaacagcgaacttaaggtgttccctgttcggcgaagacactcaatcagatagccagatacaatccagcccccagatcaatgacccttcagagtctcaagagctcaaagcacaactacagagcgacgccgactacaacacgcagcattactcctcagaactagctgacgaggtggtccctgcaagccagtctccagtcaccagaagaggacgtaagaaccacaacgatagtcaccaggacgaaaacttcaccaggccacctctaccacgaactcgctcccttgcatctcagaacctgcccccgataccaggtcctcgccaagtccggccttcccaagccacaacagtgagccaagtatcgtccagtcctgccctgtctcccgatcgccatgcgattttgatctcgtcccaagaccaagacggcagcggtagcagtggtctccgcagaacccactcctcgcttcgctcatcgcaatatccaacacggagccagatgttgcctgatagtctcatcaatgatgagatcgcgcctccgccgcccgttatttgggattcggccgatgaagactctgatggaatcagtgatttgtga

SEQ ID NO: 26272 - protein, 841 aa, Muscodor strobelii
  misc_feature: SGI Peptide ID NO. 568982
  misc_feature (1)..(816): NCBI GI: 261359366 Blast Desc: conserved [Verticillium albo-atrum VaMs.102]
  misc_feature (489)..(828): NCBI GI: 116202749 Blast Desc: CHGG_09259 [Chaetomium globosum CBS 148.51] gi|88177777|gb|EAQ85245.1| CHGG_09259 [Chaetomium globosum CBS 148.51]
  misc_feature (497)..(827): NCBI GI: 39942484 Blast Desc: MGG_03322 [Magnaporthe grisea 70-15] gi|145015669|gb|EDK00159.1| MGG_03322 [Magnaporthe grisea 70-15]
  misc_feature (1)..(834): NCBI GI: 46134207 Blast Desc: FG09243.1 [Gibberella zeae PH-1]
  misc_feature (490)..(660): NCBI GI: 171682554 Blast Desc: protein product [Podospora anserina] gi|170941236|emb|CAP66886.1| protein product [Podospora anserina]
  misc_feature (498)..(656): NCBI GI: 85095997 Blast Desc: NCU09867 [Neurospora crassa OR74A] gi|28921664|gb|EAA30948.1| [Neurospora crassa OR74A]
  misc_feature (499)..(834): NCBI GI: 256727167 Blast Desc: NECHADRAFT_58610 [Nectria haematococca mpVI 77-13-4]
  misc_feature (515)..(661): NCBI GI: 261193429 Blast Desc: conserved [Ajellomyces dermatitidis SLH14081] gi|239588725|gb|EEQ71368.1| conserved [Ajellomyces dermatitidis SLH14081] gi|239613953|gb|EEQ90940.1| conserved [Ajellomyces
  misc_feature (523)..(643): NCBI GI: 154281335 Blast Desc: [Ajellomyces capsulatus NAm1] gi|150411659|gb|EDN07047.1| [Ajellomyces capsulatus NAm1]
  misc_feature (523)..(643): NCBI GI: 225562977 Blast Desc: conserved [Ajellomyces capsulatus G186AR] gi|240279797|gb|EER43302.1| conserved [Ajellomyces capsulatus H143]
MPARTRARDNASANVVYKPTPPAPKQQEFPYKRRTVKKTYGRPNPARKLRQGTLTQMDFTSSAMQDFFDEEDDEDEKENQEPELMNLSKPKTKAKAKSRSNRRKTTGDVLEMGELELEEESPRRSKRRKTLGDAPSSAASSSFHTQTLTQFLGTKDEDEQEKWQINDSEDDQDDEDDDDILIMETPRKDQKSHPHGSQGNSESAVPSLIKSSTPANREKKADLSSVQSLETPLILRNNPISRDSPLITKSMNVDELSPILKKSPAVRRLGRIPSDAVIPDSYSTAHDSSPVQSSASTVKATPSKKLRFDLPDDKENVTPGRTKPKSPKPKSQAPKRPPLQEIPDSDEEADFDETEDETESEDEHDDESPDSPTPKRFRNVAPSADNVEEELAGADYGIGEETQAVLISSARSLSQSRELGASSSAAKTSSQEPEALKLSEDTDGDQDAGDSASVQIIEETPAATPSEHADDDDDKDAENKDPEDDVSPQTQAFGAFAYTQCMESQRVPLDTIRAMGPQNHRSDIMVSLHPEHIAKIVNRTKNHEFRAWKIPDEVRRVWIYITRPEMQLKYMCMFGPPKSQGEITDENGIGNREFNEGQKVAKFAYEILQVYELNNPVSLAEMKEKGWVNGPPQKYAFIPPAVVGELTANLRCSLFGEDTQSDSQIQSSPQINDPSESQELKAQLQSDADYNTQHYSSELADEVVPASQSPVTRRGRKNHNDSHQDENFTRPPLPRTRSLASQNLPPIPGPRQVRPSQATTVSQVSSSPALSPDRHAILISSQDQDGSGSSGLRRTHSSLRSSQYPTRSQMLPDSLINDEIAPPPPVIWDSADEDSDGISDL

SEQ ID NO: 26273 - DNA, 5460 bp, Muscodor strobelii
  misc_feature: SGI EST ID NO. CUFF.61951.0
  misc_feature: Variant of the nucleotide sequence at SEQ ID NO 26271
tgataagccaggtctatttataaccgtccaatatctgaatgttatataaagattcggcatgttcggctcatctctacgtcttggtattccatcaaaaaaaaaagcccgtagttgtcatagacaagatctagcctgaaatcgactactatcccatcataacttcgctttgctctccgcacccttcttccgcgatccgggaggcggcccaagaagtttcagagagtactcactcagcgtgctcttctctcgcagcgggagcttagcccactcctcatacgccttctgttcctcggcgaacctctgcatttctgtcccaatccaactagccgcgtgctcagcgcaatggccagggacttccatagggaacaaatgtcccttcttttccattactatccccttcactctgccttctttcacaccgccgctcccgccgggtccgacaccagtagtcctcaaacgcagatcttgcagctcgggagttgaaagatcgcttgtttccccaaatagatagagaacagatggccggacctcgggcagcttattgagcacaatgccgccttctgagcgatagaagaggaaaggttctttgccaggtggtagtaggtcaaggagcttggtgtcatagtcaggggcaccggtcctggatacagtgggcaagggcttatctgtgtagtgaggccataagggtctgaagaaagtgaagagctcttggtgtttcgtcgtcgttagggttgcgggggcagcatcaggatctgtcgatgagggcaggggagaagcatcaggatgaagtgttgtaggcagttcccgaacagcatgttcaatccaggcatcaaggacccgcgaatcccaagaccgatagaatggcgacttgcgaaacgcgatttctgcatcctttcgactgggccagatgtcgcgtctgaatgctgacaatttggcgggatcaacgcctgggccttgaagtcgcttgggatcgaaggcaatgatcgttggatctagcagtactagtgtactcaatagtctagggtgcagaagcgagaggtgcgttaagatgtttgcgccgtatgagtgtccgattccgatgatagggcgcggcatctcagatctgaacacattcgtcatgtgcagaagatcgcggctatggtcgtgccagcagggctcatcgcctatgatatcttcattcaagactccgctatagccttgattggacatatctgctatccagatgctacggattcgtgggccacctgccttctgtagctgggcgtggagttcaacccataaagcttcgtagagctcctttggaaatccacatgcatgtgcgccaagaattgttaagtcgcctggtttggggtttggattatctttgggtatgtattgcttgacttggagatgaaggatatcttcctgtgcattggctgttgcatgggcccattcgcgaatgtgctggcactccacatcatgtgtctttatgtcgaagggaaaagacgacatggctgctatatcttgcgtcaaattgatgattctagtgtgaagtgaaggtgtctctagtggatgaaagcactcgatccggtcgtacgtctgagtgagtgtatgattccccgcaatggtagttaagcacctccagcgctcaatcagccaactggaaggatcacaagtacgtatatacgctcatgagttacacaaattgtctatctcttcgggaaataaagtcgatttgcattaaaatatcttgtgatacgatgcctagcgttcgtatacggttcgtcgggggacacgactatcacacagtcggaggccgtccaaagctgagggctcttgagacaaaaacactattactcgcacaaacttgtgtaataatagtaagaccagagagcctcaaatacgatgcttgtggcagcttccgagtgctacgatttcaggcatgggttgtaagtataaggagatgagacatgaatgagtgaaggtggattgagctgagactcaagtggcggccacattttgcctcggcactttgacagagtagccggcatattacaggggcagttagctgtacgtagacggaggaacagtattgtctgatcaccaatgccacccgacggaaggaagaggaacgacacggggatggacgtcggatgtatcaattgatggcatgttcactttgccctcctattttgtgacacttcaaatgttgaaagctgagtagtcgacgggaatgagtctggtgaaacggacagtgggagcgtgcaagcggggtggatgctcaagcggggtattgttaaactcagcaatatgcatatatgcgtcccagtctaaattgatatgcgttagacgcgttgggcgcaccctcgtcgcgtcgcaactgcattctttcaacgtcattggggcaaactcgcatctcaagggatgaactacataaggccataatccgtacagcaaacagtctggcaaacagtctcgatttccaatttggaattaccggtgcatccaagtttagttgtcatctggcctcgttgactcgactacgtctagcgtaacctctggggactcgccgggtgacccagctacttggcggaaccttaacaacgaacgttgaccgttgccgcggaggtaggcgcagtgatgcctgcacggacgcgtgcgcgcgacaatgcttcggcaaatgttgtatacaaacccacgcctcctgctcccaagcagcaagaatttccctataaacgtcgcacagtcaagaagacatacgggcggccaaaccctgctcggaaattaaggcaggggacactaacccagatggattttacgtcttcagctatgcaggacttctttgatgaggaagacgatgaggatgaaaaggagaatcaagaaccagagctcatgaacctctcaaagccaaaaacgaaagcaaaggcaaagtctcgctcaaacagacgaaagactaccggtgatgtgctagaaatgggtgaacttgagctggaggaagaatcgccgcgaagatccaaacgacgaaagactctaggagatgcacccagctctgctgcatcaagcagctttcatacgcagactttgacacagtttcttgggactaaagatgaggacgaacaagaaaagtggcagatcaacgattcagaagatgaccaagacgacgaagacgacgacgatatcctaatcatggaaacccctagaaaagatcaaaaatctcacccccatggatcacagggcaattccgagtcagccgttccaagcttaatcaaatcatcgacacctgccaatcgcgagaagaaggcagatctatcttctgttcaatcactcgagactcctttgattttgcgaaataacccaatatctagggactcgcccttgataacaaagtcaatgaatgtggacgagctttcgccaatcctcaagaagtcaccagccgtgaggagacttgggaggataccatcagatgctgtcattccagattcatacagcactgcccatgattcttcccccgtacagtcttcagcatccactgtcaaggcgactccctccaagaagctgcgctttgatctaccagacgacaaggagaatgttacaccaggtagaacaaagcccaaatctccgaagccgaagagccaagctccaaaacggccaccactgcaagaaattcccgactctgatgaggaagctgatttcgatgagactgaagatgagaccgagagtgaggatgaacacgacgatgagagcccagatagccccacgcctaaacgcttccgtaatgtcgcgccctcagccgacaatgtcgaagaagagcttgccggtgccgattacggaatcggagaagaaacacaagcagtcttgatatcgtctgcaagatcactttcacagagtcgcgagcttggcgcaagctcgagtgccgccaaaacatcctcacaggagcctgaagctttgaaactatcagaagataccgatggcgaccaggacgcgggggattcagcatcggtgcagattatagaagagactcctgccgcaacaccctctgaacatgcggacgacgatgatgacaaggatgctgagaacaaagatcccgaggacgatgtgtctccacaaacgcaagcattcggagcattcgcctacactcaatgtatggagagccaacgtgtacctctggacacaatccgcgctatgggtccgcagaatcatcgttcagacatcatggtttcgctacatccagagcacatcgcgaagattgtgaatagaaccaagaaccatgagttcagagcctggaagatccccgacgaggttcgtcgtgtatggatctacattacaaggccagagatgcagctgaaatacatgtgcatgttcggtccgccaaaatcccaaggagagatcacagacgaaaacggtattggcaaccgagagttcaacgaagggcaaaaagtggcgaagttcgcgtacgagatactacaggtctacgagttgaacaatcccgtctcgctggcagagatgaaagaaaaaggctgggtcaatggcccgcctcagaaatatgctttcataccccctgctgtcgtcggcgaactaacagcgaacttaaggtgttccctgttcggcgaagacactcaatcagatagccagatacaatccagcccccagatcaatgacccttcagagtctcaagagctcaaagcacaactacagagcgacgccgactacaacacgcagcattactcctcagaactagctgacgaggtggtccctgcaagccagtctccagtcaccagaagaggacgtaagaaccacaacgatagtcaccaggacgaaaacttcaccaggccacctctaccacgaactcgctcccttgcatctcagaacctgcccccgataccaggtcctcgccaagtccggccttcccaagccacaacagtgagccaagtatcgtccagtcctgccctgtctcccgatcgccatgcgattttgatctcgtcccaagaccaagacggcagcggtagcagtggtctccgcagaacccactcctcgcttcgctcatcgcaatatccaacacggagccagatgttgcctgatagtctcatcaatgatgagatcgcgcctccgccgcccgttatttgggattcggccgatgaagactctgatggaatcagtgatttgtgaggagatataagctcgcgatgatctgagcgacaaagaggttatgggcgatatgatgtgagaatgagctactagcggagctgaggaccacactcttgcatgagtatatgaattgcttgcattgcattgcatcacggtgttttgatagattgggttggatcattactcaaggtcgggtatcttttcatttgggaagaatgggaacagcgagacaccatttcggtgtcctatagcgtcatgtcatgaacttgagaagaacgaaattgatttatcctgccttaaatatctacgcacttgatgtgactctatcacgccata

SEQ ID NO: 26274 - DNA, 1338 bp, Muscodor strobelii
  misc_feature: SGI cDNA ID NO. 568983
  misc_feature: Encodes the peptide sequence at SEQ ID NO 26275
atgtcgtcttttcccttcgacataaagacacatgatgtggagtgccagcacattcgcgaatgggcccatgcaacagccaatgcacaggaagatatccttcatctccaagtcaagcaatacatacccaaagataatccaaaccccaaaccaggcgacttaacaattcttggcgcacatgcatgtggatttccaaaggagctctacgaagctttatgggttgaactccacgcccagctacagaaggcaggtggcccacgaatccgtagcatctggatagcagatatgtccaatcaaggctatagcggagtcttgaatgaagatatcataggcgatgagccctgctggcacgaccatagccgcgatcttctgcacatgacgaatgtgttcagatctgagatgccgcgccctatcatcggaatcggacactcatacggcgcaaacatcttaacgcacctctcgcttctgcaccctagactattgagtacactagtactgctagatccaacgatcattgccttcgatcccaagcgacttcaaggcccaggcgttgatcccgccaaattgtcagcattcagacgcgacatctggcccagtcgaaaggatgcagaaatcgcgtttcgcaagtcgccattctatcggtcttgggattcgcgggtccttgatgcctggattgaacatgctgttcgggaactgcctacaacacttcatcctgatgcttctcccctgccctcatcgacagatcctgatgctgcccccgcaaccctaacgacgacgaaacaccaagagctcttcactttcttcagacccttatggcctcactacacagataagcccttgcccactgtatccaggaccggtgcccctgactatgacaccaagctccttgacctactaccacctggcaaagaacctttcctcttctatcgctcagaaggcggcattgtgctcaataagctgcccgaggtccggccatctgttctctatctatttggggaaacaagcgatctttcaactcccgagctgcaagatctgcgtttgaggactactggtgtcggacccggcgggagcggcggtgtgaaagaaggcagagtgaaggggatagtaatggaaaagaagggacatttgttccctatggaagtccctggccattgcgctgagcacgcggctagttggattgggacagaaatgcagaggttcgccgaggaacagaaggcgtatgaggagtgggctaagctcccgctgcgagagaagagcacgctgagtgagtactctctgaaacttcttgggccgcctcccggatcgcggaagaagggtgcggagagcaaagcgaagttatga

SEQ ID NO: 26275 - protein, 445 aa, Muscodor strobelii
  misc_feature: SGI Peptide ID NO. 568983
  misc_feature (3)..(445): NCBI GI: 242768952 Blast Desc: toxin biosynthesis protein, [Talaromyces stipitatus ATCC 10500] gi|218724867|gb|EED24284.1| toxin biosynthesis protein, [Talaromyces stipitatus ATCC 10500]
  misc_feature (1)..(445): NCBI GI: 115389578 Blast Desc: conserved [Aspergillus terreus NIH2624] gi|114194690|gb|EAU36390.1| conserved [Aspergillus terreus NIH2624]
  misc_feature (5)..(442): NCBI GI: 70993504 Blast Desc: toxin biosynthesis protein [Aspergillus fumigatus Af293] gi|66849233|gb|EAL89561.1| toxin biosynthesis protein, [Aspergillus fumigatus Af293] gi|159125474|gb|EDP50591.1| toxin
  misc_feature (5)..(444): NCBI GI: 212542459 Blast Desc: toxin biosynthesis protein, [Penicillium marneffei ATCC 18224] gi|210066291|gb|EEA20384.1| toxin biosynthesis protein, [Penicillium marneffei ATCC 18224]
  misc_feature (5)..(445): NCBI GI: 119500096 Blast Desc: toxin biosynthesis protein, [Neosartorya fischeri NRRL 181] gi|119414970|gb|EAW24908.1| toxin biosynthesis protein, [Neosartorya fischeri NRRL 181]
  misc_feature (1)..(409): NCBI GI: 189189880 Blast Desc: conserved [Pyrenophora tritici-repentis Pt-1C-BFP] gi|187972885|gb|EDU40384.1| conserved [Pyrenophora tritici-repentis Pt-1C-BFP]
  misc_feature (1)..(440): NCBI GI: 156030651 Blast Desc: SS1G_14421 [Sclerotinia sclerotiorum 1980] gi|154700812|gb|EDO00551.1| SS1G_14421 [Sclerotinia sclerotiorum 1980]
  misc_feature (6)..(445): NCBI GI: 85085759 Blast Desc: NCU03925 [Neurospora crassa OR74A] gi|16945436|emb|CAB91703.2| related to host-specific AK-toxin Akt2 [Neurospora crassa] gi|28918657|gb|EAA28328.1| conserved
  misc_feature (6)..(422): NCBI GI: 238838963 Blast Desc: conserved [Microsporum canis CBS 113480]
  misc_feature (1)..(445): NCBI GI: 256734031 Blast Desc: NECHADRAFT_35713 [Nectria haematococca mpVI 77-13-4]
MSSFPFDIKTHDVECQHIREWAHATANAQEDILHLQVKQYIPKDNPNPKPGDLTILGAHACGFPKELYEALWVELHAQLQKAGGPRIRSIWIADMSNQGYSGVLNEDIIGDEPCWHDHSRDLLHMTNVFRSEMPRPIIGIGHSYGANILTHLSLLHPRLLSTLVLLDPTIIAFDPKRLQGPGVDPAKLSAFRRDIWPSRKDAEIAFRKSPFYRSWDSRVLDAWIEHAVRELPTTLHPDASPLPSSTDPDAAPATLTTTKHQELFTFFRPLWPHYTDKPLPTVSRTGAPDYDTKLLDLLPPGKEPFLFYRSEGGIVLNKLPEVRPSVLYLFGETSDLSTPELQDLRLRTTGVGPGGSGGVKEGRVKGIVMEKKGHLFPMEVPGHCAEHAASWIGTEMQRFAEEQKAYEEWAKLPLREKSTLSEYSLKLLGPPPGSRKKGAESKAKL

SEQ ID NO: 26276 - DNA, 5460 bp, Muscodor strobelii
  misc_feature: SGI EST ID NO. CUFF.61951.0
  misc_feature: Variant of the nucleotide sequence at SEQ ID NO 26274
tatggcgtgatagagtcacatcaagtgcgtagatatttaaggcaggataaatcaatttcgttcttctcaagttcatgacatgacgctataggacaccgaaatggtgtctcgctgttcccattcttcccaaatgaaaagatacccgaccttgagtaatgatccaacccaatctatcaaaacaccgtgatgcaatgcaatgcaagcaattcatatactcatgcaagagtgtggtcctcagctccgctagtagctcattctcacatcatatcgcccataacctctttgtcgctcagatcatcgcgagcttatatctcctcacaaatcactgattccatcagagtcttcatcggccgaatcccaaataacgggcggcggaggcgcgatctcatcattgatgagactatcaggcaacatctggctccgtgttggatattgcgatgagcgaagcgaggagtgggttctgcggagaccactgctaccgctgccgtcttggtcttgggacgagatcaaaatcgcatggcgatcgggagacagggcaggactggacgatacttggctcactgttgtggcttgggaaggccggacttggcgaggacctggtatcgggggcaggttctgagatgcaagggagcgagttcgtggtagaggtggcctggtgaagttttcgtcctggtgactatcgttgtggttcttacgtcctcttctggtgactggagactggcttgcagggaccacctcgtcagctagttctgaggagtaatgctgcgtgttgtagtcggcgtcgctctgtagttgtgctttgagctcttgagactctgaagggtcattgatctgggggctggattgtatctggctatctgattgagtgtcttcgccgaacagggaacaccttaagttcgctgttagttcgccgacgacagcagggggtatgaaagcatatttctgaggcgggccattgacccagcctttttctttcatctctgccagcgagacgggattgttcaactcgtagacctgtagtatctcgtacgcgaacttcgccactttttgcccttcgttgaactctcggttgccaataccgttttcgtctgtgatctctccttgggattttggcggaccgaacatgcacatgtatttcagctgcatctctggccttgtaatgtagatccatacacgacgaacctcgtcggggatcttccaggctctgaactcatggttcttggttctattcacaatcttcgcgatgtgctctggatgtagcgaaaccatgatgtctgaacgatgattctgcggacccatagcgcggattgtgtccagaggtacacgttggctctccatacattgagtgtaggcgaatgctccgaatgcttgcgtttgtggagacacatcgtcctcgggatctttgttctcagcatccttgtcatcatcgtcgtccgcatgttcagagggtgttgcggcaggagtctcttctataatctgcaccgatgctgaatcccccgcgtcctggtcgccatcggtatcttctgatagtttcaaagcttcaggctcctgtgaggatgttttggcggcactcgagcttgcgccaagctcgcgactctgtgaaagtgatcttgcagacgatatcaagactgcttgtgtttcttctccgattccgtaatcggcaccggcaagctcttcttcgacattgtcggctgagggcgcgacattacggaagcgtttaggcgtggggctatctgggctctcatcgtcgtgttcatcctcactctcggtctcatcttcagtctcatcgaaatcagcttcctcatcagagtcgggaatttcttgcagtggtggccgttttggagcttggctcttcggcttcggagatttgggctttgttctacctggtgtaacattctccttgtcgtctggtagatcaaagcgcagcttcttggagggagtcgccttgacagtggatgctgaagactgtacgggggaagaatcatgggcagtgctgtatgaatctggaatgacagcatctgatggtatcctcccaagtctcctcacggctggtgacttcttgaggattggcgaaagctcgtccacattcattgactttgttatcaagggcgagtccctagatattgggttatttcgcaaaatcaaaggagtctcgagtgattgaacagaagatagatctgccttcttctcgcgattggcaggtgtcgatgatttgattaagcttggaacggctgactcggaattgccctgtgatccatgggggtgagatttttgatcttttctaggggtttccatgattaggatatcgtcgtcgtcttcgtcgtcttggtcatcttctgaatcgttgatctgccacttttcttgttcgtcctcatctttagtcccaagaaactgtgtcaaagtctgcgtatgaaagctgcttgatgcagcagagctgggtgcatctcctagagtctttcgtcgtttggatcttcgcggcgattcttcctccagctcaagttcacccatttctagcacatcaccggtagtctttcgtctgtttgagcgagactttgcctttgctttcgtttttggctttgagaggttcatgagctctggttcttgattctccttttcatcctcatcgtcttcctcatcaaagaagtcctgcatagctgaagacgtaaaatccatctgggttagtgtcccctgccttaatttccgagcagggtttggccgcccgtatgtcttcttgactgtgcgacgtttatagggaaattcttgctgcttgggagcaggaggcgtgggtttgtatacaacatttgccgaagcattgtcgcgcgcacgcgtccgtgcaggcatcactgcgcctacctccgcggcaacggtcaacgttcgttgttaaggttccgccaagtagctgggtcacccggcgagtccccagaggttacgctagacgtagtcgagtcaacgaggccagatgacaactaaacttggatgcaccggtaattccaaattggaaatcgagactgtttgccagactgtttgctgtacggattatggccttatgtagttcatcccttgagatgcgagtttgccccaatgacgttgaaagaatgcagttgcgacgcgacgagggtgcgcccaacgcgtctaacgcatatcaatttagactgggacgcatatatgcatattgctgagtttaacaataccccgcttgagcatccaccccgcttgcacgctcccactgtccgtttcaccagactcattcccgtcgactactcagctttcaacatttgaagtgtcacaaaataggagggcaaagtgaacatgccatcaattgatacatccgacgtccatccccgtgtcgttcctcttccttccgtcgggtggcattggtgatcagacaatactgttcctccgtctacgtacagctaactgcccctgtaatatgccggctactctgtcaaagtgccgaggcaaaatgtggccgccacttgagtctcagctcaatccaccttcactcattcatgtctcatctccttatacttacaacccatgcctgaaatcgtagcactcggaagctgccacaagcatcgtatttgaggctctctggtcttactattattacacaagtttgtgcgagtaatagtgtttttgtctcaagagccctcagctttggacggcctccgactgtgtgatagtcgtgtcccccgacgaaccgtatacgaacgctaggcatcgtatcacaagatattttaatgcaaatcgactttatttcccgaagagatagacaatttgtgtaactcatgagcgtatatacgtacttgtgatccttccagttggctgattgagcgctggaggtgcttaactaccattgcggggaatcatacactcactcagacgtacgaccggatcgagtgctttcatccactagagacaccttcacttcacactagaatcatcaatttgacgcaagatatagcagccatgtcgtcttttcccttcgacataaagacacatgatgtggagtgccagcacattcgcgaatgggcccatgcaacagccaatgcacaggaagatatccttcatctccaagtcaagcaatacatacccaaagataatccaaaccccaaaccaggcgacttaacaattcttggcgcacatgcatgtggatttccaaaggagctctacgaagctttatgggttgaactccacgcccagctacagaaggcaggtggcccacgaatccgtagcatctggatagcagatatgtccaatcaaggctatagcggagtcttgaatgaagatatcataggcgatgagccctgctggcacgaccatagccgcgatcttctgcacatgacgaatgtgttcagatctgagatgccgcgccctatcatcggaatcggacactcatacggcgcaaacatcttaacgcacctctcgcttctgcaccctagactattgagtacactagtactgctagatccaacgatcattgccttcgatcccaagcgacttcaaggcccaggcgttgatcccgccaaattgtcagcattcagacgcgacatctggcccagtcgaaaggatgcagaaatcgcgtttcgcaagtcgccattctatcggtcttgggattcgcgggtccttgatgcctggattgaacatgctgttcgggaactgcctacaacacttcatcctgatgcttctcccctgccctcatcgacagatcctgatgctgcccccgcaaccctaacgacgacgaaacaccaagagctcttcactttcttcagacccttatggcctcactacacagataagcccttgcccactgtatccaggaccggtgcccctgactatgacaccaagctccttgacctactaccacctggcaaagaacctttcctcttctatcgctcagaaggcggcattgtgctcaataagctgcccgaggtccggccatctgttctctatctatttggggaaacaagcgatctttcaactcccgagctgcaagatctgcgtttgaggactactggtgtcggacccggcgggagcggcggtgtgaaagaaggcagagtgaaggggatagtaatggaaaagaagggacatttgttccctatggaagtccctggccattgcgctgagcacgcggctagttggattgggacagaaatgcagaggttcgccgaggaacagaaggcgtatgaggagtgggctaagctcccgctgcgagagaagagcacgctgagtgagtactctctgaaacttcttgggccgcctcccggatcgcggaagaagggtgcggagagcaaagcgaagttatgatgggatagtagtcgatttcaggctagatcttgtctatgacaactacgggcttttttttttgatggaataccaagacgtagagatgagccgaacatgccgaatctttatataacattcagatattggacggttataaatagacctggcttatca

SEQ ID NO: 26277 - DNA, 1164 bp, Muscodor strobelii
  misc_feature: SGI cDNA ID NO. 568984
  misc_feature: Encodes the peptide sequence at SEQ ID NO 26278
atgacaacagtaaatggaaaatgctctccgaaattctcagaactacgtactttactcgaaaaggccataggctcaggcgatgaactcggtgcttctatcactgtaaatctgaacggcgaagaagtcgtcgacctatggggaggattcatcgataaggagcgtaccaagccctggctcgaagacacaatcgttaatgtctggtcaagcaccaagtgcttaacgagccttacggtgctcaaactggtagaacagggggctttggaccttgaggagcgagttgctacttattggcctgaattcgcggcaaacgggaaacaagacatcactctacgccatgtactctcgtatcaggctgctctcccaggatgggatgaacccattacacacgaagaaacactcgacctcgaggccactgcggataagctcgcgaaacaggcaccatggtgggagccgggtacgaaagcgggctatcacccaaactcatttggtcatctactcggcatggtcgtgcgtaaagcgacaggaagaacactcaaagaagtcgcagccacagaagtcgtaggacccctcggcgccgattaccaaatcggagccttggagaaggactggcaacgcatatcacctgtctacggacccgaggatctcgatgcagatcagctgatggagcctggatcaataagtgccaggaccttcctgaatcccacaccgaacgctgaaatcgccaacacggaggcgtggagacgtgctgagatgggtgctactggtggccacacgaacgcccgtggcatgaatcgtgtcatgtctgccataacactcggtgggaccgtacgagacgttcaggttcttaagccggagactatcgacttgatcttcaaagagcaatatcaaggtcccgatgctaccgtgctggctccaattcgttacggcattggcttttcgcttagggggaagacagagggtcaagtagagtctctgattgaccccttcgtgcctcctggtagaatatgctattggggcggctggggcggatcggtcaatatcatggatcttgatcgaaagcttactatcacttatgcaatgaataagatgtatggctctgtaatggggaataagaatacgtgggcttatgtacaagctatatacaaggcactggatcctgaatga

SEQ ID NO: 26278 - protein, 387 aa, Muscodor strobelii
  misc_feature: SGI Peptide ID NO. 568984
  misc_feature (15)..(381): Pfam Id: PF00144 Pfam Desc: Beta-lactamase
  misc_feature (1)..(384): NCBI GI: 46102640 Blast Desc: FG00024.1 [Gibberella zeae PH-1]
  misc_feature (3)..(384): NCBI GI: 225562374 Blast Desc: lactone hydrolase [Ajellomyces capsulatus G186AR]
  misc_feature (3)..(384): NCBI GI: 261204870 Blast Desc: beta-lactamase [Ajellomyces dermatitidis SLH14081] gi|239592231|gb|EEQ74812.1| beta-lactamase [Ajellomyces dermatitidis SLH14081] gi|239611611|gb|EEQ88598.1| beta-lactamase
  misc_feature (3)..(386): NCBI GI: 154279150 Blast Desc: CaaX prenyl protease [Ajellomyces capsulatus NAm1] gi|150412331|gb|EDN07718.1| CaaX prenyl protease [Ajellomyces capsulatus NAm1]
  misc_feature (3)..(384): NCBI GI: 240281216 Blast Desc: beta-lactamase [Ajellomyces capsulatus H143]
  misc_feature (1)..(385): NCBI GI: 119479365 Blast Desc: beta-lactamase [Neosartorya fischeri NRRL 181] gi|119407865|gb|EAW17814.1| beta-lactamase [Neosartorya fischeri NRRL 181]
  misc_feature (1)..(385): NCBI GI: 121713360 Blast Desc: beta-lactamase [Aspergillus clavatus NRRL 1] gi|119402444|gb|EAW12865.1| beta-lactamase [Aspergillus clavatus NRRL 1]
  misc_feature (1)..(385): NCBI GI: 70997858 Blast Desc: beta-lactamase [Aspergillus fumigatus Af293] gi|66851297|gb|EAL91623.1| beta-lactamase [Aspergillus fumigatus Af293] gi|159126606|gb|EDP51722.1| beta-lactamase [Aspergillus
  misc_feature (3)..(384): NCBI GI: 16209565 Blast Desc: lactone hydrolase [Rhodococcus ruber]
  misc_feature (1)..(384): NCBI GI: 226361732 Blast Desc: esterase [Rhodococcus opacus B4] gi|226240217|dbj|BAH50565.1| esterase [Rhodococcus opacus B4]
MTTVNGKCSPKFSELRTLLEKAIGSGDELGASITVNLNGEEVVDLWGGFIDKERTKPWLEDTIVNVWSSTKCLTSLTVLKLVEQGALDLEERVATYWPEFAANGKQDITLRHVLSYQAALPGWDEPITHEETLDLEATADKLAKQAPWWEPGTKAGYHPNSFGHLLGMVVRKATGRTLKEVAATEVVGPLGADYQIGALEKDWQRISPVYGPEDLDADQLMEPGSISARTFLNPTPNAEIANTEAWRRAEMGATGGHTNARGMNRVMSAITLGGTVRDVQVLKPETIDLIFKEQYQGPDATVLAPIRYGIGFSLRGKTEGQVESLIDPFVPPGRICYWGGWGGSVNIMDLDRKLTITYAMNKMYGSVMGNKNTWAYVQAIYKALDPE

SEQ ID NO: 26279 - DNA, 167 bp, Muscodor strobelii
  misc_feature: SGI EST ID NO. CUFF.61957.0
  misc_feature: Variant of the nucleotide sequence at SEQ ID NO 26277
ttaccaaatcggagccttggagaaggactggcaacgcatatcacctgtctacggacccgaggatctcgatgcagatcagctgatggagcctggatcaataagtgccaggaccttcctgaatcccacaccgaacgctgaaatcgccaacacggaggcgtggagacgtg

SEQ ID NO: 26280 - DNA, 4053 bp, Muscodor strobelii
  misc_feature: SGI cDNA ID NO. 568985
  misc_feature: Encodes the peptide sequence at SEQ ID NO 26281
atgatgaacccaatccaaaccagcctacctgcggacgaacgcaaagcgagaagattgcaactaagggccgacgactatgctataggctggctctccgcgctccacatcgaaatggcggccgcaacggctatgctagacgatgttcatgatcagctcccccagcccgcgggcgacaaaaatacatacactctcggccgaatcgcgcaacacaatgttgttctcgcatgtctgcatgaatatggaaccatcaatgcagccattgtagccaacaacatgtgccggtcgtttccgtgtatcaaagcggtttttctagtcgggataggtggtggagtaccttttcccaacgatgttcgactaggggacgtggttgtaggcaaggcggttgtgcaatacgatctggggaaggatctgggcgatggcaaattccagcctactgggacccttcgtcacccgtcgccgacactcatgtctactgttcagacattaagggcgcgccatgagtcaattccctcgagcataccagctatcttagaacagcttctactgaaaaatcccggaatggaaaaatatgctcgtcgtggagcgctagtggatctgctattcgaatcaactcatgtgcacgcgtcacccggacaagactgttacgatttctgtgatttatcgaagttagtacaccgaccagctcgggacgttgctggaccggtaattcactatggcaccatcgcatctggaaatcgagttatcaaggatgcggacatgcgggaccaaattgctcaacaacacggggctctatgctttgaaatggaagcttcggggatcgccgaaaacctccaaggcttagtgattcgctccatatgcgactatgcggactcccataaaaataaaggatggcaaccattcgcagcatcaattgctgcggcgtacgcgaaggagctcatatctatcatgcctgcccctgcaacatattcgtcatcacgcgataatgattctatgacatcagcaagtccgactggcgactacaaaaagcatttcatgaaaagtttgtcgtttgtgcatcgtgattcgcgtttttcttcaatagaaccatgccacggcaagacctgccaatggtttctaaaacggccggaatacatatcttggcttgatcctgatcaatatcattctcaccacggactactgtggatccaggggaaccctggcgcaggtaaatctacccttatgaagtttctctgtcagcaatttattgctgaaactctgagcaatacaatttcgttcttcttcagtgcccgtggaaacgatctcgaaaagtccgtggaaggtatgtatcgggcactattgttacagcttttggaacttatgccagatcttcaggatgtcctcgaacatcggagactattctttgaaaggcttaaggaagacatttcatgggatgtgccaactcttcaagagctattctctagcgcggttgctagaatcggcgatcgtcatctgacgtgcttcattgatgcactcgatgagtgcaaccaagaccaagtccacgacatggtagatttcttttcaactggcatcagcgcaaaactccgtgtctgtttttcaagtcgacattacccgacactgctgattgtttatggtcaaaagttgaatctagatgagcagcttgatcatggcaaagacatcaaagaatacgtcgaaggcaagttgagaattgggttcggggacaatgcaaggtccatcaaagccagtctgtgccataaggctcgaggcatttttctatgggcggttctagtaacgaagttattaaacgaggaatttcgacaaggtcgtgtatttgcaacagttgagacgagactcaatgagattcctctgaaactggatgatctgtttcgggatatcctgacgcggaaggatgatcagaatttgaacgattttctgctctgtgcacaatggatattgttagcaaagcgaccaatcggacgagacgaattctattatgccatggtggcgggattggccccaagccaagaagccctgggcgaatcaagtgtgaaaaacatcacgtcagaggaccttgttcgctttatatccagctcgtcgagagggcttgcggaagtcgcctacggcagggttcaatttattcatgaatcaatacaggacttcctcgatagggatggaggcattcgtcagctatacccaaatcttagcgaagagttcgaatctcacagtcatgagagactcagaaactgctgtgcaacttacataaatgcggcagttgcgcgagagaaatctttaggttcagaaatcacattcacatattgcgacgtctatcaagcgtccagtcccagagtgtggtggtcctcccacttcccgtttctttcctatgcaagcaacgcagttttctaccactgcaacaaggtctcatgtcggagatctcgacaagacttcttaagatcgtttgacttccacaaatggatccaaatacaaaatctatggcgagctgggtcctacagccccgatgccacctttgagcacgttctggctgttgatggctacgcgaatctcttagcaattaggtcctctttcgactggttttcatccggaaatggcttttacaacgaccttgttaacatagctttagcgcatggtcatagagaagtgttccgtgtcgttgtggaggcatatcaaggcttgatagcctcgaagagtgccggggcgctcgcgcctaagagaacagcatcaaccatgaggggtgtatatcaaggactattcgcccccaagaagagctctaaggacttcacaatcaaacgaatggtctctactgtagggcggatacagggcagtcctacaaccgccactccggatatctttagggaaaaaatattaaatcttctcatcttaacagcggactctcgcgtcaccaataccgaatgctggagacttttgaaatgggctatcgaggacggtggtataccgcttgcaaggctcgtcttgaagagtgacgccggcagttattacataaatcaagtactcgaccaagaaccaacgattgtggacctgttgttgcagcttctgattgacatcggaatagatgtagacgcaaaggacttgaaaggccagactctgttgcagcgaaacatcgcatcaaacaacgacaaggtcacccaatttttgcttcaacacggagcgaatccaaacgctgccggcgaagatggggagacagcgctcatgggagcttgttataatccgttttctccggagcttatccaccttctgcttaatcaaggtgctgaggtcaacatgactgacatgggcggtttaacgccgcttattattgcctgctactatacccctttgcccgagatcattcaccccatccttgataaagacgcagatgtcaatgccactgattcaaatggacaaacgcctctactaatgtcttgcttgtaccatatatcttccgtcgaggttattcggcttttgcttctgaaaggggccaatgccaatgctcgtgacgcccgtggaaacacagtcttatcggcagcttgtcaaaatacatccttgccagaggcgattcaacttcttctaattcaaggcgcggatgtcaattttgccgatccatatggtaatacccctttaatggaagcttgtcgacggcgacattcctctcagaacatcgtcagtcttcttatcgatagaggcgcacaccttaacgctaccaatatcgacggcacaacagctctcatcattgcctgttacgagacgtcttgcatcgaggtcatccacatcttggttgtgaaaggggcggacattaatacggtagataaggcaggtagaatagctttgcaaggagctctctgtcgattgttggtccacaaacgtcggaagccaaaccatgcaaataaagacctgcagtctacttgggttgagacattgcagcacctgacgaaggccattaacttgctgcttgaaaaaggagcggacatcaaactgttaatgccgtattggaatcagcaactagatgattggtgcaagactgggttgcttaaacgaaggtaa

SEQ ID NO: 26281 - protein, 1350 aa, Muscodor strobelii
  misc_feature: SGI Peptide ID NO. 568985
  misc_feature (1206)..(1240): Pfam Id: PF00023 Pfam Desc: Ankyrin repeat
  misc_feature (1137)..(1171): Pfam Id: PF00023 Pfam Desc: Ankyrin repeat
  misc_feature (1069)..(1102): Pfam Id: PF00023 Pfam Desc: Ankyrin repeat
  misc_feature (1241)..(1274): Pfam Id: PF00023 Pfam Desc: Ankyrin repeat
  misc_feature (1036)..(1068): Pfam Id: PF00023 Pfam Desc: Ankyrin repeat
  misc_feature (1103)..(1136): Pfam Id: PF00023 Pfam Desc: Ankyrin repeat
  misc_feature (1172)..(1205): Pfam Id: PF00023 Pfam Desc: Ankyrin repeat
  misc_feature (22)..(1233): NCBI GI: 115433911 Blast Desc: conserved [Aspergillus terreus NIH2624] gi|114189944|gb|EAU31644.1| conserved [Aspergillus terreus NIH2624]
  misc_feature (25)..(1247): NCBI GI: 171689444 Blast Desc: protein product [Podospora anserina] gi|170944684|emb|CAP70795.1| protein product [Podospora anserina]
  misc_feature (22)..(1175): NCBI GI: 119473587 Blast Desc: Pfs, NACHT and Ankyrin domain protein [Neosartorya fischeri NRRL 181] gi|119406822|gb|EAW16772.1| Pfs, NACHT and Ankyrin domain protein [Neosartorya fischeri NRRL 181]
  misc_feature (91)..(1329): NCBI GI: 70990006 Blast Desc: Pfs, NACHT and Ankyrin domain protein [Aspergillus fumigatus Af293] gi|66847484|gb|EAL87814.1| Pfs, NACHT and Ankyrin domain protein [Aspergillus fumigatus Af293]
  misc_feature (22)..(885): NCBI GI: 115390334 Blast Desc: conserved [Aspergillus terreus NIH2624] gi|114195068|gb|EAU36768.1| conserved [Aspergillus terreus NIH2624]
  misc_feature (20)..(856): NCBI GI: 145254107 Blast Desc: An18g00540 [Aspergillus niger] gi|134084101|emb|CAK43130.1| protein product [Aspergillus niger]
  misc_feature (17)..(1217): NCBI GI: 238496907 Blast Desc: Pfs, NACHT and Ankyrin domain protein [Aspergillus flavus NRRL3357] gi|220694569|gb|EED50913.1| Pfs, NACHT and Ankyrin domain protein [Aspergillus flavus NRRL3357]
  misc_feature (17)..(1199): NCBI GI: 169774533 Blast Desc: [Aspergillus oryzae RIB40] gi|83769597|dbj|BAE59732.1| protein product [Aspergillus oryzae]
  misc_feature (21)..(1159): NCBI GI: 212545444 Blast Desc: Pfs, NACHT and Ankyrin domain protein [Penicillium marneffei ATCC 18224] gi|210065845|gb|EEA19939.1| Pfs, NACHT and Ankyrin domain protein [Penicillium marneffei ATCC 18224]
  misc_feature (26)..(1133): NCBI GI: 116202685 Blast Desc: CHGG_09227 [Chaetomium globosum CBS 148.51] gi|88177745|gb|EAQ85213.1| CHGG_09227 [Chaetomium globosum CBS 148.51]
MMNPIQTSLPADERKARRLQLRADDYAIGWLSALHIEMAAATAMLDDVHDQLPQPAGDKNTYTLGRIAQHNVVLACLHEYGTINAAIVANNMCRSFPCIKAVFLVGIGGGVPFPNDVRLGDVVVGKAVVQYDLGKDLGDGKFQPTGTLRHPSPTLMSTVQTLRARHESIPSSIPAILEQLLLKNPGMEKYARRGALVDLLFESTHVHASPGQDCYDFCDLSKLVHRPARDVAGPVIHYGTIASGNRVIKDADMRDQIAQQHGALCFEMEASGIAENLQGLVIRSICDYADSHKNKGWQPFAASIAAAYAKELISIMPAPATYSSSRDNDSMTSASPTGDYKKHFMKSLSFVHRDSRFSSIEPCHGKTCQWFLKRPEYISWLDPDQYHSHHGLLWIQGNPGAGKSTLMKFLCQQFIAETLSNTISFFFSARGNDLEKSVEGMYRALLLQLLELMPDLQDVLEHRRLFFERLKEDISWDVPTLQELFSSAVARIGDRHLTCFIDALDECNQDQVHDMVDFFSTGISAKLRVCFSSRHYPTLLIVYGQKLNLDEQLDHGKDIKEYVEGKLRIGFGDNARSIKASLCHKARGIFLWAVLVTKLLNEEFRQGRVFATVETRLNEIPLKLDDLFRDILTRKDDQNLNDFLLCAQWILLAKRPIGRDEFYYAMVAGLAPSQEALGESSVKNITSEDLVRFISSSSRGLAEVAYGRVQFIHESIQDFLDRDGGIRQLYPNLSEEFESHSHERLRNCCATYINAAVAREKSLGSEITFTYCDVYQASSPRVWWSSHFPFLSYASNAVFYHCNKVSCRRSRQDFLRSFDFHKWIQIQNLWRAGSYSPDATFEHVLAVDGYANLLAIRSSFDWFSSGNGFYNDLVNIALAHGHREVFRVVVEAYQGLIASKSAGALAPKRTASTMRGVYQGLFAPKKSSKDFTIKRMVSTVGRIQGSPTTATPDIFREKILNLLILTADSRVTNTECWRLLKWAIEDGGIPLARLVLKSDAGSYYINQVLDQEPTIVDLLLQLLIDIGIDVDAKDLKGQTLLQRNIASNNDKVTQFLLQHGANPNAAGEDGETALMGACYNPFSPELIHLLLNQGAEVNMTDMGGLTPLIIACYYTPLPEIIHPILDKDADVNATDSNGQTPLLMSCLYHISSVEVIRLLLLKGANANARDARGNTVLSAACQNTSLPEAIQLLLIQGADVNFADPYGNTPLMEACRRRHSSQNIVSLLIDRGAHLNATNIDGTTALIIACYETSCIEVIHILVVKGADINTVDKAGRIALQGALCRLLVHKRRKPNHANKDLQSTWVETLQHLTKAINLLLEKGADIKLLMPYWNQQLDDWCKTGLLKRR

SEQ ID NO: 26282 - DNA, 4488 bp, Muscodor strobelii
  misc_feature: SGI EST ID NO. CUFF.61972.0
  misc_feature: Variant of the nucleotide sequence at SEQ ID NO 26280
aaaacgcctccaaccatcagctcgacgcttatgtaatcgaaacaggaatctcgagacaagtgaggacgtctttcgactcaacaatttattttgcatcttccgtacaatccatttggctgaatacatcgctctctttcgatcaactcgcagttggtcccatacgcgcagaactaccctttttgtaccggctgtacaccatccatctctaaaatcttacgaattagatgtgggtggtggtaggtgccgaacctcatccagatcgactgtttcgagctggctgcgacgacggcatcatgcatctgcgccactcaataaccatgcgttgagtttgctaggcaggttcaacgcgagatccaacatgatgaacccaatccaaaccagcctacctgcggacgaacgcaaagcgagaagattgcaactaagggccgacgactatgctataggctggctctccgcgctccacatcgaaatggcggccgcaacggctatgctagacgatgttcatgatcagctcccccagcccgcgggcgacaaaaatacatacactctcggccgaatcgcgcaacacaatgttgttctcgcatgtctgcatgaatatggaaccatcaatgcagccattgtagccaacaacatgtgccggtcgtttccgtgtatcaaagcggtttttctagtcgggataggtggtggagtaccttttcccaacgatgttcgactaggggacgtggttgtaggcaaggcggttgtgcaatacgatctggggaaggatctgggcgatggcaaattccagcctactgggacccttcgtcacccgtcgccgacactcatgtctactgttcagacattaagggcgcgccatgagtcaattccctcgagcataccagctatcttagaacagcttctactgaaaaatcccggaatggaaaaatatgctcgtcgtggagcgctagtggatctgctattcgaatcaactcatgtgcacgcgtcacccggacaagactgttacgatttctgtgatttatcgaagttagtacaccgaccagctcgggacgttgctggaccggtaattcactatggcaccatcgcatctggaaatcgagttatcaaggatgcggacatgcgggaccaaattgctcaacaacacggggctctatgctttgaaatggaagcttcggggatcgccgaaaacctccaaggcttagtgattcgctccatatgcgactatgcggactcccataaaaataaaggatggcaaccattcgcagcatcaattgctgcggcgtacgcgaaggagctcatatctatcatgcctgcccctgcaacatattcgtcatcacgcgataatgattctatgacatcagcaagtccgactggcgactacaaaaagcatttcatgaaaagtttgtcgtttgtgcatcgtgattcgcgtttttcttcaatagaaccatgccacggcaagacctgccaatggtttctaaaacggccggaatacatatcttggcttgatcctgatcaatatcattctcaccacggactactgtggatccaggggaaccctggcgcaggtaaatctacccttatgaagtttctctgtcagcaatttattgctgaaactctgagcaatacaatttcgttcttcttcagtgcccgtggaaacgatctcgaaaagtccgtggaaggtatgtatcgggcactattgttacagcttttggaacttatgccagatcttcaggatgtcctcgaacatcggagactattctttgaaaggcttaaggaagacatttcatgggatgtgccaactcttcaagagctattctctagcgcggttgctagaatcggcgatcgtcatctgacgtgcttcattgatgcactcgatgagtgcaaccaagaccaagtccacgacatggtagatttcttttcaactggcatcagcgcaaaactccgtgtctgtttttcaagtcgacattacccgacactgctgattgtttatggtcaaaagttgaatctagatgagcagcttgatcatggcaaagacatcaaagaatacgtcgaaggcaagttgagaattgggttcggggacaatgcaaggtccatcaaagccagtctgtgccataaggctcgaggcatttttctatgggcggttctagtaacgaagttattaaacgaggaatttcgacaaggtcgtgtatttgcaacagttgagacgagactcaatgagattcctctgaaactggatgatctgtttcgggatatcctgacgcggaaggatgatcagaatttgaacgattttctgctctgtgcacaatggatattgttagcaaagcgaccaatcggacgagacgaattctattatgccatggtggcgggattggccccaagccaagaagccctgggcgaatcaagtgtgaaaaacatcacgtcagaggaccttgttcgctttatatccagctcgtcgagagggcttgcggaagtcgcctacggcagggttcaatttattcatgaatcaatacaggacttcctcgatagggatggaggcattcgtcagctatacccaaatcttagcgaagagttcgaatctcacagtcatgagagactcagaaactgctgtgcaacttacataaatgcggcagttgcgcgagagaaatctttaggttcagaaatcacattcacatattgcgacgtctatcaagcgtccagtcccagagtgtggtggtcctcccacttcccgtttctttcctatgcaagcaacgcagttttctaccactgcaacaaggtctcatgtcggagatctcgacaagacttcttaagatcgtttgacttccacaaatggatccaaatacaaaatctatggcgagctgggtcctacagccccgatgccacctttgagcacgttctggctgttgatggctacgcgaatctcttagcaattaggtcctctttcgactggttttcatccggaaatggcttttacaacgaccttgttaacatagctttagcgcatggtcatagagaagtgttccgtgtcgttgtggaggcatatcaaggcttgatagcctcgaagagtgccggggcgctcgcgcctaagagaacagcatcaaccatgaggggtgtatatcaaggactattcgcccccaagaagagctctaaggacttcacaatcaaacgaatggtctctactgtagggcggatacagggcagtcctacaaccgccactccggatatctttagggaaaaaatattaaatcttctcatcttaacagcggactctcgcgtcaccaataccgaatgctggagacttttgaaatgggctatcgaggacggtggtataccgcttgcaaggctcgtcttgaagagtgacgccggcagttattacataaatcaagtactcgaccaagaaccaacgattgtggacctgttgttgcagcttctgattgacatcggaatagatgtagacgcaaaggacttgaaaggccagactctgttgcagcgaaacatcgcatcaaacaacgacaaggtcacccaatttttgcttcaacacggagcgaatccaaacgctgccggcgaagatggggagacagcgctcatgggagcttgttataatccgttttctccggagcttatccaccttctgcttaatcaaggtgctgaggtcaacatgactgacatgggcggtttaacgccgcttattattgcctgctactatacccctttgcccgagatcattcaccccatccttgataaagacgcagatgtcaatgccactgattcaaatggacaaacgcctctactaatgtcttgcttgtaccatatatcttccgtcgaggttattcggcttttgcttctgaaaggggccaatgccaatgctcgtgacgcccgtggaaacacagtcttatcggcagcttgtcaaaatacatccttgccagaggcgattcaacttcttctaattcaaggcgcggatgtcaattttgccgatccatatggtaatacccctttaatggaagcttgtcgacggcgacattcctctcagaacatcgtcagtcttcttatcgatagaggcgcacaccttaacgctaccaatatcgacggcacaacagctctcatcattgcctgttacgagacgtcttgcatcgaggtcatccacatcttggttgtgaaaggggcggacattaatacggtagataaggcaggtagaatagctttgcaaggagctctctgtcgattgttggtccacaaacgtcggaagccaaaccatgcaaataaagacctgcagtctacttgggttgagacattgcagcacctgacgaaggccattaacttgctgcttgaaaaaggagcggacatcaaactgttaatgccgtattggaatcagcaactagatgattggtgcaagactgggttgcttaaacgaaggtaatagtacatgttagctatctgtatacactacgtaaagagttaccaaggacgaatgggagcttcgttaaatactaaaac

SEQ ID NO: 26283 - DNA, 5730 bp, Muscodor strobelii
  misc_feature: SGI cDNA ID NO. 568986
  misc_feature: Reduced expression when VOC is produced
  misc_feature: Encodes the peptide sequence at SEQ ID NO 26284
atgtcttccagaatcactcgatcgtctgcccgcaacgccgccgcggcgtctcaggcaacgtctcccaccggcaccggcacctctgctcagcaaacacccgcagcaccctctacgtcatcctccacctccgacctcactcagcccaaccagcccagctcctccaaacaacgtcctgtgtctggccggaagcgcaaggcagacaaccaggaaggcagccctccgcagccgcagccatcgaccggcgagcagcctcgggccctcaggtctaagcggcagaaggttcaggatccttctccctccgacccgccgcctgccccggcccccccggctgggccctcgacacgcacacgcaagggaaagggcaaggctgcagcaaccatgtctagtccatctggttctgagcctaatgaagcatccgctatgcaagatcgaccggcctcggcgtctgcttcggtatcttcaagccggaaatcgagccgccagaacaaaaaagccccagcagcctcgtcttcaacacgacggtccaaaaggacttctaacaatgcaagctcttcagatccagacactaccatgacggggaccgaggaggcggcgagaaatgcagaagccgctcagccccctcctccccctccaccgcctgcacaccctctggacgaggacagcgatgatcatgatgacgacgacgacgatgaccaccaccagtatgacgatgacgatcccttcagtggcttcggcggtccgccaggctctggattgtctagtaccctccgagccctgaccggcatgatgtcgggtatctcatccagattacgcgatatactcagcaaccttcgacaaaagggtgacccgtctgtgcaactcatcgcgctccaggagctctctgagattctgttggtttccaacgaagataacctctctggacacttctcacctgatgccttcgttaaggagctagtcgtcttaatgcagccgaatgagttcaccggggaggaaagtcccgagatcatgctattggcgtgccgctgtcttgcaaatttgatggaagctttaccagccagtgctgcgaatgtcgtctatggaggggcagtcccggttctgtgccagaagctgctggagatttcgttcatcgacctggccgaacaagctctgagcacgttagagaagatctcagtcgagtatccttctagtattgttcgtgagggtggtctgacggcctgtctatcgtatctggacttcttcgccaccagcactcagagaaccgctgttaccaccgcggccaactgttgtcgcaacattcccgaagactctttcagtgtaataaaagacgtcatgcccattcttctcaacgtcctcggcagtagtgatcaacgtgttgttgagcaagcatctctgtgtgtgacccgcatcattgagagtttccgatatcactcgtccaagcttgagcaactcgtcagtgtcgatctcctcaaggccattttgcgactcctcgttccaggcacgaccaacttgatcagtgccaacatccacacccaattccttcagtcgcttgccttcacagccaaagccagccctcgtctctctgctgagctggtgaagttgaatgtggtggagacactctatcaaatcctcactggcgtctcaccgcccgacgagatggaagacgttgcctcaaaactcgatagcgtggtcatcatgcaagctttgatccaccggccacgggaacaaatcatcgagactcttaatgtggtctgtgagttgcttccttcaccaaggtggccgccctcgtctgctggtggcgacattgatggaactcagccgattactccttcgtcgtcggggactcgcaagaaatcctccgccgagaagaggcttgagctcttggatgaatgcaaagaccatgttcggagatttgcgcttatcttatttcccaccttgaccgatgcgttctctagtacagtgaacttgacagtccgacaaaaggttcttgatgcgcaaatgaagatgctctccaatctagacaaggatatacttgttgatgccttaaagtcggttccctatgcctcgtttcttgctgccattttgtcacagcaagatcatccgacattggtgatgtatgctgtgcaaattaccgagttgcttctaaaccgccttgaccatatttatcgctatcagatataccgtgaaggtgtgatcacggagattgctaagctggccgaagaatacaaagagcctgaagtcaagcccgcggacaacgcaactgtggatcggcctagtgtttccgtaggtagtgatgtggacagggtttctattcacaacgatacagacgatgacgaaggcgaggatcaccactctgacgcccatgatgaagacggcgatgatgaccatgtcgaccatgacgacgatgatgacgacgatgacgatcaagagaatgatcatccaggcctttcggatagttccgatggatctaccatgtctatcgatggaccggcaccccgcctactgttctctgacatttctgttatcaagtcccgcatcgccgaagctgccaagaacttcttggagactcacgaaactgagaagcaaggcaaggcaatgaagaagaaggcagccaagatattggaagacttgcaacagctgtcttccgacattcagaactattatcttcaccgtacggctagcgacttaagtcccagcagtggcactgcattgtggacaaggcttgccttttacttcgacggtgatgtcctagagagtgtcaccagcgctgagctcctcgcgtctggattggtgcgcacagtagaagaggtcttcagtaaccccgacgagatcctcgctaattcggccagagccgcattcctggaagtgttcatggcacaatctgtcagttccaagccgaagactgcgaccgccgattcgccatcgaccccattcagcgtcatggcccacaagctccaggatctactaagccgatcagagcattttgaagttctcaccgtccacaacagctcgatggataatcgaggaagcagtgcggcttccatgctagcgaaacagatcaagctcaagcttgtcgccgatgaggaatcggagataccacattcttacaggaatattatggtatcgattcatgccattgcaacattcaaggccttggacgattatcttcggccgcgtatcacggctcatgggcgtcccaggggggctcgacctcgcgatccggcaagactgtcggaggcgttggctttgatggcaagttcagccgggcttccattctcagggtcgcgtgcagcgcgtctagcagaacaacttggcggcttcgcatcgcatcctacgccaccgccagctccccctcaggcctcgggttctcgtgttccgaagaagtccaagtctaagcaggcggagcaatcggaagactcaacccctgcaccatcaacaggcggccgagaaaaagccatcctgcgccgatctacgcgccgcaacccggttcctgagagcaccttagcaccgcctcctcccccaccaccagaggacgacgatgacttgcaaaacgctctcgaatgcgcagacgaaaagaatcatatctctgacgacgacgctgacgataacgatgatgagctcttgggtgacagcagtgctgccctaaacgccattgtcggcgagttagatgaggacatggaagacgcgcctcgacccgaaccttctgctgtcaacatggaggtagctgctggaggtaaagtcacggccatcaaggaggacgggactcgagtgcctactccaggccactcgactggacctactagcgtcccaagccgcagtactcctacacaagtagccacaccgcagcagaacactccaacaccggcgacgacttcgagacccctctcatacgctgccgctatacagtctgtgcccacagattggcatattgagttcagtctcggcgaccgggttattcccaacgagaccacaatctaccgcgctgtacacaacgctccttcacctccaccggccgatcatatgagccgcagtgtgttttcaacgatacattctatcaaattcaagcgggtaccggggccgcctccaagtgagccaattgggttctccgcatccacgttggacggcgttccggatgtgaatggcgtcccggcatcgttggctaaacatcctaccaccacatctattcttcgtctacttaagatactccacgacctgaatgccaatattgaggacatcatggtggagaacaaaaacaatctccggttgcatgtcgagcccctttcgcagtttgtcaacacgaaattgaccgccaagctgaaccgccagttggaagaacctcttattgtcgccagcaattgtctgcctgggtggagcgaggatctcgctcggctttatcccttcctcttcccatttgagactcgccacttgttcttgcagtcgacttctttcggctatgcccgatccatgagtcgctggcagaacgcacagcaggaggacaattcgcgcagggaccgccgagacgaacggcctttcctaggtcgtctacaacgtcaaaaggttcgcatctcgcgaggcaagattttggagtctgccctcaaagtcatggagctatacggcagctcccagagtatccttgaagtcgagtacttcgaggaagttggtacaggtctgggaccgactttggagttctactcgaccgtgtcaaaagaattctccaagaagaagctcaagctttggcgtgagctggattcgaacgattccgacgagtttgtctcggcccctaatggactattcccgagaccactaaacgacgatgatcgcaccgctgacatcattcttcaactattcaagtcccttggcaaatttgtcgcccgatctatgatcgactctcgcatcatcgacatcaacctgaatcccaccttcttccgcataggcgaagagtctggcgtgaagccatccctcggagccgtcaagattgtggaccccggtcttgccaactcgctcaagctcgtgaagaaatttgtctcggccaagaaagcagtagttgaggatccgacaagaacagcagcccaaaaggttgcagatacacaacatatcgtcgtcgatggcacttcactcgatgatcttgcccttgatttcaccctgcctggttacgccgacattgaactcgtgccaggtggctctcacattcaggtcacaattgacaacgtcgactcctatcttgacaaagtgatcgacatgacacttggtcgcggtgttaagcgacaggttgaggctttccgtgcaggcttttcccaagtttttccgtactcggccttgagtgcattcacacctgccgagctggtcacactcttcggaagggcagaggaggactggtctctcgaaaccctgacggattcaatcaaggcagaccacggcttcaacatggacagcaagagtatcaagaacttactccagacaatgagcgagctgacagcgccccaacgacgtgatttcttacaattcactacgggtagcccgaaacttcccatcggaggtttcaagagcttgacgccgatgtttaccgtcgtctgcaagcctagtgaaccaccatacacatctgacgactatctccccagcgtcatgacctgtgtcaactacctaaaactacctgactacacaagtattgacagcctcaagcgacaattgatgactgctatcaaggagggccaaggagctttccacttgtcctaa

SEQ ID NO: 26284 - protein, 1909 aa, Muscodor strobelii
  misc_feature: SGI Peptide ID NO. 568986
  misc_feature (437)..(473): Pfam Id: PF02985 Pfam Desc: HEAT repeat
  misc_feature (1564)..(1909): Pfam Id: PF00632 Pfam Desc: HECT-domain (ubiquitin-transferase)
  misc_feature (1)..(1909): NCBI GI: 39943660 Blast Desc: MGG_03841 [Magnaporthe grisea 70-15] gi|145014530|gb|EDJ99098.1| MGG_03841 [Magnaporthe grisea 70-15]
  misc_feature (60)..(1909): NCBI GI: 256727749 Blast Desc: [Nectria haematococca mpVI 77-13-4]
  misc_feature (240)..(1909): NCBI GI: 85095994 Blast Desc: NCU09866 [Neurospora crassa OR74A] gi|28921663|gb|EAA30947.1| NCU09866 [Neurospora crassa OR74A]
  misc_feature (336)..(1909): NCBI GI: 154315509 Blast Desc: BC1G_04327 [Botryotinia fuckeliana B05.10] gi|150847267|gb|EDN22460.1| BC1G_04327 [Botryotinia fuckeliana B05.10]
  misc_feature (59)..(1909): NCBI GI: 189200967 Blast Desc: thyroid hormone receptor interactor 12 [Pyrenophora tritici-repentis Pt-1C-BFP] gi|187983919|gb|EDU49407.1| thyroid hormone receptor interactor 12 [Pyrenophora tritici-repentis
  misc_feature (1)..(1909): NCBI GI: 239611400 Blast Desc: ubiquitin-protein ligase Ufd4 [Ajellomyces dermatitidis ER-3]
  misc_feature (1)..(1909): NCBI GI: 261205292 Blast Desc: ubiquitin-protein ligase Ufd4 [Ajellomyces dermatitidis SLH14081] gi|239592442|gb|EEQ75023.1| ubiquitin-protein ligase Ufd4 [Ajellomyces dermatitidis SLH14081]
  misc_feature (120)..(1909): NCBI GI: 238501650 Blast Desc: ubiquitin-protein ligase Ufd4, [Aspergillus flavus NRRL3357] gi|220692296|gb|EED48643.1| ubiquitin-protein ligase Ufd4, [Aspergillus flavus NRRL3357]
  misc_feature (1)..(1909): NCBI GI: 159124339 Blast Desc: ubiquitin-protein ligase Ufd4, [Aspergillus fumigatus A1163]
  misc_feature (1)..(1909): NCBI GI: 255932277 Blast Desc: Pc12g08650 [Penicillium chrysogenum Wisconsin 54-1255] gi|211582314|emb|CAP80492.1| Pc12g08650 [Penicillium chrysogenum Wisconsin 54-1255]
  misc_feature: Useful for introducing or modulating the production of volatile compounds
MSSRITRSSARNAAAASQATSPTGTGTSAQQTPAAPSTSSSTSDLTQPNQPSSSKQRPVSGRKRKADNQEGSPPQPQPSTGEQPRALRSKRQKVQDPSPSDPPPAPAPPAGPSTRTRKGKGKAAATMSSPSGSEPNEASAMQDRPASASASVSSSRKSSRQNKKAPAASSSTRRSKRTSNNASSSDPDTTMTGTEEAARNAEAAQPPPPPPPPAHPLDEDSDDHDDDDDDDHHQYDDDDPFSGFGGPPGSGLSSTLRALTGMMSGISSRLRDILSNLRQKGDPSVQLIALQELSEILLVSNEDNLSGHFSPDAFVKELVVLMQPNEFTGEESPEIMLLACRCLANLMEALPASAANVVYGGAVPVLCQKLLEISFIDLAEQALSTLEKISVEYPSSIVREGGLTACLSYLDFFATSTQRTAVTTAANCCRNIPEDSFSVIKDVMPILLNVLGSSDQRVVEQASLCVTRIIESFRYHSSKLEQLVSVDLLKAILRLLVPGTTNLISANIHTQFLQSLAFTAKASPRLSAELVKLNVVETLYQILTGVSPPDEMEDVASKLDSVVIMQALIHRPREQIIETLNVVCELLPSPRWPPSSAGGDIDGTQPITPSSSGTRKKSSAEKRLELLDECKDHVRRFALILFPTLTDAFSSTVNLTVRQKVLDAQMKMLSNLDKDILVDALKSVPYASFLAAILSQQDHPTLVMYAVQITELLLNRLDHIYRYQIYREGVITEIAKLAEEYKEPEVKPADNATVDRPSVSVGSDVDRVSIHNDTDDDEGEDHHSDAHDEDGDDDHVDHDDDDDDDDDQENDHPGLSDSSDGSTMSIDGPAPRLLFSDISVIKSRIAEAAKNFLETHETEKQGKAMKKKAAKILEDLQQLSSDIQNYYLHRTASDLSPSSGTALWTRLAFYFDGDVLESVTSAELLASGLVRTVEEVFSNPDEILANSARAAFLEVFMAQSVSSKPKTATADSPSTPFSVMAHKLQDLLSRSEHFEVLTVHNSSMDNRGSSAASMLAKQIKLKLVADEESEIPHSYRNIMVSIHAIATFKALDDYLRPRITAHGRPRGARPRDPARLSEALALMASSAGLPFSGSRAARLAEQLGGFASHPTPPPAPPQASGSRVPKKSKSKQAEQSEDSTPAPSTGGREKAILRRSTRRNPVPESTLAPPPPPPPEDDDDLQNALECADEKNHISDDDADDNDDELLGDSSAALNAIVGELDEDMEDAPRPEPSAVNMEVAAGGKVTAIKEDGTRVPTPGHSTGPTSVPSRSTPTQVATPQQNTPTPATTSRPLSYAAAIQSVPTDWHIEFSLGDRVIPNETTIYRAVHNAPSPPPADHMSRSVFSTIHSIKFKRVPGPPPSEPIGFSASTLDGVPDVNGVPASLAKHPTTTSILRLLKILHDLNANIEDIMVENKNNLRLHVEPLSQFVNTKLTAKLNRQLEEPLIVASNCLPGWSEDLARLYPFLFPFETRHLFLQSTSFGYARSMSRWQNAQQEDNSRRDRRDERPFLGRLQRQKVRISRGKILESALKVMELYGSSQSILEVEYFEEVGTGLGPTLEFYSTVSKEFSKKKLKLWRELDSNDSDEFVSAPNGLFPRPLNDDDRTADIILQLFKSLGKFVARSMIDSRIIDINLNPTFFRIGEESGVKPSLGAVKIVDPGLANSLKLVKKFVSAKKAVVEDPTRTAAQKVADTQHIVVDGTSLDDLALDFTLPGYADIELVPGGSHIQVTIDNVDSYLDKVIDMTLGRGVKRQVEAFRAGFSQVFPYSALSAFTPAELVTLFGRAEEDWSLETLTDSIKADHGFNMDSKSIKNLLQTMSELTAPQRRDFLQFTTGSPKLPIGGFKSLTPMFTVVCKPSEPPYTSDDYLPSVMTCVNYLKLPDYTSIDSLKRQLMTAIKEGQGAFHLS

SEQ ID NO: 26285 - DNA, 6387 bp, Muscodor strobelii
  misc_feature: SGI EST ID NO. CUFF.62837.0
  misc_feature: Variant of the nucleotide sequence at SEQ ID NO 26283
ctggacttgcattgtgccacacctgcagcattccacttccacatcctcctcctcgcagccgtggccatcctacaacacctatgccatcttcttagcctcacacccgcaccccccatctacttcttcctccctcgagtctcgattctcggacctccattcaatgccatgtgatcgtatcagtcactcatgtcttccagaatcactcgatcgtctgcccgcaacgccgccgcggcgtctcaggcaacgtctcccaccggcaccggcacctctgctcagcaaacacccgcagcaccctctacgtcatcctccacctccgacctcactcagcccaaccagcccagctcctccaaacaacgtcctgtgtctggccggaagcgcaaggcagacaaccaggaaggcagccctccgcagccgcagccatcgaccggcgagcagcctcgggccctcaggtctaagcggcagaaggttcaggatccttctccctccgacccgccgcctgccccggcccccccggctgggccctcgacacgcacacgcaagggaaagggcaaggctgcagcaaccatgtctagtccatctggttctgagcctaatgaagcatccgctatgcaagatcgaccggcctcggcgtctgcttcggtatcttcaagccggaaatcgagccgccagaacaaaaaagccccagcagcctcgtcttcaacacgacggtccaaaaggacttctaacaatgcaagctcttcagatccagacactaccatgacggggaccgaggaggcggcgagaaatgcagaagccgctcagccccctcctccccctccaccgcctgcacaccctctggacgaggacagcgatgatcatgatgacgacgacgacgatgaccaccaccagtatgacgatgacgatcccttcagtggcttcggcggtccgccaggctctggattgtctagtaccctccgagccctgaccggcatgatgtcgggtatctcatccagattacgcgatatactcagcaaccttcgacaaaagggtgacccgtctgtgcaactcatcgcgctccaggagctctctgagattctgttggtttccaacgaagataacctctctggacacttctcacctgatgccttcgttaaggagctagtcgtcttaatgcagccgaatgagttcaccggggaggaaagtcccgagatcatgctattggcgtgccgctgtcttgcaaatttgatggaagctttaccagccagtgctgcgaatgtcgtctatggaggggcagtcccggttctgtgccagaagctgctggagatttcgttcatcgacctggccgaacaagctctgagcacgttagagaagatctcagtcgagtatccttctagtattgttcgtgagggtggtctgacggcctgtctatcgtatctggacttcttcgccaccagcactcagagaaccgctgttaccaccgcggccaactgttgtcgcaacattcccgaagactctttcagtgtaataaaagacgtcatgcccattcttctcaacgtcctcggcagtagtgatcaacgtgttgttgagcaagcatctctgtgtgtgacccgcatcattgagagtttccgatatcactcgtccaagcttgagcaactcgtcagtgtcgatctcctcaaggccattttgcgactcctcgttccaggcacgaccaacttgatcagtgccaacatccacacccaattccttcagtcgcttgccttcacagccaaagccagccctcgtctctctgctgagctggtgaagttgaatgtggtggagacactctatcaaatcctcactggcgtctcaccgcccgacgagatggaagacgttgcctcaaaactcgatagcgtggtcatcatgcaagctttgatccaccggccacgggaacaaatcatcgagactcttaatgtggtctgtgagttgcttccttcaccaaggtggccgccctcgtctgctggtggcgacattgatggaactcagccgattactccttcgtcgtcggggactcgcaagaaatcctccgccgagaagaggcttgagctcttggatgaatgcaaagaccatgttcggagatttgcgcttatcttatttcccaccttgaccgatgcgttctctagtacagtgaacttgacagtccgacaaaaggttcttgatgcgcaaatgaagatgctctccaatctagacaaggatatacttgttgatgccttaaagtcggttccctatgcctcgtttcttgctgccattttgtcacagcaagatcatccgacattggtgatgtatgctgtgcaaattaccgagttgcttctaaaccgccttgaccatatttatcgctatcagatataccgtgaaggtgtgatcacggagattgctaagctggccgaagaatacaaagagcctgaagtcaagcccgcggacaacgcaactgtggatcggcctagtgtttccgtaggtagtgatgtggacagggtttctattcacaacgatacagacgatgacgaaggcgaggatcaccactctgacgcccatgatgaagacggcgatgatgaccatgtcgaccatgacgacgatgatgacgacgatgacgatcaagagaatgatcatccaggcctttcggatagttccgatggatctaccatgtctatcgatggaccggcaccccgcctactgttctctgacatttctgttatcaagtcccgcatcgccgaagctgccaagaacttcttggagactcacgaaactgagaagcaaggcaaggcaatgaagaagaaggcagccaagatattggaagacttgcaacagctgtcttccgacattcagaactattatcttcaccgtacggctagcgacttaagtcccagcagtggcactgcattgtggacaaggcttgccttttacttcgacggtgatgtcctagagagtgtcaccagcgctgagctcctcgcgtctggattggtgcgcacagtagaagaggtcttcagtaaccccgacgagatcctcgctaattcggccagagccgcattcctggaagtgttcatggcacaatctgtcagttccaagccgaagactgcgaccgccgattcgccatcgaccccattcagcgtcatggcccacaagctccaggatctactaagccgatcagagcattttgaagttctcaccgtccacaacagctcgatggataatcgaggaagcagtgcggcttccatgctagcgaaacagatcaagctcaagcttgtcgccgatgaggaatcggagataccacattcttacaggaatattatggtatcgattcatgccattgcaacattcaaggccttggacgattatcttcggccgcgtatcacggctcatgggcgtcccaggggggctcgacctcgcgatccggcaagactgtcggaggcgttggctttgatggcaagttcagccgggcttccattctcagggtcgcgtgcagcgcgtctagcagaacaacttggcggcttcgcatcgcatcctacgccaccgccagctccccctcaggcctcgggttctcgtgttccgaagaagtccaagtctaagcaggcggagcaatcggaagactcaacccctgcaccatcaacaggcggccgagaaaaagccatcctgcgccgatctacgcgccgcaacccggttcctgagagcaccttagcaccgcctcctcccccaccaccagaggacgacgatgacttgcaaaacgctctcgaatgcgcagacgaaaagaatcatatctctgacgacgacgctgacgataacgatgatgagctcttgggtgacagcagtgctgccctaaacgccattgtcggcgagttagatgaggacatggaagacgcgcctcgacccgaaccttctgctgtcaacatggaggtagctgctggaggtaaagtcacggccatcaaggaggacgggactcgagtgcctactccaggccactcgactggacctactagcgtcccaagccgcagtactcctacacaagtagccacaccgcagcagaacactccaacaccggcgacgacttcgagacccctctcatacgctgccgctatacagtctgtgcccacagattggcatattgagttcagtctcggcgaccgggttattcccaacgagaccacaatctaccgcgctgtacacaacgctccttcacctccaccggccgatcatatgagccgcagtgtgttttcaacgatacattctatcaaattcaagcgggtaccggggccgcctccaagtgagccaattgggttctccgcatccacgttggacggcgttccggatgtgaatggcgtcccggcatcgttggctaaacatcctaccaccacatctattcttcgtctacttaagatactccacgacctgaatgccaatattgaggacatcatggtggagaacaaaaacaatctccggttgcatgtcgagcccctttcgcagtttgtcaacacgaaattgaccgccaagctgaaccgccagttggaagaacctcttattgtcgccagcaattgtctgcctgggtggagcgaggatctcgctcggctttatcccttcctcttcccatttgagactcgccacttgttcttgcagtcgacttctttcggctatgcccgatccatgagtcgctggcagaacgcacagcaggaggacaattcgcgcagggaccgccgagacgaacggcctttcctaggtcgtctacaacgtcaaaaggttcgcatctcgcgaggcaagattttggagtctgccctcaaagtcatggagctatacggcagctcccagagtatccttgaagtcgagtacttcgaggaagttggtacaggtctgggaccgactttggagttctactcgaccgtgtcaaaagaattctccaagaagaagctcaagctttggcgtgagctggattcgaacgattccgacgagtttgtctcggcccctaatggactattcccgagaccactaaacgacgatgatcgcaccgctgacatcattcttcaactattcaagtcccttggcaaatttgtcgcccgatctatgatcgactctcgcatcatcgacatcaacctgaatcccaccttcttccgcataggcgaagagtctggcgtgaagccatccctcggagccgtcaagattgtggaccccggtcttgccaactcgctcaagctcgtgaagaaatttgtctcggccaagaaagcagtagttgaggatccgacaagaacagcagcccaaaaggttgcagatacacaacatatcgtcgtcgatggcacttcactcgatgatcttgcccttgatttcaccctgcctggttacgccgacattgaactcgtgccaggtggctctcacattcaggtcacaattgacaacgtcgactcctatcttgacaaagtgatcgacatgacacttggtcgcggtgttaagcgacaggttgaggctttccgtgcaggcttttcccaagtttttccgtactcggccttgagtgcattcacacctgccgagctggtcacactcttcggaagggcagaggaggactggtctctcgaaaccctgacggattcaatcaaggcagaccacggcttcaacatggacagcaagagtatcaagaacttactccagacaatgagcgagctgacagcgccccaacgacgtgatttcttacaattcactacgggtagcccgaaacttcccatcggaggtttcaagagcttgacgccgatgtttaccgtcgtctgcaagcctagtgaaccaccatacacatctgacgactatctccccagcgtcatgacctgtgtcaactacctaaaactacctgactacacaagtattgacagcctcaagcgacaattgatgactgctatcaaggagggccaaggagctttccacttgtcctaagccttcgctgcccaagagtggcaggcaacggaaaaagcgtagagttggtttcattgcgaatcaatagcattatacaaatatgtgaaagaggatgagaacaaacgggcgacgattatcgagattcaccattagctgatattcgcagacctccttgtgcagtctacgactgaacgtcaattccctggactaccgcctcaaaatagatgatcaagggtgcggtagggaaatatcagtgcctcccagcattcacgaattggcgtgttactcccggtggcaatgaaaaagaaaaatgagaaagagtggatggcgagatcataatcaacggcctgctttgctttgctttgcatggaaggggtttagtcggcgcagggatcgggatcggctcaggttgacgggatttgactaattagctttgagtgtaataatgacatatccaaagccctgaatttgctcacctctgtttttcctcca

SEQ ID NO: 26286 - DNA, 1365 bp, Muscodor strobelii
  misc_feature: SGI cDNA ID NO. 568987
  misc_feature: Encodes the peptide sequence at SEQ ID NO 26287
atgaagtcaagaataatacccaaatcctccctacgacgaattgctcgatccctgccccgcggttcgcgacgattgccccttgttagcatccgttcagtcagcggtggcatatcgcaacgtccaaattccgaccatgtctcgtttcccggagccgtgaagagcgccttcacgagtggcctgaagttcgcattaccatccgatcatcctaccttaccgacatatcgcgttatagaccaagatggcaatatcgtcgacaaatccttcaagcaagatttgagcaatgaagaggtggtgaaactgtacaggactatgttgaccgtctccataatggatgttatcatgtttgatgctcagaggcaaggccgccttagcttttatatggtatctgcgggtgaagaagcgttgagcgtagggtcagcttcggtgttcgataagcaggatgtactcttctgtcaataccgagagcagggtgtctttgcacagcgtggtttcacgttaaatgactttatgaaccaattgttcgccaacattaaagatccaggccgaggccgaaatatgcccgttcactacggtagcaaagagttaaatattcacaccatttcttctccccttgccacacaaataccacatgcttctggagcagcatatggcctaaaaatgcagcgcatcaacgacccatctttaccaccgcgtgttgttggtgtgtatttcggcgagggtgctgcaagcgagggagacttccatgcggcgctaaatattgcagctacgagatcatgtcctgtcgtgttcatatgtcgaaacaatggctatgccatttctaccccaacattggaacaataccgtggtgatggtattgctagtcgtggtatcggctacggtattgacaccatccgagtcgacggtaacgatatctgggctgtcagagaggtcacaaaaaaggctagagagatggctctgcatgatggcggaaagccgattttgatcgaagcaatgagttatcgcgtgagtcaccacagtacgtcggacgactcgttcgcctaccgtgctagagtagaagtcgaggattggaagcgtcgagacaaccccctctcccggttacgcaagtatatggaagccaacggattttgggacgagaccaaagagaaggaagcgagggagagcacaagacgagatgttctaaaggcattttctcaagcggagcgtgagaagaagccaccgatccgtgccatgttcgaagatatctacgaggaacttacacccgaactcaaggcccagatgaaagagttgagcgagcatttagagaaatatcctgatgagtacgatttgggcgaatttgagggaggcaaaaagagcctagagtcatga

SEQ ID NO: 26287 - protein, 454 aa, Muscodor strobelii
  misc_feature: SGI Peptide ID NO. 568987
  misc_feature (101)..(408): Pfam Id: PF00676 Pfam Desc: Dehydrogenase E1 component
  misc_feature (4)..(453): NCBI GI: 171682550 Blast Desc: protein product [Podospora anserina] gi|170941234|emb|CAP66884.1| protein product [Podospora anserina]
  misc_feature (1)..(453): NCBI GI: 46134201 Blast Desc: FG09240.1 [Gibberella zeae PH-1]
  misc_feature (28)..(452): NCBI GI: 164422564 Blast Desc: 2-oxoisovalerate dehydrogenase alpha subunit, mitochondrial precursor [Neurospora crassa OR74A] gi|157069720|gb|EAA30945.2| 2-oxoisovalerate dehydrogenase alpha
  misc_feature (60)..(439): NCBI GI: 116202753 Blast Desc: conserved [Chaetomium globosum CBS 148.51] gi|88177779|gb|EAQ85247.1| conserved [Chaetomium globosum CBS 148.51]
  misc_feature (9)..(453): NCBI GI: 39943658 Blast Desc: MGG_03840 [Magnaporthe grisea 70-15] gi|145014529|gb|EDJ99097.1| MGG_03840 [Magnaporthe grisea 70-15]
  misc_feature (11)..(452): NCBI GI: 238501638 Blast Desc: 2-oxoisovalerate dehydrogenase complex alpha subunit, [Aspergillus flavus NRRL3357] gi|220692290|gb|EED48637.1| 2-oxoisovalerate dehydrogenase complex alpha subunit, flavus
  misc_feature (10)..(452): NCBI GI: 261205330 Blast Desc: 2-oxoisovalerate dehydrogenase alpha subunit [Ajellomyces dermatitidis SLH14081] gi|239592461|gb|EEQ75042.1| 2-oxoisovalerate dehydrogenase alpha subunit [Ajellomyces alpha
  misc_feature (10)..(452): NCBI GI: 70991847 Blast Desc: 2-oxoisovalerate dehydrogenase complex alpha subunit [Aspergillus fumigatus Af293] gi|66848405|gb|EAL88734.1| 2-oxoisovalerate dehydrogenase complex alpha subunit, fumigatus
  misc_feature (11)..(452): NCBI GI: 154274610 Blast Desc: 2-oxoisovalerate dehydrogenase alpha subunit, mitochondrial precursor [Ajellomyces capsulatus NAm1] gi|150414596|gb|EDN09958.1| 2-oxoisovalerate dehydrogenase alpha
  misc_feature (26)..(452): NCBI GI: 258575165 Blast Desc: 2-oxoisovalerate dehydrogenase alpha subunit [Uncinocarpus reesii 1704] gi|237902030|gb|EEP76431.1| 2-oxoisovalerate dehydrogenase alpha subunit [Uncinocarpus reesii
  misc_feature (44)..(446): SWISSPROT Homolog: EC 1.2.4.4 3-methyl-2-oxobutanoate dehydrogenase (2-methylpropanoyl-transferring)
  misc_feature: Useful for introducing or modulating the production of volatile compounds
  misc_feature: Useful for fungicidal and/or biocontrol applications
MKSRIIPKSSLRRIARSLPRGSRRLPLVSIRSVSGGISQRPNSDHVSFPGAVKSAFTSGLKFALPSDHPTLPTYRVIDQDGNIVDKSFKQDLSNEEVVKLYRTMLTVSIMDVIMFDAQRQGRLSFYMVSAGEEALSVGSASVFDKQDVLFCQYREQGVFAQRGFTLNDFMNQLFANIKDPGRGRNMPVHYGSKELNIHTISSPLATQIPHASGAAYGLKMQRINDPSLPPRVVGVYFGEGAASEGDFHAALNIAATRSCPVVFICRNNGYAISTPTLEQYRGDGIASRGIGYGIDTIRVDGNDIWAVREVTKKAREMALHDGGKPILIEAMSYRVSHHSTSDDSFAYRARVEVEDWKRRDNPLSRLRKYMEANGFWDETKEKEARESTRRDVLKAFSQAEREKKPPIRAMFEDIYEELTPELKAQMKELSEHLEKYPDEYDLGEFEGGKKSLES

SEQ ID NO: 26288 - DNA, 9281 bp, Muscodor strobelii
  misc_feature: SGI EST ID NO. CUFF.62837.2
  misc_feature: Variant of the nucleotide sequence at SEQ ID NO 26286
ctttagagcggcttaacgtgacgtcgctgccctttgaaagtccggggaaagccatcctacacctctagcttgcgatcctttgcccgcgtctgtctcctcattcttttttttcgcgagattgaggaattgttactggagcggtgaagttctggctcggaattagtcgaaaatgaagtcaagaataatacccaaatcctccctacgacgaattgctcgatccctgccccgcggttcgcgacgattgccccttgttagcatccgttcagtcagcggtggcatatcgcaacgtccaaattccgaccatgtctcgtttcccggagccgtgaagagcgccttcacgagtggcctgaagttcgcattaccatccgatcatcctaccttaccgacatatcgcgttatagaccaagatggcaatatcgtcgacaaatccttcaagcaagatttgagcaatgaagaggtggtgaaactgtacaggactatgttgaccgtctccataatggatgttatcatgtttgatgctcagaggcaaggccgccttagcttttatatggtatctgcgggtgaagaagcgttgagcgtagggtcagcttcggtgttcgataagcaggatgtactcttctgtcaataccgagagcagggtgtctttgcacagcgtggtttcacgttaaatgactttatgaaccaattgttcgccaacattaaagatccaggccgaggccgaaatatgcccgttcactacggtagcaaagagttaaatattcacaccatttcttctccccttgccacacaaataccacatgcttctggagcagcatatggcctaaaaatgcagcgcatcaacgacccatctttaccaccgcgtgttgttggtgtgtatttcggcgagggtgctgcaagcgagggagacttccatgcggcgctaaatattgcagctacgagatcatgtcctgtcgtgttcatatgtcgaaacaatggctatgccatttctaccccaacattggaacaataccgtggtgatggtattgctagtcgtggtatcggctacggtattgacaccatccgagtcgacggtaacgatatctgggctgtcagagaggtcacaaaaaaggctagagagatggctctgcatgatggcggaaagccgattttgatcgaagcaatgagttatcgcgtgagtcaccacagtacgtcggacgactcgttcgcctaccgtgctagagtagaagtcgaggattggaagcgtcgagacaaccccctctcccggttacgcaagtatatggaagccaacggattttgggacgagaccaaagagaaggaagcgagggagagcacaagacgagatgttctaaaggcattttctcaagcggagcgtgagaagaagccaccgatccgtgccatgttcgaagatatctacgaggaacttacacccgaactcaaggcccagatgaaagagttgagcgagcatttagagaaatatcctgatgagtacgatttgggcgaatttgagggaggcaaaaagagcctagagtcatgagaacatcagcctcttaacgcccatctaatcgacgataatcatccccctcatctgtgatgcgatttgctccatattatgcatacaacagaggatttcggttcagtgattttctgaagctgcagaccaacgcacatgcacatgtaggtgagtggggacaacatcacctcacgataccagtcacttgctgggggctactcggaactaatatttgcgtcgtgccacgtaggcagggttaacagccaatacatgttgtgctactagatcgacgaagcgaaatgttcgtgtcagaggttgctgaaaattcttgtctgcgtgagattgacccatctcgcgataatcgaaacgctttggtaataaggagatatcttttggctcacccgcatgaatgacattgatctcgagaggcaccttcagactatcgatacccctggtccgttggagtatggcagagtgggtttctcatgcacgcagggcacgctgtgccgtgtccaggaatgctagtatctggcgatttgggtttccgtaatcgtagtaactgtgatatcccgcctcaatcggtgatggtatacgataaacagccagacattccaccccatacctgctgttcagaataaatagtagatgtgccgtaaacagtcccgtttattgcaaagagatgacgatagtgagcggagaactccttggccggttggctttgcaagggtttaactttggagtagctggattcatagtctcacacccctcccgttcagataaggcagaattcgcgattccaagccgttccattgcgatgaacaagcccattgacgcaccgtgtcgaagctagatggaccgaccacccatcctatagccacaccacccccgctgacacgacagccaggctagccgcccgccgccgacgggaagtcaaacctcctccgaatcgctctcctggttccccaagcttgttacagcacagcaacaactgctgtctctccgtttccctcctctaataactcgtttcaacgtctcgtaggcacgaaatcgccatcacgacccgcaacagcgcgctcactcgatgaagcggcggtctaaaaaacgagagcacgagatcacgacacacaggtagaagcgacacactgcgggcggtagggtcgatgacgcccggctgaattccatcgaaggcacgctcgtatatcgtcattgtcgcccgaagtctgtctgttatataaccttgattcccacatcagctccttggtatctgtttttggactgggtcggcacttctcttcattcctcggcaccaaaaacgcatcaacaaccagtacaggctctggccgtcgcaagcagcctctgccgcagcctcatggcgtaatccatggccgaccgaagacaacctgcgaactcgcgctcacgatcggcactcgaccacgatctcccagcgcaaccgtcagcaccggctcaaactccgcgtccgtacactccgacgacctcgaaaggctccggccagcggcccgcagcacctccctcgacagcgtcctccgcgctgtccttatcgcaatcgccgccatcagccagaatcactcgatcgtctgcccgcaacgccgccgcggcgtctcaggcaacgtctcccaccggcaccggcacctctgctcagcaaacacccgcagcaccctctacgtcatcctccacctccgacctcactcagcccaaccagcccagctcctccaaacaacgtcctgtgtctggccggaagcgcaaggcagacaaccaggaaggcagccctccgcagccgcagccatcgaccggcgagcagcctcgggccctcaggtctaagcggcagaaggttcaggatccttctccctccgacccgccgcctgccccggcccccccggctgggccctcgacacgcacacgcaagggaaagggcaaggctgcagcaaccatgtctagtccatctggttctgagcctaatgaagcatccgctatgcaagatcgaccggcctcggcgtctgcttcggtatcttcaagccggaaatcgagccgccagaacaaaaaagccccagcagcctcgtcttcaacacgacggtccaaaaggacttctaacaatgcaagctcttcagatccagacactaccatgacggggaccgaggaggcggcgagaaatgcagaagccgctcagccccctcctccccctccaccgcctgcacaccctctggacgaggacagcgatgatcatgatgacgacgacgacgatgaccaccaccagtatgacgatgacgatcccttcagtggcttcggcggtccgccaggctctggattgtctagtaccctccgagccctgaccggcatgatgtcgggtatctcatccagattacgcgatatactcagcaaccttcgacaaaagggtgacccgtctgtgcaactcatcgcgctccaggagctctctgagattctgttggtttccaacgaagataacctctctggacacttctcacctgatgccttcgttaaggagctagtcgtcttaatgcagccgaatgagttcaccggggaggaaagtcccgagatcatgctattggcgtgccgctgtcttgcaaatttgatggaagctttaccagccagtgctgcgaatgtcgtctatggaggggcagtcccggttctgtgccagaagctgctggagatttcgttcatcgacctggccgaacaagctctgagcacgttagagaagatctcagtcgagtatccttctagtattgttcgtgagggtggtctgacggcctgtctatcgtatctggacttcttcgccaccagcactcagagaaccgctgttaccaccgcggccaactgttgtcgcaacattcccgaagactctttcagtgtaataaaagacgtcatgcccattcttctcaacgtcctcggcagtagtgatcaacgtgttgttgagcaagcatctctgtgtgtgacccgcatcattgagagtttccgatatcactcgtccaagcttgagcaactcgtcagtgtcgatctcctcaaggccattttgcgactcctcgttccaggcacgaccaacttgatcagtgccaacatccacacccaattccttcagtcgcttgccttcacagccaaagccagccctcgtctctctgctgagctggtgaagttgaatgtggtggagacactctatcaaatcctcactggcgtctcaccgcccgacgagatggaagacgttgcctcaaaactcgatagcgtggtcatcatgcaagctttgatccaccggccacgggaacaaatcatcgagactcttaatgtggtctgtgagttgcttccttcaccaaggtggccgccctcgtctgctggtggcgacattgatggaactcagccgattactccttcgtcgtcggggactcgcaagaaatcctccgccgagaagaggcttgagctcttggatgaatgcaaagaccatgttcggagatttgcgcttatcttatttcccaccttgaccgatgcgttctctagtacagtgaacttgacagtccgacaaaaggttcttgatgcgcaaatgaagatgctctccaatctagacaaggatatacttgttgatgccttaaagtcggttccctatgcctcgtttcttgctgccattttgtcacagcaagatcatccgacattggtgatgtatgctgtgcaaattaccgagttgcttctaaaccgccttgaccatatttatcgctatcagatataccgtgaaggtgtgatcacggagattgctaagctggccgaagaatacaaagagcctgaagtcaagcccgcggacaacgcaactgtggatcggcctagtgtttccgtaggtagtgatgtggacagggtttctattcacaacgatacagacgatgacgaaggcgaggatcaccactctgacgcccatgatgaagacggcgatgatgaccatgtcgaccatgacgacgatgatgacgacgatgacgatcaagagaatgatcatccaggcctttcggatagttccgatggatctaccatgtctatcgatggaccggcaccccgcctactgttctctgacatttctgttatcaagtcccgcatcgccgaagctgccaagaacttcttggagactcacgaaactgagaagcaaggcaaggcaatgaagaagaaggcagccaagatattggaagacttgcaacagctgtcttccgacattcagaactattatcttcaccgtacggctagcgacttaagtcccagcagtggcactgcattgtggacaaggcttgccttttacttcgacggtgatgtcctagagagtgtcaccagcgctgagctcctcgcgtctggattggtgcgcacagtagaagaggtcttcagtaaccccgacgagatcctcgctaattcggccagagccgcattcctggaagtgttcatggcacaatctgtcagttccaagccgaagactgcgaccgccgattcgccatcgaccccattcagcgtcatggcccacaagctccaggatctactaagccgatcagagcattttgaagttctcaccgtccacaacagctcgatggataatcgaggaagcagtgcggcttccatgctagcgaaacagatcaagctcaagcttgtcgccgatgaggaatcggagataccacattcttacaggaatattatggtatcgattcatgccattgcaacattcaaggccttggacgattatcttcggccgcgtatcacggctcatgggcgtcccaggggggctcgacctcgcgatccggcaagactgtcggaggcgttggctttgatggcaagttcagccgggcttccattctcagggtcgcgtgcagcgcgtctagcagaacaacttggcggcttcgcatcgcatcctacgccaccgccagctccccctcaggcctcgggttctcgtgttccgaagaagtccaagtctaagcaggcggagcaatcggaagactcaacccctgcaccatcaacaggcggccgagaaaaagccatcctgcgccgatctacgcgccgcaacccggttcctgagagcaccttagcaccgcctcctcccccaccaccagaggacgacgatgacttgcaaaacgctctcgaatgcgcagacgaaaagaatcatatctctgacgacgacgctgacgataacgatgatgagctcttgggtgacagcagtgctgccctaaacgccattgtcggcgagttagatgaggacatggaagacgcgcctcgacccgaaccttctgctgtcaacatggaggtagctgctggaggtaaagtcacggccatcaaggaggacgggactcgagtgcctactccaggccactcgactggacctactagcgtcccaagccgcagtactcctacacaagtagccacaccgcagcagaacactccaacaccggcgacgacttcgagacccctctcatacgctgccgctatacagtctgtgcccacagattggcatattgagttcagtctcggcgaccgggttattcccaacgagaccacaatctaccgcgctgtacacaacgctccttcacctccaccggccgatcatatgagccgcagtgtgttttcaacgatacattctatcaaattcaagcgggtaccggggccgcctccaagtgagccaattgggttctccgcatccacgttggacggcgttccggatgtgaatggcgtcccggcatcgttggctaaacatcctaccaccacatctattcttcgtctacttaagatactccacgacctgaatgccaatattgaggacatcatggtggagaacaaaaacaatctccggttgcatgtcgagcccctttcgcagtttgtcaacacgaaattgaccgccaagctgaaccgccagttggaagaacctcttattgtcgccagcaattgtctgcctgggtggagcgaggatctcgctcggctttatcccttcctcttcccatttgagactcgccacttgttcttgcagtcgacttctttcggctatgcccgatccatgagtcgctggcagaacgcacagcaggaggacaattcgcgcagggaccgccgagacgaacggcctttcctaggtcgtctacaacgtcaaaaggttcgcatctcgcgaggcaagattttggagtctgccctcaaagtcatggagctatacggcagctcccagagtatccttgaagtcgagtacttcgaggaagttggtacaggtctgggaccgactttggagttctactcgaccgtgtcaaaagaattctccaagaagaagctcaagctttggcgtgagctggattcgaacgattccgacgagtttgtctcggcccctaatggactattcccgagaccactaaacgacgatgatcgcaccgctgacatcattcttcaactattcaagtcccttggcaaatttgtcgcccgatctatgatcgactctcgcatcatcgacatcaacctgaatcccaccttcttccgcataggcgaagagtctggcgtgaagccatccctcggagccgtcaagattgtggaccccggtcttgccaactcgctcaagctcgtgaagaaatttgtctcggccaagaaagcagtagttgaggatccgacaagaacagcagcccaaaaggttgcagatacacaacatatcgtcgtcgatggcacttcactcgatgatcttgcccttgatttcaccctgcctggttacgccgacattgaactcgtgccaggtggctctcacattcaggtcacaattgacaacgtcgactcctatcttgacaaagtgatcgacatgacacttggtcgcggtgttaagcgacaggttgaggctttccgtgcaggcttttcccaagtttttccgtactcggccttgagtgcattcacacctgccgagctggtcacactcttcggaagggcagaggaggactggtctctcgaaaccctgacggattcaatcaaggcagaccacggcttcaacatggacagcaagagtatcaagaacttactccagacaatgagcgagctgacagcgccccaacgacgtgatttcttacaattcactacgggtagcccgaaacttcccatcggaggtttcaagagcttgacgccgatgtttaccgtcgtctgcaagcctagtgaaccaccatacacatctgacgactatctccccagcgtcatgacctgtgtcaactacctaaaactacctgactacacaagtattgacagcctcaagcgacaattgatgactgctatcaaggagggccaaggagctttccacttgtcctaagccttcgctgcccaagagtggcaggcaacggaaaaagcgtagagttggtttcattgcgaatcaatagcattatacaaatatgtgaaagaggatgagaacaaacgggcgacgattatcgagattcaccattagctgatattcgcagacctccttgtgcagtctacgactgaacgtcaattccctggactaccgcctcaaaatagatgatcaagggtgcggtagggaaatatcagtgcctcccagcattcacgaattggcgtgttactcccggtggcaatgaaaaagaaaaatgagaaagagtggatggcgagatcataatcaacggcctgctttgctttgctttgcatggaaggggtttagtcggcgcagggatcgggatcggctcaggttgacgggatttgactaattagctttgagtgtaataatgacatatccaaagccctgaatttgctcacctctgtttttcctcca

SEQ ID NO: 26289 - DNA, 1377 bp, Muscodor strobelii
  misc_feature: SGI cDNA ID NO. 568988
  misc_feature: Reduced expression when VOC is produced
  misc_feature: Encodes the peptide sequence at SEQ ID NO 26290
atgggagtcagccccgccgcagccatcggcctggtggtcgtcttcgtcttcctattgctcggcttaatcgcatggaagggccgtggcatggtcaagcagttcgccatcctcatgttcacgggcaagcaacaacaggagcgtgccgagcgccaacgccgccgtcgccaggagttctacattgtcgaatatcgatatggtgatcgatcgatacttggtatattaaaagaggaaaagaaggaaagaaacattacagggtccaagcaccatgaaaatgatcccgatccccaccaaaatccacggggcgccaagcccatcaccacggaacggagatgcatccggccgacctccgacctcactctcgaaaaattcccaattgcgcaacttcaactgacgtccttccaaggctctcctcaacgacgaccaccgtcactgcgcgaaaaatcagaatctcaaaatggtggtcgctcgtcccctcctccgcgcagcaacccgttgctcacacatttcaccacaacaccatcctctcaatcaccaaccccaacacccgaagccgaccctttctcccccgagtcccgcgcctctcgacgaactcacttcggcttcgaagatggcctctcagaagctgaaaagaccgagcgcgtcgcaggcgtattctccagtgtcgcagagtcatacgaccgcatgaatgaccttatgagcttcggctggcatcgtatctggaaagatcacttcgtctcctccctaaaccccggctcctcctcctccctcccacccacaccgcagcgaatcctcgacgtagcaggcggaacaggcgacatagccttccgcatgctgcaccacgcgcacaccataaacaacaacccaaacatccacctaacaatctccgacataaacccctccatgctctccgtcggcaaatcccgctccttaacactccccgcagcgcaacaagccaatctctctttcctagtcgcggacgcgacatccctccccgatatcccctcgaattctctcgatctgtataccgtcgccttcggcatccggaatttctccaacatccccgcggctttgcgggaagcgcaccgagttctaaaacccggcggcatctttgcttgtctcgagttcagcaaagtgaacaactcgcttttagacgcagtatacaagcgctggtcgttcggcgcaataccgctcattggacaggtagttgcgggggatagggactcataccaatacctcgttgaaagcatcgagcggtttccttctcaggaggagttccgcggtatgatagaggatgcgggcttcgttgtgggaggaaagggatatgaggatttgaccggcggtgttgccgctatacataaggggatgaagcctttgtag

SEQ ID NO: 26290 - protein, 458 aa, Muscodor strobelii
  misc_feature: SGI Peptide ID NO. 568988
  misc_feature (264)..(372): Pfam Id: PF08241 Pfam Desc: Methyltransferase domain
  misc_feature (264)..(370): Pfam Id: PF08242 Pfam Desc: Methyltransferase domain
  misc_feature (206)..(456): Pfam Id: PF01209 Pfam Desc: ubiE/COQ5 methyltransferase family
  misc_feature (170)..(457): NCBI GI: 85095977 Blast Desc: ubiquinone biosynthesis methyltransferase coq5 [Neurospora crassa OR74A] gi|28921659|gb|EAA30943.1| ubiquinone biosynthesis methyltransferase coq5 [Neurospora crassa OR74A]
  misc_feature (143)..(458): NCBI GI: 256727168 Blast Desc: [Nectria haematococca mpVI 77-13-4]
  misc_feature (193)..(458): NCBI GI: 46134199 Blast Desc: FG09239.1 [Gibberella zeae PH-1]
  misc_feature (193)..(458): NCBI GI: 145606907 Blast Desc: MGG_03839 [Magnaporthe grisea 70-15] gi|145014527|gb|EDJ99095.1| MGG_03839 [Magnaporthe grisea 70-15]
  misc_feature (195)..(458): NCBI GI: 156060157 Blast Desc: SS1G_02217 [Sclerotinia sclerotiorum 1980] gi|154699625|gb|EDN99363.1| SS1G_02217 [Sclerotinia sclerotiorum 1980]
  misc_feature (168)..(457): NCBI GI: 171682548 Blast Desc: protein product [Podospora anserina] gi|170941233|emb|CAP66883.1| protein product [Podospora anserina]
  misc_feature (197)..(458): NCBI GI: 189191112 Blast Desc: ubiquinone/menaquinone biosynthesis methyltransferase ubiE [Pyrenophora tritici-repentis Pt-1C-BFP] gi|187973501|gb|EDU41000.1| ubiquinone/menaquinone biosynthesis
  misc_feature (195)..(458): NCBI GI: 255932283 Blast Desc: Pc12g08680 [Penicillium chrysogenum Wisconsin 54-1255] gi|211582317|emb|CAP80495.1| Pc12g08680 [Penicillium chrysogenum Wisconsin 54-1255]
  misc_feature (181)..(458): NCBI GI: 115400457 Blast Desc: ubiquinone biosynthesis methyltransferase coq5 [Aspergillus terreus NIH2624] gi|114191483|gb|EAU33183.1| ubiquinone biosynthesis methyltransferase coq5 [Aspergillus
  misc_feature (194)..(458): NCBI GI: 212532975 Blast Desc: ubiquinone biosynthesis methlytransferase Coq5, [Penicillium marneffei ATCC 18224] gi|210072008|gb|EEA26097.1| ubiquinone biosynthesis methlytransferase Coq5, [Penicillium ATCC
  misc_feature: Useful for introducing or modulating the production of volatile compounds
MGVSPAAAIGLVVVFVFLLLGLIAWKGRGMVKQFAILMFTGKQQQERAERQRRRRQEFYIVEYRYGDRSILGILKEEKKERNITGSKHHENDPDPHQNPRGAKPITTERRCIRPTSDLTLEKFPIAQLQLTSFQGSPQRRPPSLREKSESQNGGRSSPPPRSNPLLTHFTTTPSSQSPTPTPEADPFSPESRASRRTHFGFEDGLSEAEKTERVAGVFSSVAESYDRMNDLMSFGWHRIWKDHFVSSLNPGSSSSLPPTPQRILDVAGGTGDIAFRMLHHAHTINNNPNIHLTISDINPSMLSVGKSRSLTLPAAQQANLSFLVADATSLPDIPSNSLDLYTVAFGIRNFSNIPAALREAHRVLKPGGIFACLEFSKVNNSLLDAVYKRWSFGAIPLIGQVVAGDRDSYQYLVESIERFPSQEEFRGMIEDAGFVVGGKGYEDLTGGVAAIHKGMKPL

SEQ ID NO: 26291 - DNA, 1474 bp, Muscodor strobelii
  misc_feature: SGI EST ID NO. CUFF.62884.0
  misc_feature: Variant of the nucleotide sequence at SEQ ID NO 26289
aaatgatcccgatccccaccaaaatccacggggcgccaagcccatcaccacggaacggagatgcatccggccgacctccgacctcactctcgaaaaattcccaattgcgcaacttcaactgacgtccttccaaggctctcctcaacgacgaccaccgtcactgcgcgaaaaatcagaatctcaaaatggtggtcgctcgtcccctcctccgcgcagcaacccgttgctcacgtaccaacaacactgtaaacatagctacacttacaaactgcacaacaaaatccgcatccatatcatcatcgcaaacaaggccatcaagacatttcaccacaacaccatcctctcaatcaccaaccccaacacccgaagccgaccctttctcccccgagtcccgcgcctctcgacgaactcacttcggcttcgaagatggcctctcagaagctgaaaagaccgagcgcgtcgcaggcgtattctccagtgtcgcagagtcatacgaccgcatgaatgaccttatgagcttcggctggcatcgtatctggaaagatcacttcgtctcctccctaaaccccggctcctcctcctccctcccacccacaccgcagcgaatcctcgacgtagcaggcggaacaggcgacatagccttccgcatgctgcaccacgcgcacaccataaacaacaacccaaacatccacctaacaatctccgacataaacccctccatgctctccgtcggcaaatcccgctccttaacactccccgcagcgcaacaagccaatctctctttcctagtcgcggacgcgacatccctccccgatatcccctcgaattctctcgatctgtataccgtcgccttcggcatccggaatttctccaacatccccgcggctttgcgggaagcgcaccgagttctaaaacccggcggcatctttgcttgtctcgagttcagcaaagtgaacaactcgcttttagacgcagtatacaagcgctggtcgttcggcgcaataccgctcattggacaggtagttgcgggggatagggactcataccaatacctcgttgaaagcatcgagcggtttccttctcaggaggagttccgcggtatgatagaggatgcgggcttcgttgtgggaggaaagggatatgaggatttgaccggcggtgttgccgctatacataaggggatgaagcctttgtagaccaatggggaaaaagtgagtgtataatatgagagagaccaacgtgtacaaaaatccaggcgtggagatgaaggtaaatcgcatagagtgtatcacacagaacgcataatccagattgtacaacatgaatcaagctcctcacggaacatatatctgatcccaagaaatccgtcacttgctccacgtcatgccatttactattgagtaccatcaagatagtagaccgaatagtagaccgaatagcaaaccgaatagtagactaactaagtcataggcag

SEQ ID NO: 26292 - DNA, 1377 bp, Muscodor strobelii
  misc_feature: SGI cDNA ID NO. 568989
  misc_feature: Reduced expression when VOC is produced
  misc_feature: Encodes the peptide sequence at SEQ ID NO 26293
atgtggaccaccctcctccagatgggcgagcttgtcgacaccgccaaccgcgtctacgacccgaccgagacccgtgtcttcattacccacgcctcacctgctcgcgaaggtatcctgaaccagctttcagtcagcttgaaggccgatttctccatctccgccggtctccatttccgctacggaagctcctacaacgagttcagtgtcaaccctactctcgaccactaccgcggcaagcttgctgcttccaaggcctctttcaacgatgtttgggagaccgtcaagaccgaagtcgagcctgccatccagcagaacgaggcccagcagaacctcctgaagaatgcgcttgccctggttgagaagatgcccactaccgcagctggtggcaaccccttcggtggtccggttggtgctcccggcgccttgggccaggtcgacgagagcgctttcaagaacatgtggaacttcaacttggcggatgctgcctttggttggctggtattggagatccaggatggccgtattggtaccgagatgcgcgctcaaggattcaacttctcccaccgtggagccaagcagcagcccaacattccccagagcacgccctctccggctccagccagctctggtcttcctcccgccggtcctgcagccgccgctgcacctccctccggcccgcagagaagcgcttcaggtgctgcgcctgcccctaagccagctgctgccacgcctctgcagaccaagcccgcaacgcccaagcctactggcaccacgcctgctccaagcgccgctgcgaaggagaatgagaagcctgccggcactaacggagccactaacggacccgagtcggccccttctcctggcccccgacctaccaacgatgccatcattggcctattcgttatgaacgtccagagcgacgagcagaccaaggacattttcccggaggagcacaagaccaagatcaccaaggtcgagaaatggggcaacaatagtaacaataaggtggcccatttcccgacggtcgaggatcgcgatgccgcctacgctagtctcgccgacgaattcaaggtccgccagtccgaagaccggtctaagcctttggtcaagatcttccagccccgcgagaacaagccttacacggcccgtggcggaggtgctggcaactggggaagcagccgtggccgagatagcgccagtggataccgtagcgcaggtgaccgtggcactatgagcggtggcgagagtggccctgagactagccgtcgtggcggccgcggcggtgcccgtggcagaggagaccgtggacgcggtggtcgaggtcgtggtggcatgaacaaggtcgagggaagcgcttcgcccgcccccgagagctag

SEQ ID NO: 26293 - protein, 458 aa, Muscodor strobelii
  misc_feature: SGI Peptide ID NO. 568989
  misc_feature (1)..(406): NCBI GI: 46134197 Blast Desc: FG09238.1 [Gibberella zeae PH-1]
  misc_feature (1)..(406): NCBI GI: 261359369 Blast Desc: ser/Thr protein phosphatase family protein [Verticillium albo-atrum VaMs.102]
  misc_feature (1)..(406): NCBI GI: 256727751 Blast Desc: NECHADRAFT_99411 [Nectria haematococca mpVI 77-13-4]
  misc_feature (1)..(415): NCBI GI: 39943654 Blast Desc: MGG_03838 [Magnaporthe grisea 70-15] gi|145014526|gb|EDJ99094.1| MGG_03838 [Magnaporthe grisea 70-15]
  misc_feature (1)..(406): NCBI GI: 156060155 Blast Desc: SS1G_02216 [Sclerotinia sclerotiorum 1980] gi|154699624|gb|EDN99362.1| SS1G_02216 [Sclerotinia sclerotiorum 1980]
  misc_feature (1)..(406): NCBI GI: 154315489 Blast Desc: BC1G_04317 [Botryotinia fuckeliana B05.10] gi|150847257|gb|EDN22450.1| BC1G_04317 [Botryotinia fuckeliana B05.10]
  misc_feature (1)..(406): NCBI GI: 116202757 Blast Desc: CHGG_09263 [Chaetomium globosum CBS 148.51] gi|88177781|gb|EAQ85249.1| CHGG_09263 [Chaetomium globosum CBS 148.51]
  misc_feature (1)..(406): NCBI GI: 85095972 Blast Desc: NCU09861 [Neurospora crassa OR74A] gi|28921658|gb|EAA30942.1| conserved [Neurospora crassa OR74A]
  misc_feature (1)..(406): NCBI GI: 171682546 Blast Desc: protein product [Podospora anserina] gi|170941232|emb|CAP66882.1| protein product [Podospora anserina]
  misc_feature (1)..(406): NCBI GI: 259483829 Blast Desc: TPA: conserved [Aspergillus nidulans FGSC A4]
  misc_feature: Useful for introducing or modulating the production of volatile compounds
MWTTLLQMGELVDTANRVYDPTETRVFITHASPAREGILNQLSVSLKADFSISAGLHFRYGSSYNEFSVNPTLDHYRGKLAASKASFNDVWETVKTEVEPAIQQNEAQQNLLKNALALVEKMPTTAAGGNPFGGPVGAPGALGQVDESAFKNMWNFNLADAAFGWLVLEIQDGRIGTEMRAQGFNFSHRGAKQQPNIPQSTPSPAPASSGLPPAGPAAAAAPPSGPQRSASGAAPAPKPAAATPLQTKPATPKPTGTTPAPSAAAKENEKPAGTNGATNGPESAPSPGPRPTNDAIIGLFVMNVQSDEQTKDIFPEEHKTKITKVEKWGNNSNNKVAHFPTVEDRDAAYASLADEFKVRQSEDRSKPLVKIFQPRENKPYTARGGGAGNWGSSRGRDSASGYRSAGDRGTMSGGESGPETSRRGGRGGARGRGDRGRGGRGRGGMNKVEGSASPAPES

SEQ ID NO: 26294 - DNA, 2974 bp, Muscodor strobelii
  misc_feature: SGI EST ID NO. CUFF.62107.1
  misc_feature: Variant of the nucleotide sequence at SEQ ID NO 26292
cgaataatctttttgttggatctgctgtgtgtctggctgcaggtcgtttttctcgctgctgaaacgcaaaaagcacagctcgcagctgccgtcaaaacaatttctcaacctccatccatcgacacgcctcatccgactccatcgcgcaccaccgcaccgcacctcgtccgtccactcccacacggtcgccatccatctccgcttcttctcctcttccgtttgccgctcttccccgaatcactgtatttttttgatacccggaagtgttcttgtagttgtcccttgtattagcccccggtctccgtatcgcagacccctagccttgccgaatcgccctcgccgtcgtcgtcgattgccgtagcttccacacatcccgtgaccacgactgcccgaggcgcatccgcaagaagtgtttgccgttggtggaagtgtaaacagagaattagtctatcatcctcggtggctcatcggtagattgtctaatggctcaacccagacagccctacagcaaccccggctatctgcccaacggcgcctcagctgcctcgggtcctgtccccggcgccaccccgctccttcccaaccagggccgcatcttgcagcagggtgccatccgcgtcctgtgcatagctgatgtgcgaggaaaccttggctctctcaacgagctggcccgccaggcacgagccgaccacatcgtccacaccggtgactttggcttctacgatgagacctcgatcgaacgcatcgctgagaagacccttaagcatgtcgcccagtactccccgctgatctccgagagcgtcaagaaggccatcacccagcccggccccgtcaagcagcgattccccgccgaggagctgcccctgtcccagctcccacagctcatccgaggcgagatcaagctcgatgtccccgtctacaccgtctggggcgcctgcgaggatgtgcgcgtgctcgagaagttcagatccaaggagtacaacgtcccgaacctgcacatcatcgacgagaaccgctccaagctgctcgagatcggcggtgtcaagctccgactcctcggcctgggaggtgccgtcgtcatgcacaagctgttcgacaacggcgagggccgaactacgattgcaggtggccaggggaaccatgtggaccaccctcctccagatgggcgagcttgtcgacaccgccaaccgcgtctacgacccgaccgagacccgtgtcttcattacccacgcctcacctgctcgcgaaggtatcctgaaccagctttcagtcagcttgaaggccgatttctccatctccgccggtctccatttccgctacggaagctcctacaacgagttcagtgtcaaccctactctcgaccactaccgcggcaagcttgctgcttccaaggcctctttcaacgatgtttgggagaccgtcaagaccgaagtcgagcctgccatccagcagaacgaggcccagcagaacctcctgaagaatgcgcttgccctggttgagaagatgcccactaccgcagctggtggcaaccccttcggtggtccggttggtgctcccggcgccttgggccaggtcgacgagagcgctttcaagaacatgtggaacttcaacttggcggatgctgcctttggttggctggtattggagatccaggatggccgtattggtaccgagatgcgcgctcaaggattcaacttctcccaccgtggagccaagcagcagcccaacattccccagagcacgccctctccggctccagccagctctggtcttcctcccgccggtcctgcagccgccgctgcacctccctccggcccgcagagaagcgcttcaggtgctgcgcctgcccctaagccagctgctgccacgcctctgcagaccaagcccgcaacgcccaagcctactggcaccacgcctgctccaagcgccgctgcgaaggagaatgagaagcctgccggcactaacggagccactaacggacccgagtcggccccttctcctggcccccgacctaccaacgatgccatcattggcctattcgttatgaacgtccagagcgacgagcagaccaaggacattttcccggaggagcacaagaccaagatcaccaaggtcgagaaatggggcaacaatagtaacaataaggtggcccatttcccgacggtcgaggatcgcgatgccgcctacgctagtctcgccgacgaattcaaggtccgccagtccgaagaccggtctaagcctttggtcaagatcttccagccccgcgagaacaagccttacacggcccgtggcggaggtgctggcaactggggaagcagccgtggccgagatagcgccagtggataccgtagcgcaggtgaccgtggcactatgagcggtggcgagagtggccctgagactagccgtcgtggcggccgcggcggtgcccgtggcagaggagaccgtggacgcggtggtcgaggtcgtggtggcatgaacaaggtcgagggaagcgcttcgcccgcccccgagagctagaccttttcgaccgatatcctccgatgctctaccaactaatcatttgcgctgcgaattcgctgctttgtacactgatctctctttgagatctcaacctcttatcgttaatggaaggtggtcataattccagaccgccggcctgcgaagggaaaggggttattccagaaaaaggacgacgggcgttcgtcttgttattttcaccgtggtgctatgggtgagggatatggtagtgcgagacttccgttggttcgtgactcttccatggacaagccccttttgttacctaacactagtgcactggacatagggtcactctattacggggcttcgtttgcttttttcgcgggctgagagagagaagaaaaagggacttgcgtgcttcggctgaagactttgtcccgtgtgatggatcaacctctagttccataaacattatgataccgagattacccctgat

SEQ ID NO: 26295 - DNA, 798 bp, Muscodor strobelii
  misc_feature: SGI cDNA ID NO. 568990
  misc_feature: Elevated expression when VOC is produced
  misc_feature: Encodes the peptide sequence at SEQ ID NO 26296
atgaccgacaagcgcgttcatgacattaagtctctagctgaccttgacggcagaattgcctttcgtcggcataatgactctgaaagtgaaatctctgccttctggaagatctacgatgaccacgccgtatactacggcgaagttctcaagtcttttgaagaagttttgataaatgagataggaccatctctgaagcgtgtgccggacgaagatatctaccctttgatacctaacgatgttatcctcacgaaagcaccactcgacagcccctcgaacaacagcctacatgtcaaacgcccggcactggcaaactatgaagattctcgctttcattccgtgattcgcgacatatttctcgccgaggcgcaaacccttgaggaggtgtccaaagcgcctcacaaaaacatcatgacttatcatggctgcctcatagctgatagtcgtttgaagggcattgtcttgacccggtacaaaaccacgctcgccgatcacgttcggtacggtaacaaagctctcgatatcgatggaatcatgacagaattgaggttggcagtggaccatttacattcactaggggttgcacacaacgatctgaatccacataatatcatgttagatgataatatgatgccgatcgtgatcgatcttggatcgtgtcaaccagccggtggcaggctgatgtcgggaggatcacccgggtggagcaaatcaattaccacttcggtccaggaacacgacatacttgctttaaaggtcattcgagaatggctggttgatccggagtcgcatgtattgtga

SEQ ID NO: 26296 - protein, 265 aa, Muscodor strobelii
  misc_feature: SGI Peptide ID NO. 568990
  misc_feature (9)..(257): NCBI GI: 255934130 Blast Desc: Pc12g15460 [Penicillium chrysogenum Wisconsin 54-1255] gi|211582965|emb|CAP81173.1| Pc12g15460 [Penicillium chrysogenum Wisconsin 54-1255]
  misc_feature (34)..(257): NCBI GI: 171690744 Blast Desc: protein product [Podospora anserina] gi|170945320|emb|CAP71432.1| protein product [Podospora anserina]
  misc_feature (28)..(260): NCBI GI: 240273451 Blast Desc: conserved [Ajellomyces capsulatus H143]
  misc_feature (37)..(260): NCBI GI: 225554414 Blast Desc: conserved [Ajellomyces capsulatus G186AR]
  misc_feature (9)..(260): NCBI GI: 255932677 Blast Desc: Pc12g10740 [Penicillium chrysogenum Wisconsin 54-1255] gi|211582514|emb|CAP80701.1| Pc12g10740 [Penicillium chrysogenum Wisconsin 54-1255]
  misc_feature (63)..(259): NCBI GI: 242826609 Blast Desc: conserved [Talaromyces stipitatus ATCC 10500] gi|218712495|gb|EED11921.1| conserved [Talaromyces stipitatus ATCC 10500]
  misc_feature (63)..(259): NCBI GI: 242763500 Blast Desc: conserved [Talaromyces stipitatus ATCC 10500] gi|218723782|gb|EED23199.1| conserved [Talaromyces stipitatus ATCC 10500]
  misc_feature (64)..(263): NCBI GI: 238845731 Blast Desc: serine/threonine kinase [Microsporum canis CBS 113480]
  misc_feature (32)..(217): NCBI GI: 261188590 Blast Desc: conserved [Ajellomyces dermatitidis SLH14081] gi|239593067|gb|EEQ75648.1| conserved [Ajellomyces dermatitidis SLH14081]
  misc_feature (63)..(261): NCBI GI: 255943777 Blast Desc: Pc20g00950 [Penicillium chrysogenum Wisconsin 54-1255] gi|211587391|emb|CAP85424.1| Pc20g00950 [Penicillium chrysogenum Wisconsin 54-1255]
  misc_feature: Useful for introducing or modulating the production of volatile compounds
MTDKRVHDIKSLADLDGRIAFRRHNDSESEISAFWKIYDDHAVYYGEVLKSFEEVLINEIGPSLKRVPDEDIYPLIPNDVILTKAPLDSPSNNSLHVKRPALANYEDSRFHSVIRDIFLAEAQTLEEVSKAPHKNIMTYHGCLIADSRLKGIVLTRYKTTLADHVRYGNKALDIDGIMTELRLAVDHLHSLGVAHNDLNPHNIMLDDNMMPIVIDLGSCQPAGGRLMSGGSPGWSKSITTSVQEHDILALKVIREWLVDPESHVL

SEQ ID NO: 26297 - DNA, 3264 bp, Muscodor strobelii
  misc_feature: SGI EST ID NO. CUFF.62003.0
  misc_feature: Variant of the nucleotide sequence at SEQ ID NO 26295
attgggctcctctttgcgcctcatcactatcactcgccgattactcggacgaggagtgatgataccagttctatgaaggctgacattttccgtctgatattttcgatgagacaagctggtcaaaatgaccgacaagcgcgttcatgacattaagtctctagctgaccttgacggcagaattgcctttcgtcggcataatgactctgaaagtgaaatctctgccttctggaagatctacgatgaccacgccgtatactacggcgaagttctcaagtcttttgaagaagttttgataaatgagataggaccatctctgaagcgtgtgccggacgaagatatctaccctttgatacctaacgatgttatcctcacgaaagcaccactcgacagcccctcgaacaacagcctacatgtcaaacgcccggcactggcaaactatgaagattctcgctttcattccgtgattcgcgacatatttctcgccgaggcgcaaacccttgaggaggtgtccaaagcgcctcacaaaaacatcatgacttatcatggctgcctcatagctgatagtcgtttgaagggcattgtcttgacccggtacaaaaccacgctcgccgatcacgttcggtacggtaacaaagctctcgatatcgatggaatcatgacagaattgaggttggcagtggaccatttacattcactaggggttgcacacaacgatctgaatccacataatatcatgttagatgataatatgatgccgatcgtgatcgatcttggatcgtgtcaaccagccggtggcaggctgatgtcgggaggatcacccgggtggagcaaatcaattaccacttcggtccaggaacacgacatacttgctttaaaggtcattcgagaatggctggttgatccggagtcgcatgtattgtgatcgcagtgtaggtaaactacaattaatatgaatatatccaacatagatttaccatacttgctttgatatatctacttgacgttgtgtttcacattaaatggaacgcaataggagggtgcgccgcagagatgtttgcccctggacgacagttcagaaagtaacaatgttcagatgactactggaaccatatatgttcgcttgaaaagaatcaaatgaccgaccacataacgcttatgaacattgagcgaaacttaataagcgagcagaacctgtctgactttcggtgaaatgaaatcttagagcgtgtatctgatcgacaaatggccgaagatgttgcgtacgaacaaattctcccaatcccaagtaaccatgatcaaggggaaaataacaagctttgtcatcgggacaagacataaacttgggttgcctggtatctaccgagttcgctgaagttgaatccttttccttcataatcgcaaacgctgatcatccagctgtgcagcatggatcgaaggcgattctggtcgctccatgagcgagtccacatcatcattctgctggctctctgactttgaccgagactgtgagcgaggaatattccacccatcatggaagtcaactgtgatcttatcagctgccctttcgaatgtgtgggtgtccatcagaggccattcgagaacgtctctcccagcggcgttaaagtagagaagtggaaatattgatgatccccagtccggtatttgagtgcgtgttgtatcgatgtagatcgcgaccatgagaagcccagtagtgatggccaccaaaattaccgggaataagagccaattcctgtcaaactctacgcatactgtagtctgccaaaccgtaccaatgacgctttctcgagttgcattaccttgttcgttacgggagagagtggtgccaatttgacgtagtttgttagtgagggaaatagagagacgatccatttgactggaaactgaggcgaagctggcattcccgttattccagagagcttggatccatgacgactcgctgcaaaccaagtaaaaagatctgccaatgttcgactgcagcgaacaaagccctgacaagatatcactcgtaaaggcactgatggattctcccgtgaattgatgcatcttatataggcactcaactggcaccatgaagtcctggttgttgatcgtggtttggagacagttgtgcgccgtgcagagattggagacatttgagcgatcatagagttgtccctgtatgatgcatgggagctttattgccgtgtaattataatttggcgtagtaaggttcagaaatggcagatcatggatgatggtagccggagcttcagaaagaatcgtttcgttgacaacattgctatccacggaaatgtggtagtcacgtagacacgggtacattgaacatgtgacggagagcccacgcagcttatttcgagagctttcgtaacagatttttgcgccagggctgccctcgcagggggtggttgttgcaacataaatattggtagagtaaataaacgattcattaagatcgaggtatgcggacgacagcagtggcgaaatccattcttgaactttcatagaagatatcgacaagccactaggcccatcaatctcgtttgtgttgacccatgccgttaagttatgtgcccatgtaccattgggaaaggtcttctcatagatctgagttgttgtgtcctcacaaatgttacataggcccattgaagaatgtgtaatgcctccgtgctcggtaaatgtgcaattaccagtgacacaggaaactgggacgaatggttgcgagttatcatcaacgggacgggtaagatcgtttaaaagggttgacttgagacttgcttccaattcagcacttccctgattcagccaataatacgaatctaagaggttattggctgtggagagcaatgcgttgttcgaggcgaccatcctccgacaactagtagccctgattgcttgctgggtgaaaggggcaatacctattgcagccacagtgatacatgctccgacagtcacaatgggactcgtgtagacgactggcagtaacttaatcgagccaaaagctcccctcgtagcagagtcaaaccgttgcaagtgtgtcataggtcgtcgtctctcaaaccagtgccatttcatctgactaagaatcccagctacagtggccagtaacgttgtgcgcagtaaagttgcaagtatagcgatgattgtgttgaacgacacgcggctcggccaattgggaaaagtgttcgtgtcgagctgagctaaggtgactgctacagcaccgatgaggctcattgagaacacaag

SEQ ID NO: 26298 - DNA, 1863 bp, Muscodor strobelii
  misc_feature: SGI cDNA ID NO. 568991
  misc_feature: Reduced expression when VOC is produced
  misc_feature: Encodes the peptide sequence at SEQ ID NO 26299
atgtttgtccattcgggtgcgagccttcatggccatgaattttcgtctcgaacatcaactcctggagccactcccaataggcgcaacatgctattgcgatcagcgtttgcaacctcgccgagtcgagcctctacctaccaagacgacgcgcggtcttatttcgatcatcagccctctccttctgagttgaagaagtcaaagacccttgctgagtcctcgcgtcccacagatgccggcttcgtgcgcttcgaagagccaaaagcagaggcgccgacgtcccaacttgaagcaatgagcgaagatgaaggatctgtaactggcagcgatgtaagtcgagtgtcatcaattagacggagccgtcggatctcgaatcgcgcaagcaagacgtacgtcttggcccatccaccaccaaagctacgtaccaagcagcggattctgcacgtgcggccgaatctgctgcttcaaatgcagcaagtttcgtccggtcagcgtccgactcctaccattgatgtctatccggcttctgtgttcgcccgatccatcattgcacctctgctcaggcgctttcctcgcattgcacggattaaacgggaactgggtatacaagatatcatgttggtgaaaagtgaggattatgcacctcaacactcaggctccgagagtgattgcgatgaagatggcattatgtcgcgcgaactactggctatcctgagtcctctgcaagccgaggacaaagcagagatcgttctcgctgacggtactatctgggttgctaagacacgctcaaatggaaacgcattttcttacgagttcgtatccatcgatgcaggcggtaatactactacagttagatgggttcgcagacaagtggcaccaacctcgttgcctggtacgcctacgtcgcctgtaccgtctcctatcaagtctcattcgcccgactataagttcacgttcagcgttatcgacccagattgtcgacgtcatccaattttggccacgctgactagttcttccctgaacatatgtgattcctatactaccgtctcccagtccgctaacaagcatccacctacatctatagcatttgcaccctcgaagatctcggcaggtagtgaaataatttcaacagaaaggagaacgcaaccggtcgaagagtggcacaagtctttgatcatgatatcagcagtttgggtgactctccgccatggttgggcgccgaacttcaggcctgaagaccttatgccgtcacgagcggcgacagacgtcgcaggcgccgcccctggccgtcgtcgatctctcagcgcgagcgctgattcttcgccaacgtcactcaattcagaacagggttgtcgtcgcaagaatacatctagccctcgagcccaagaactacgatctgccaccggggttcccagacgagcaacatctaccggagctgctttcatccagaaacgacgagcaattcagcgagagagtgatgaccaatcaacgggtagcgaacaggatcgatcgtccaagttcagtcggcgtgcacttagtggtgactggcaccttgggttgaaacgaacccgagagaagtcattatcagagattacggatatgtctcccgctatcagtccggatcacactgctccaactcttgcaccagctccataccccagcggccgtcgtgttgtgtcaatgtatgcaccatattctggaagtgcagataatcgcgatacgagtccaaacaagatatatggttatctaccagagtttgaaccagagtcgccgcctgataaagctgacgagaatatggcgaaaagcagacgcttacagaaatggaaacacatgacaaattggttccgcaagttttcagcccgatag

SEQ ID NO: 26299 - protein, 620 aa, Muscodor strobelii
  misc_feature: SGI Peptide ID NO. 568991
  misc_feature (1)..(617): NCBI GI: 145611124 Blast Desc: MGG_00635 [Magnaporthe grisea 70-15] gi|145018450|gb|EDK02729.1| MGG_00635 [Magnaporthe grisea 70-15]
  misc_feature (1)..(499): NCBI GI: 171682262 Blast Desc: protein product [Podospora anserina] gi|170941090|emb|CAP66740.1| protein product [Podospora anserina]
  misc_feature (1)..(498): NCBI GI: 164428265 Blast Desc: NCU05958 [Neurospora crassa OR74A] gi|157072079|gb|EAA29336.2| [Neurospora crassa OR74A]
  misc_feature (1)..(493): NCBI GI: 256727186 Blast Desc: NECHADRAFT_34362 [Nectria haematococca mpVI 77-13-4]
  misc_feature (1)..(359): NCBI GI: 116202365 Blast Desc: CHGG_09067 [Chaetomium globosum CBS 148.51] gi|88177585|gb|EAQ85053.1| CHGG_09067 [Chaetomium globosum CBS 148.51]
  misc_feature (1)..(402): NCBI GI: 46124081 Blast Desc: FG06418.1 [Gibberella zeae PH-1]
  misc_feature (1)..(289): NCBI GI: 156064293 Blast Desc: SS1G_00154 [Sclerotinia sclerotiorum 1980] gi|154691016|gb|EDN90754.1| SS1G_00154 [Sclerotinia sclerotiorum 1980]
  misc_feature (124)..(483): NCBI GI: 121707965 Blast Desc: conserved [Aspergillus clavatus NRRL 1] gi|119400138|gb|EAW10564.1| conserved [Aspergillus clavatus NRRL 1]
  misc_feature (111)..(486): NCBI GI: 145257957 Blast Desc: An04g05360 [Aspergillus niger] gi|134074504|emb|CAK38798.1| protein product [Aspergillus niger]
  misc_feature (99)..(486): NCBI GI: 169771443 Blast Desc: [Aspergillus oryzae RIB40] gi|83768050|dbj|BAE58189.1| protein product [Aspergillus oryzae]
  misc_feature: Useful for introducing or modulating the production of volatile compounds
MFVHSGASLHGHEFSSRTSTPGATPNRRNMLLRSAFATSPSRASTYQDDARSYFDHQPSPSELKKSKTLAESSRPTDAGFVRFEEPKAEAPTSQLEAMSEDEGSVTGSDVSRVSSIRRSRRISNRASKTYVLAHPPPKLRTKQRILHVRPNLLLQMQQVSSGQRPTPTIDVYPASVFARSIIAPLLRRFPRIARIKRELGIQDIMLVKSEDYAPQHSGSESDCDEDGIMSRELLAILSPLQAEDKAEIVLADGTIWVAKTRSNGNAFSYEFVSIDAGGNTTTVRWVRRQVAPTSLPGTPTSPVPSPIKSHSPDYKFTFSVIDPDCRRHPILATLTSSSLNICDSYTTVSQSANKHPPTSIAFAPSKISAGSEIISTERRTQPVEEWHKSLIMISAVWVTLRHGWAPNFRPEDLMPSRAATDVAGAAPGRRRSLSASADSSPTSLNSEQGCRRKNTSSPRAQELRSATGVPRRATSTGAAFIQKRRAIQRESDDQSTGSEQDRSSKFSRRALSGDWHLGLKRTREKSLSEITDMSPAISPDHTAPTLAPAPYPSGRRVVSMYAPYSGSADNRDTSPNKIYGYLPEFEPESPPDKADENMAKSRRLQKWKHMTNWFRKFSAR

SEQ ID NO: 26300 - DNA, 3213 bp, Muscodor strobelii
  misc_feature: SGI EST ID NO. CUFF.62006.0
  misc_feature: Variant of the nucleotide sequence at SEQ ID NO 26298
gggtaggtacgtagatacatgcaaagaagccgacccagagaagctaggatgcgaatctgccaattcgcgtctcttggctgcaatacggatacgatcgcattcatcgacagggatctcaccacctcttgacttcctgatccagggtttctcctgtccagcctgccgacattgatcacttttacgccatctttcgacttccaacttacttgcaagtaactcttagcttcatctccagggcgggcgcagcgcgttgtcattatccttctcactttcgtacatctctcaaccattaccttcctccagtgatcttggctgttgccagaactgtccttactaccttacctaacctttcgtgcttcatactccttggaatcgacccctcggtgtgtaagagcacctacagacctggacctacaattattgctacgacattttctagcctcacgatcgttacgaatcgatttaaacacggctcctacatcttcctgtgactcttcaactcactaggagctattttacctaactgcgtgcctcggtatcaacttcgctagtcgttgttagtgaaacatccgcagactacgtactccaagtttaaataaatagacgtctctgatagaaagccaactttctaccccgcgaaacgtcatcatacgcacggccagcaaccttgtgcttataagataggcctgactcttctgcaagtggctggacgcgccatcattcgaggcccttttagcttgaaccctcgactgctcacgcggcctcaggtcatgatctggattcgccgactcacattgtgccggactccaaactgcagcgatactttatagtggtggtatagtgctctgggcgcgccgatcatttcattctcgatgtgaagcccgagatgtttgtccattcgggtgcgagccttcatggccatgaattttcgtctcgaacatcaactcctggagccactcccaataggcgcaacatgctattgcgatcagcgtttgcaacctcgccgagtcgagcctctacctaccaagacgacgcgcggtcttatttcgatcatcagccctctccttctgagttgaagaagtcaaagacccttgctgagtcctcgcgtcccacagatgccggcttcgtgcgcttcgaagagccaaaagcagaggcgccgacgtcccaacttgaagcaatgagcgaagatgaaggatctgtaactggcagcgatgtaagtcgagtgtcatcaattagacggagccgtcggatctcgaatcgcgcaagcaagacgtacgtcttggcccatccaccaccaaagctacgtaccaagcagcggattctgcacgtgcggccgaatctgctgcttcaaatgcagcaagtttcgtccggtcagcgtccgactcctaccattgatgtctatccggcttctgtgttcgcccgatccatcattgcacctctgctcaggcgctttcctcgcattgcacggattaaacgggaactgggtatacaagatatcatgttggtgaaaagtgaggattatgcacctcaacactcaggctccgagagtgattgcgatgaagatggcattatgtcgcgcgaactactggctatcctgagtcctctgcaagccgaggacaaagcagagatcgttctcgctgacggtactatctgggttgctaagacacgctcaaatggaaacgcattttcttacgagttcgtatccatcgatgcaggcggtaatactactacagttagatgggttcgcagacaagtggcaccaacctcgttgcctggtacgcctacgtcgcctgtaccgtctcctatcaagtctcattcgcccgactataagttcacgttcagcgttatcgacccagattgtcgacgtcatccaattttggccacgctgactagttcttccctgaacatatgtgattcctatactaccgtctcccagtccgctaacaagcatccacctacatctatagcatttgcaccctcgaagatctcggcaggtagtgaaataatttcaacagaaaggagaacgcaaccggtcgaagagtggcacaagtctttgatcatgatatcagcagtttgggtgactctccgccatggttgggcgccgaacttcaggcctgaagaccttatgccgtcacgagcggcgacagacgtcgcaggcgccgcccctggccgtcgtcgatctctcagcgcgagcgctgattcttcgccaacgtcactcaattcagaacagggttgtcgtcgcaagaatacatctagccctcgagcccaagaactacgatctgccaccggggttcccagacgagcaacatctaccggagctgctttcatccagaaacgacgagcaattcagcgagagagtgatgaccaatcaacgggtagcgaacaggatcgatcgtccaagttcagtcggcgtgcacttagtggtgactggcaccttgggttgaaacgaacccgagagaagtcattatcagagattacggatatgtctcccgctatcagtccggatcacactgctccaactcttgcaccagctccataccccagcggccgtcgtgttgtgtcaatgtatgcaccatattctggaagtgcagataatcgcgatacgagtccaaacaagatatatggttatctaccagagtttgaaccagagtcgccgcctgataaagctgacgagaatatggcgaaaagcagacgcttacagaaatggaaacacatgacaaattggttccgcaagttttcagcccgataggattgctgctacatgcgcagtgagcacagtccatgtgagtcgggaaagaaggctataaggcgtctcaatcggaagatgacagcaaattgcgatcgccgtcgataccggcgccgagtccgtgttgtgctcgggacaagttgaccaagctccgaaccatagatggagatgggtgtattatactataagaaacgggaactgtaacaacacttgtatgcacgaagaggctggacttttttgagggatactttagcattggtcaaagaggacaagcataccgggcatcgcacagctcgcattggcgttacttgggagtataaggatcaatggattttgtatttggggcgtttcgcatagactaggcaggtagactgctgaaacttccgacttgaagtccgcaataggctgagtgtagtttcatagcacaatcagaatatgttaacaaagaaaggaagaccatacgtgtg

SEQ ID NO: 26301 - DNA, 1476 bp, Muscodor strobelii
  misc_feature: SGI cDNA ID NO. 568992
  misc_feature: Encodes the peptide sequence at SEQ ID NO 26302
atggcgacgatccaccagaacggcgcctcaagcaccgccgtcatggagctgcagccgatgtcaccactccaactgccaggaaaagatatcagcgacaactccacgcccaacaatgcgggtacgccgatgagacaattgagcaccgagggacataggctgagctcgggctcgttgccgtccccgattacggcggcggaggtcaaagagcgatggaattatccccgcgccaacgtcccaagggtcgcagcttgcttttatagcttcattgttatgggggctaatgacgctgcttatggtcctcttgtgccttatctgcaagaatactaccatctctcgtacttaatcgtatctctcatctttctctcacccttcatcgggtacacgctcgccgcattcctcaactcacggcttcacctctccatcgggcaacggggtgttgcgctcacgtcatgtttctcgcatctcgtagcatacatcgtcatcgctgttcatccgccatatccagtgcttgtcgttgcattcgctcttgcgggttttggaaatggtgtcgctgatgcggcttggaatgcgttcattggaaatctagaccgagctaatgagctcctggggtttctacacgggttgtacggcgcaggagctgtcgttagcccgcttgtcgctacggcatttattaccaaagtgggtctgccgtggtattatttttactacctcatggttcgtcgctattccctccttcgtctcttctcctatttctactctaacatgggatcacagatcggccttgctggtcttgaacttgtatcagcaactctaggattttggtcctcgacagcagaagtgtaccgagagcatatcgctcacagcgctggtggctcatctggaggcggtttgaaggaagctttgttccataaaccaggggcccgtgtgacatggctgtgttccatcttcttgctaggctatgtaggcatcgaggtctcactcggtggctggatcgtcgagttcatgatacaagtccgacacggtggtgcttttgagagcggtcttactgcgacgggcttctggcttggactcacggtcgggcgggtggtattgggtttcgttactccgagaatcggcgaaaaactcgctatcatgatatatctcccgatcaccatgggccttgaactcctcttctggcttgtgcctcaattcatcgtgtccgcggtcgcaattgggctacaagggttcttcatcggtccattattccctgcggccatcgtcgcgatgtcaaagcttcttccccggcacctccacgttggtgctatcggcttcgcagcggcgtttggcggtagtggtgccgcggttctgccatttgctgtcggtgcgattgcacaggcgaagggtgtacaggttctacagcccatcatacttgcgctgctcgcggcgatctttatcgtctggtgtggcctacctagaattgggaagaagaaggagtag

SEQ ID NO: 26302 - protein, 491 aa, Muscodor strobelii
  misc_feature: SGI Peptide ID NO. 568992
  misc_feature (84)..(450): Pfam Id: PF07690 Pfam Desc: Major Facilitator Superfamily
  misc_feature (5)..(491): NCBI GI: 189189700 Blast Desc: conserved [Pyrenophora tritici-repentis Pt-1C-BFP] gi|187972795|gb|EDU40294.1| conserved [Pyrenophora tritici-repentis Pt-1C-BFP]
  misc_feature (42)..(491): NCBI GI: 255943945 Blast Desc: Pc20g01810 [Penicillium chrysogenum Wisconsin 54-1255] gi|211587475|emb|CAP85510.1| Pc20g01810 [Penicillium chrysogenum Wisconsin 54-1255]
  misc_feature (6)..(491): NCBI GI: 242802937 Blast Desc: MFS transporter, [Talaromyces stipitatus ATCC 10500] gi|218717419|gb|EED16840.1| MFS transporter, [Talaromyces stipitatus ATCC 10500]
  misc_feature (27)..(469): NCBI GI: 145612880 Blast Desc: MGG_08369 [Magnaporthe grisea 70-15] gi|145019977|gb|EDK04205.1| MGG_08369 [Magnaporthe grisea 70-15]
  misc_feature (9)..(491): NCBI GI: 256726086 Blast Desc: NECHADRAFT_81633 [Nectria haematococca mpVI 77-13-4]
  misc_feature (10)..(491): NCBI GI: 212540066 Blast Desc: MFS transporter, [Penicillium marneffei ATCC 18224] gi|210067487|gb|EEA21579.1| MFS transporter, [Penicillium marneffei ATCC 18224]
  misc_feature (66)..(491): NCBI GI: 46111613 Blast Desc: FG02688.1 [Gibberella zeae PH-1]
  misc_feature (10)..(491): NCBI GI: 169607421 Blast Desc: SNOG_06766 [Phaeosphaeria nodorum SN15] gi|160701404|gb|EAT85417.2| SNOG_06766 [Phaeosphaeria nodorum SN15]
  misc_feature (9)..(491): NCBI GI: 258567570 Blast Desc: conserved [Uncinocarpus reesii 1704] gi|237905975|gb|EEP80376.1| conserved [Uncinocarpus reesii 1704]
  misc_feature (11)..(490): NCBI GI: 256726306 Blast Desc: [Nectria haematococca mpVI 77-13-4]
MATIHQNGASSTAVMELQPMSPLQLPGKDISDNSTPNNAGTPMRQLSTEGHRLSSGSLPSPITAAEVKERWNYPRANVPRVAACFYSFIVMGANDAAYGPLVPYLQEYYHLSYLIVSLIFLSPFIGYTLAAFLNSRLHLSIGQRGVALTSCFSHLVAYIVIAVHPPYPVLVVAFALAGFGNGVADAAWNAFIGNLDRANELLGFLHGLYGAGAVVSPLVATAFITKVGLPWYYFYYLMVRRYSLLRLFSYFYSNMGSQIGLAGLELVSATLGFWSSTAEVYREHIAHSAGGSSGGGLKEALFHKPGARVTWLCSIFLLGYVGIEVSLGGWIVEFMIQVRHGGAFESGLTATGFWLGLTVGRVVLGFVTPRIGEKLAIMIYLPITMGLELLFWLVPQFIVSAVAIGLQGFFIGPLFPAAIVAMSKLLPRHLHVGAIGFAAAFGGSGAAVLPFAVGAIAQAKGVQVLQPIILALLAAIFIVWCGLPRIGKKKE

SEQ ID NO: 26303 - DNA, 2222 bp, Muscodor strobelii
  misc_feature: SGI EST ID NO. CUFF.62024.0
  misc_feature: Variant of the nucleotide sequence at SEQ ID NO 26301
tgagcgggtgacatgcgacagtcaatcttacataaaactccagctataagcacataatcaggtcgaactcattaagtcaacaacaggcctcaagatcgacagctatcggcaaactacgacgtttacccgggcggagcttccgaatatggtggaatatggggaaagccaagagacataccacttcgcgcaagcttctaatgactaacgcggcgagtcggcggagtttttgttttgaggttcccgtctagaatgaaatttgttattaaatattgcggagaagtataaaagaactgtttcaaatcatagaatattcttctgttgactaaaattgttgtttgaattgaagtgattgctggtagcgaaggtacgacactcgatctcttgcgatcttggagaagcataagacgaggtgcgatttccggccctcttgcagaggcactgacgagagcgtcatctcgagacgactcggctcccgaaaattgacccatttggaaacttcaatcctcaaacagcaatttcagctgccaactaacaacacatcatcctaaaccccaggatggcgacgatccaccagaacggcgcctcaagcaccgccgtcatggagctgcagccgatgtcaccactccaactgccaggaaaagatatcagcgacaactccacgcccaacaatgcgggtacgccgatgagacaattgagcaccgagggacataggctgagctcgggctcgttgccgtccccgattacggcggcggaggtcaaagagcgatggaattatccccgcgccaacgtcccaagggtcgcagcttgcttttatagcttcattgttatgggggctaatgacgctgcttatggtcctcttgtgccttatctgcaagaatactaccatctctcgtacttaatcgtatctctcatctttctctcacccttcatcgggtacacgctcgccgcattcctcaactcacggcttcacctctccatcgggcaacggggtgttgcgctcacgtcatgtttctcgcatctcgtagcatacatcgtcatcgctgttcatccgccatatccagtgcttgtcgttgcattcgctcttgcgggttttggaaatggtgtcgctgatgcggcttggaatgcgttcattggaaatctagaccgagctaatgagctcctggggtttctacacgggttgtacggcgcaggagctgtcgttagcccgcttgtcgctacggcatttattaccaaagtgggtctgccgtggtattatttttactacctcatgatcggccttgctggtcttgaacttgtatcagcaactctaggattttggtcctcgacagcagaagtgtaccgagagcatatcgctcacagcgctggtggctcatctggaggcggtttgaaggaagctttgttccataaaccaggggcccgtgtgacatggctgtgttccatcttcttgctaggctatgtaggcatcgaggtctcactcggtggctggatcgtcgagttcatgatacaagtccgacacggtggtgcttttgagagcggtcttactgcgacgggcttctggcttggactcacggtcgggcgggtggtattgggtttcgttactccgagaatcggcgaaaaactcgctatcatgatatatctcccgatcaccatgggccttgaactcctcttctggcttgtgcctcaattcatcgtgtccgcggtcgcaattgggctacaagggttcttcatcggtccattattccctgcggccatcgtcgcgatgtcaaagcttcttccccggcacctccacgttggtgctatcggcttcgcagcggcgtttggcggtagtggtgccgcggttctgccatttgctgtcggtgcgattgcacaggcgaagggtgtacaggttctacagcccatcatacttgcgctgctcgcggcgatctttatcgtctggtgtggcctacctagaattgggaagaagaaggagtagtatgagatatccatgaagaaagactgatggtcattaggcttacacagcagggtttattaacactgcttctagatgcagggccacaagtctttgattgtggcataggcaatcatgtgatgtgtgcagtacttctagcttcgtcttgtctgaggaagaccgcatagtttcccagccccgtcatgccatagtctcgttacccaattaaaatcatgctgtgtactatcaagccaccgtcaatatcctattttcg

SEQ ID NO: 26304 - DNA, 1416 bp, Muscodor strobelii
  misc_feature: SGI cDNA ID NO. 568993
  misc_feature: Encodes the peptide sequence at SEQ ID NO 26305
atggcgacgatccaccagaacggcgcctcaagcaccgccgtcatggagctgcagccgatgtcaccactccaactgccaggaaaagatatcagcgacaactccacgcccaacaatgcgggtacgccgatgagacaattgagcaccgagggacataggctgagctcgggctcgttgccgtccccgattacggcggcggaggtcaaagagcgatggaattatccccgcgccaacgtcccaagggtcgcagcttgcttttatagcttcattgttatgggggctaatgacgctgcttatggtcctcttgtgccttatctgcaagaatactaccatctctcgtacttaatcgtatctctcatctttctctcacccttcatcgggtacacgctcgccgcattcctcaactcacggcttcacctctccatcgggcaacggggtgttgcgctcacgtcatgtttctcgcatctcgtagcatacatcgtcatcgctgttcatccgccatatccagtgcttgtcgttgcattcgctcttgcgggttttggaaatggtgtcgctgatgcggcttggaatgcgttcattggaaatctagaccgagctaatgagctcctggggtttctacacgggttgtacggcgcaggagctgtcgttagcccgcttgtcgctacggcatttattaccaaagtgggtctgccgtggtattatttttactacctcatgatcggccttgctggtcttgaacttgtatcagcaactctaggattttggtcctcgacagcagaagtgtaccgagagcatatcgctcacagcgctggtggctcatctggaggcggtttgaaggaagctttgttccataaaccaggggcccgtgtgacatggctgtgttccatcttcttgctaggctatgtaggcatcgaggtctcactcggtggctggatcgtcgagttcatgatacaagtccgacacggtggtgcttttgagagcggtcttactgcgacgggcttctggcttggactcacggtcgggcgggtggtattgggtttcgttactccgagaatcggcgaaaaactcgctatcatgatatatctcccgatcaccatgggccttgaactcctcttctggcttgtgcctcaattcatcgtgtccgcggtcgcaattgggctacaagggttcttcatcggtccattattccctgcggccatcgtcgcgatgtcaaagcttcttccccggcacctccacgttggtgctatcggcttcgcagcggcgtttggcggtagtggtgccgcggttctgccatttgctgtcggtgcgattgcacaggcgaagggtgtacaggttctacagcccatcatacttgcgctgctcgcggcgatctttatcgtctggtgtggcctacctagaattgggaagaagaaggagtag

SEQ ID NO: 26305 - protein, 471 aa, Muscodor strobelii
  misc_feature: SGI Peptide ID NO. 568993
  misc_feature (84)..(430): Pfam Id: PF07690 Pfam Desc: Major Facilitator Superfamily
  misc_feature (5)..(471): NCBI GI: 189189700 Blast Desc: conserved [Pyrenophora tritici-repentis Pt-1C-BFP] gi|187972795|gb|EDU40294.1| conserved [Pyrenophora tritici-repentis Pt-1C-BFP]
  misc_feature (42)..(471): NCBI GI: 255943945 Blast Desc: Pc20g01810 [Penicillium chrysogenum Wisconsin 54-1255] gi|211587475|emb|CAP85510.1| Pc20g01810 [Penicillium chrysogenum Wisconsin 54-1255]
  misc_feature (6)..(471): NCBI GI: 242802937 Blast Desc: MFS transporter, [Talaromyces stipitatus ATCC 10500] gi|218717419|gb|EED16840.1| MFS transporter, [Talaromyces stipitatus ATCC 10500]
  misc_feature (27)..(449): NCBI GI: 145612880 Blast Desc: MGG_08369 [Magnaporthe grisea 70-15] gi|145019977|gb|EDK04205.1| MGG_08369 [Magnaporthe grisea 70-15]
  misc_feature (9)..(471): NCBI GI: 256726086 Blast Desc: NECHADRAFT_81633 [Nectria haematococca mpVI 77-13-4]
  misc_feature (10)..(471): NCBI GI: 212540066 Blast Desc: MFS transporter, [Penicillium marneffei ATCC 18224] gi|210067487|gb|EEA21579.1| MFS transporter, [Penicillium marneffei ATCC 18224]
  misc_feature (66)..(471): NCBI GI: 46111613 Blast Desc: FG02688.1 [Gibberella zeae PH-1]
  misc_feature (10)..(471): NCBI GI: 169607421 Blast Desc: SNOG_06766 [Phaeosphaeria nodorum SN15] gi|160701404|gb|EAT85417.2| SNOG_06766 [Phaeosphaeria nodorum SN15]
  misc_feature (9)..(471): NCBI GI: 258567570 Blast Desc: conserved [Uncinocarpus reesii 1704] gi|237905975|gb|EEP80376.1| conserved [Uncinocarpus reesii 1704]
  misc_feature (11)..(470): NCBI GI: 256726306 Blast Desc: [Nectria haematococca mpVI 77-13-4]
MATIHQNGASSTAVMELQPMSPLQLPGKDISDNSTPNNAGTPMRQLSTEGHRLSSGSLPSPITAAEVKERWNYPRANVPRVAACFYSFIVMGANDAAYGPLVPYLQEYYHLSYLIVSLIFLSPFIGYTLAAFLNSRLHLSIGQRGVALTSCFSHLVAYIVIAVHPPYPVLVVAFALAGFGNGVADAAWNAFIGNLDRANELLGFLHGLYGAGAVVSPLVATAFITKVGLPWYYFYYLMIGLAGLELVSATLGFWSSTAEVYREHIAHSAGGSSGGGLKEALFHKPGARVTWLCSIFLLGYVGIEVSLGGWIVEFMIQVRHGGAFESGLTATGFWLGLTVGRVVLGFVTPRIGEKLAIMIYLPITMGLELLFWLVPQFIVSAVAIGLQGFFIGPLFPAAIVAMSKLLPRHLHVGAIGFAAAFGGSGAAVLPFAVGAIAQAKGVQVLQPIILALLAAIFIVWCGLPRIGKKKE

SEQ ID NO: 26306 - DNA, 2222 bp, Muscodor strobelii; identical to SEQ ID NO: 26303
  misc_feature: SGI EST ID NO. CUFF.62024.0
  misc_feature: Variant of the nucleotide sequence at SEQ ID NO 26304

SEQ ID NO: 26307 - DNA, 951 bp, Muscodor strobelii
  misc_feature: SGI cDNA ID NO. 568994
  misc_feature: Reduced expression when VOC is produced
  misc_feature: Encodes the peptide sequence at SEQ ID NO 26308
atgctacgcacgagattaaggataccgcgggctggcggtctcttccgcccagcgcccgccactcgttccatccacctgatgcccaagtcggatttcgaccagctgcaggaggtgcccatgttcctgtctcccgccgcctacaacatggcctggaccgactacatgaatctcatgatcaaggaactgaatgcgcggacctcaggcaccgaaaactacgacaaaagtactctgcagatcgtacagaacgtagcgcgagacccctcacaagctgccctcttcaaccatgcctcgatggcctggaataatagcttcttcttcagacaactacgcaatgcctcgattcccgcgaaacaatccgccccaggacagcaaccgcccgaaacgacgcagacagatggccaaacgcccgcgccgatgcccgccgagatgaagcaaaacgaggactacatgcacgacgacctccgcagcgccatcaacactcacttcagctctgtcgagaccctgcgacgtgagctctactttactgccatgagcatgttcggccctggcttcgtgtggctcgtcaagaaggcccattccaaccagatgagcatcctggtcacatatctggccggatcgccgttcaccgctgcgcattggcggcggcagggcctcgacatgaacacatcctctgccgactcgggctcagcgacagaatacttcgagcgcaataaggcaggcgccgaaggcaccaatagcggcaaattcctgaattctgccgccacggcccctggcggcgtcgacgtcgttcctctcctctgcctcaacacatgggaacacgtatggatgcgagactacggagtggccggcaagagcaactatgtcctaaactggtgggaggtcattgattgggagaaggtctatgggctttggaagacggccaagaagaacgaattcgagggcttagcctag

SEQ ID NO: 26308 - protein, 316 aa, Muscodor strobelii
  misc_feature: SGI Peptide ID NO. 568994
  misc_feature (1)..(300): NCBI GI: 46125383 Blast Desc: FG07069.1 [Gibberella zeae PH-1]
  misc_feature (1)..(300): NCBI GI: 256733059 Blast Desc: [Nectria haematococca mpVI 77-13-4]
  misc_feature (25)..(300): NCBI GI: 85091391 Blast Desc: NCU07386 [Neurospora crassa OR74A] gi|28920268|gb|EAA29643.1| [Neurospora crassa OR74A]
  misc_feature (5)..(300): NCBI GI: 156057073 Blast Desc: SS1G_04267 [Sclerotinia sclerotiorum 1980] gi|154702053|gb|EDO01792.1| SS1G_04267 [Sclerotinia sclerotiorum 1980]
  misc_feature (8)..(300): NCBI GI: 189193855 Blast Desc: conserved [Pyrenophora tritici-repentis Pt-1C-BFP] gi|187978830|gb|EDU45456.1| conserved [Pyrenophora tritici-repentis Pt-1C-BFP]
  misc_feature (1)..(300): NCBI GI: 116180724 Blast Desc: CHGG_00990 [Chaetomium globosum CBS 148.51] gi|88185287|gb|EAQ92755.1| CHGG_00990 [Chaetomium globosum CBS 148.51]
  misc_feature (14)..(300): NCBI GI: 261192033 Blast Desc: Fe superoxide dismutase [Ajellomyces dermatitidis SLH14081] gi|239589740|gb|EEQ72383.1| Fe superoxide dismutase [Ajellomyces dermatitidis SLH14081]
  misc_feature (49)..(300): NCBI GI: 258577147 Blast Desc: conserved [Uncinocarpus reesii 1704] gi|237903021|gb|EEP77422.1| conserved [Uncinocarpus reesii 1704]
  misc_feature (14)..(300): NCBI GI: 239608524 Blast Desc: Fe superoxide dismutase [Ajellomyces dermatitidis ER-3]
  misc_feature (5)..(303): NCBI GI: 154290720 Blast Desc: BC1G_15279 [Botryotinia fuckeliana B05.10] gi|150847435|gb|EDN22628.1| BC1G_15279 [Botryotinia fuckeliana B05.10]
  misc_feature: Useful for introducing or modulating the production of volatile compounds
MLRTRLRIPRAGGLFRPAPATRSIHLMPKSDFDQLQEVPMFLSPAAYNMAWTDYMNLMIKELNARTSGTENYDKSTLQIVQNVARDPSQAALFNHASMAWNNSFFFRQLRNASIPAKQSAPGQQPPETTQTDGQTPAPMPAEMKQNEDYMHDDLRSAINTHFSSVETLRRELYFTAMSMFGPGFVWLVKKAHSNQMSILVTYLAGSPFTAAHWRRQGLDMNTSSADSGSATEYFERNKAGAEGTNSGKFLNSAATAPGGVDVVPLLCLNTWEHVWMRDYGVAGKSNYVLNWWEVIDWEKVYGLWKTAKKNEFEGLA

SEQ ID NO: 26309 - DNA, 1477 bp, Muscodor strobelii
  misc_feature: SGI EST ID NO. CUFF.62022.0
  misc_feature: Variant of the nucleotide sequence at SEQ ID NO 26307
gcggtctcaacatcatcatcactggtattacggattgacgagttccaacctccacagccatgctacgcacgagattaaggataccgcgggctggcggtctcttccgcccagcgcccgccactcgttccatccacctgatgcccaagtcggatttcgaccagctgcaggaggtgcccatgttcctgtctcccgccgcctacaacatggcctggaccgactacatgaatctcatgatcaaggaactgaatgcgcggacctcaggcaccgaaaactacgacaaaagtactctgcagatcgtacagaacgtagcgcgagacccctcacaagctgccctcttcaaccatgcctcgatggcctggaataatagcttcttcttcagacaactacgcaatgcctcgattcccgcgaaacaatccgccccaggacagcaaccgcccgaaacgacgcagacagatggccaaacgcccgcgccgatgcccgccgagatgaagcaaaacgaggactacatgcacgacgacctccgcagcgccatcaacactcacttcagctctgtcgagaccctgcgacgtgagctctactttactgccatgagcatgttcggccctggcttcgtgtggctcgtcaagaaggcccattccaaccagatgagcatcctggtcacatatctggccggatcgccgttcaccgctgcgcattggcggcggcagggcctcgacatgaacacatcctctgccgactcgggctcagcgacagaatacttcgagcgcaataaggcaggcgccgaaggcaccaatagcggcaaattcctgaattctgccgccacggcccctggcggcgtcgacgtcgttcctctcctctgcctcaacacatgggaacacgtatggatgcgagactacggagtggccggcaagagcaactatgtcctaaactggtgggaggtcattgattgggagaaggtctatgggctttggaagacggccaagaagaacgaattcgagggcttagcctagagcgcaatctgtctggaaaggcatagtatactccttgtacaatatctagaccgagcctctctccgagataggaggttgagctcttgtgtatacctgttcatgtatttggactcaaatgtactatttcaacacacgagaatctgtcgctcttggctacaactcggcctggggggttagtggcagcatgaccctttcccgtgtgggattgagttatcttgatagacttcggatcctcttgctctccaagggccggtagtatagcatgcatgctgagatccgattgaatctgaagtctcagatggcatttcgccccgaacctgtctgcagacctgtcttagcatctaagacatttccgcatgctacatatttgtaaattcccgaagcgtcaagtcaactctcccaaaacgggactcgcaaccactagctaaatcaattcattccatgaagctctggtgactccatatcag

SEQ ID NO: 26310 - DNA, 1182 bp, Muscodor strobelii
  misc_feature: SGI cDNA ID NO. 568995
  misc_feature: Reduced expression when VOC is produced
  misc_feature: Encodes the peptide sequence at SEQ ID NO 26311
atggcgaattcaaacatcccgtcaccaaatccccagcaggtcatcggccctctaataccgtcgctacccgccgccgctgtgtcacttcgaccttcagattcagtgttgcctcttctcacgccaatcctacagcaacgagtgaacctattatcattcaactcaagcaatgatccttggatccggctgctatgttatgagccgtccaaggtaccaaagctggcggagatcgcccaaagcgagcggctagagccacatcccgtctccggtgaagttgagatcgattgggattacgacagcgagatccgctatcgacgcgtggatgaggagactctgcaggcgcttgtagtgctcaacgaaatggaacttgtctttcgcctcttatactgtgttggcgactctgagcaaaaaaccggctggaaggtcgcagaggtcagcgtgactgaaaaaccttcatccttctcgtctttcggcggagtttcaacgattgctgaggccgaacgacaattcagcgagtccaagaacaaaattgccaccaaaccatccgcttcggcttaccaaccttcatacttgaaagctacgcccatggatgaagatgatgatgacgacgattattgggcgagatatgatgctactcctgggaataaaaccccggctacaaagcggtcaccagcgccccagacaatgcggacaaataacaacggtaattttgcttctgctgaagatgcatacttcgctcagtatgatagcgttcagcctgccatggacaaccacgatccggatgaggaagtagacatttcgccacccttgggcctagcgcacgcagctcccaacgccgcaccatatgagggccagaatggagaggaagaggataatgggattcaggagtcctggacattggcagagcctcctagatcgagctcaacgcactcgcgcagcggcgacgacccagccttggttcatcctcaccctcgaccagcatcgagcgcggattcccattcatcggtagaaaagcttgaagctgcggcagcacgacaagagcagaacgatttcggggttaagcaacacgtttcacgaagtatcaagagtctgttcatgttatcgagagcttccgggatcgatcgcgaggaattcgaaagtatggtgaagacggagctcgacatgctcaatctgatggaggactga

SEQ ID NO: 26311 - protein, 393 aa, Muscodor strobelii
  misc_feature: SGI Peptide ID NO. 568995
  misc_feature (1)..(393): NCBI GI: 256735161 Blast Desc: NECHADRAFT_74716 [Nectria haematococca mpVI 77-13-4]
  misc_feature (1)..(393): NCBI GI: 46108314 Blast Desc: FG01039.1 [Gibberella zeae PH-1]
  misc_feature (1)..(393): NCBI GI: 171687563 Blast Desc: protein product [Podospora anserina] gi|170943743|emb|CAP69395.1| protein product [Podospora anserina]
  misc_feature (4)..(393): NCBI GI: 116180722 Blast Desc: CHGG_00989 [Chaetomium globosum CBS 148.51] gi|88185286|gb|EAQ92754.1| CHGG_00989 [Chaetomium globosum CBS 148.51]
  misc_feature (1)..(393): NCBI GI: 39974727 Blast Desc: MGG_00490 [Magnaporthe grisea 70-15] gi|145018614|gb|EDK02893.1| MGG_00490 [Magnaporthe grisea 70-15]
  misc_feature (3)..(393): NCBI GI: 261356085 Blast Desc: conserved [Verticillium albo-atrum VaMs.102]
  misc_feature (1)..(393): NCBI GI: 164424293 Blast Desc: NCU07385 [Neurospora crassa OR74A] gi|157070454|gb|EAA29642.2| conserved [Neurospora crassa OR74A]
  misc_feature (3)..(393): NCBI GI: 154295047 Blast Desc: BC1G_13652 [Botryotinia fuckeliana B05.10] gi|150844428|gb|EDN19621.1| BC1G_13652 [Botryotinia fuckeliana B05.10]
  misc_feature (6)..(391): NCBI GI: 225679236 Blast Desc: conserved [Paracoccidioides brasiliensis Pb03]
  misc_feature (6)..(391): NCBI GI: 226290945 Blast Desc: conserved [Paracoccidioides brasiliensis Pb18]
  misc_feature: Useful for introducing or modulating the production of volatile compounds
MANSNIPSPNPQQVIGPLIPSLPAAAVSLRPSDSVLPLLTPILQQRVNLLSFNSSNDPWIRLLCYEPSKVPKLAEIAQSERLEPHPVSGEVEIDWDYDSEIRYRRVDEETLQALVVLNEMELVFRLLYCVGDSEQKTGWKVAEVSVTEKPSSFSSFGGVSTIAEAERQFSESKNKIATKPSASAYQPSYLKATPMDEDDDDDDYWARYDATPGNKTPATKRSPAPQTMRTNNNGNFASAEDAYFAQYDSVQPAMDNHDPDEEVDISPPLGLAHAAPNAAPYEGQNGEEEDNGIQESWTLAEPPRSSSTHSRSGDDPALVHPHPRPASSADSHSSVEKLEAAAARQEQNDFGVKQHVSRSIKSLFMLSRASGIDREEFESMVKTELDMLNLMED

SEQ ID NO: 26312 - DNA, 954 bp, Muscodor strobelii
  misc_feature: SGI cDNA ID NO. 568996
  misc_feature: Reduced expression when VOC is produced
  misc_feature: Encodes the peptide sequence at SEQ ID NO 26313
atgtcgaagcatggtcagcgccttcaagatgagggtacacgactgcaagtcgtcgcagccggcggctcagccggtctcatctcgcgcttcgtcatcgcgcctctcgacgtcgtgaaaatccgtctgcagctacaatcgcattccctctcggacccattatcgcaaaccaatatcggcggctctccaatctacaaagggaccctgcgcacattgcgcaccatcgtaaaaaatgagggaatcacaggactgtggaaaggaaacgtgccggcggagctgatgtacgtatcctacgccgcgatacaattcaccgcctaccgatcgacaacgctcctcctccaccgcatgttcggcgaaaaccggctcccgaaagcgacggagagttttattagtggtgcttcggcgggtgccatggccacggcgactacgtatcccctggaccttttgcgcacgcgcttcgcggcgcagggtaacgatcgggtgtatacctctctctaccgtgcgatcagcgatattcgccgcgacgagggcgctagaggtttctttcgtggtttaacgcctggtctcgcgcagattgtaccgttcatgggggtgttcttcgctatgtacgagacctgtcgcctgccactttctaaactagacttgccgtggggctcgggtgatgcgacggccggtgtgcttgctagtatcgtggctaagacgggcgtgtttcccctcgatcttgtgcggaagcgtattcaggtccagggtccgacgaggagtcggtacatccataagaatatccccgagtatgcggggaccgtcagtacgataaagaggattttgcagcgcgagggagtgaggggtttgtatagggggttgactgtctctttgcttaaggctgcgcctgcgagtgcggttaccatgtggacttatgagcgggttttgcattttctggttgagaaggagcttggatag

SEQ ID NO: 26313 - protein, 317 aa, Muscodor strobelii
  misc_feature: SGI Peptide ID NO. 568996
  misc_feature (13)..(116): Pfam Id: PF00153 Pfam Desc: Mitochondrial carrier protein
  misc_feature (123)..(213): Pfam Id: PF00153 Pfam Desc: Mitochondrial carrier protein
  misc_feature (216)..(315): Pfam Id: PF00153 Pfam Desc: Mitochondrial carrier protein
  misc_feature (1)..(315): NCBI GI: 154295049 Blast Desc: BC1G_13653 [Botryotinia fuckeliana B05.10] gi|206558273|sp|A6SL61.1|TPC1_BOTFB RecName: Full=Mitochondrial thiamine pyrophosphate carrier 1 gi|150844429|gb|EDN19622.1|
  misc_feature (1)..(313): NCBI GI: 119194097 Blast Desc: CIMG_01423 [Coccidioides immitis RS] gi|121770650|sp|Q1E7P0.1|TPC1_COCIM RecName: Full=Mitochondrial thiamine pyrophosphate carrier 1
  misc_feature (1)..(313): NCBI GI: 240105448 Blast Desc: Mitochondrial carrier protein [Coccidioides posadasii C735 delta SOWgp]
  misc_feature (1)..(315): NCBI GI: 238844959 Blast Desc: mitochondrial deoxynucleotide carrier [Microsporum canis CBS 113480]
  misc_feature (1)..(315): NCBI GI: 156050337 Blast Desc: SS1G_07755 [Sclerotinia sclerotiorum 1980] gi|206557751|sp|A7ER02.1|TPC1_SCLS1 RecName: Full=Mitochondrial thiamine pyrophosphate carrier 1 gi|154692156|gb|EDN91894.1|
  misc_feature (1)..(315): NCBI GI: 242761373 Blast Desc: mitochondrial deoxynucleotide carrier protein, [Talaromyces stipitatus ATCC 10500] gi|218723363|gb|EED22780.1| mitochondrial deoxynucleotide carrier protein, [Talaromyces ATCC
  misc_feature (1)..(316): NCBI GI: 169763072 Blast Desc: [Aspergillus oryzae RIB40] gi|121801694|sp|Q2UCW8.1|TPC1_ASPOR RecName: Full=Mitochondrial thiamine pyrophosphate carrier 1 gi|83770464|dbj|BAE60597.1|
  misc_feature (1)..(315): NCBI GI: 212539133 Blast Desc: mitochondrial deoxynucleotide carrier protein, [Penicillium marneffei ATCC 18224] gi|210069464|gb|EEA23555.1| mitochondrial deoxynucleotide carrier protein, [Penicillium ATCC
  misc_feature (6)..(317): NCBI GI: 187479896 Blast Desc: mitochondrial deoxynucleotide carrier protein, [Penicillium marneffei ATCC 18224] gi|210069464|gb|EEA23555.1| mitochondrial deoxynucleotide carrier protein, [Penicillium ATCC
  misc_feature (2)..(310): NCBI GI: 171687561 Blast Desc: protein product [Podospora anserina] gi|170943742|emb|CAP69394.1| protein product [Podospora anserina]
  misc_feature: Useful for introducing or modulating the production of volatile compounds
MSKHGQRLQDEGTRLQVVAAGGSAGLISRFVIAPLDVVKIRLQLQSHSLSDPLSQTNIGGSPIYKGTLRTLRTIVKNEGITGLWKGNVPAELMYVSYAAIQFTAYRSTTLLLHRMFGENRLPKATESFISGASAGAMATATTYPLDLLRTRFAAQGNDRVYTSLYRAISDIRRDEGARGFFRGLTPGLAQIVPFMGVFFAMYETCRLPLSKLDLPWGSGDATAGVLASIVAKTGVFPLDLVRKRIQVQGPTRSRYIHKNIPEYAGTVSTIKRILQREGVRGLYRGLTVSLLKAAPASAVTMWTYERVLHFLVEKELG

SEQ ID NO: 26314 - DNA, 5630 bp, Muscodor strobelii
  misc_feature: SGI EST ID NO. CUFF.62501.0
  misc_feature: Variant of the nucleotide sequence at SEQ ID NO 26312
aatccatctcatactttaaaataaacactcagcaattcacatatctctcacatgcaatgttcagtatgctttctaatggattagcctatgaatattgttgatcaatttcttatcatacttcataattcatctgacttagaaaaacaagcgatgcctagggtatgacattcaaaacgcctgcgccatctttccatgcaacgagcctaccaatttgccgaatacttgtccatgatgcaaacgccttatgacccagactattgacccaaccgtcgacgcattacgatatgatacaattctcattctctctctcctttcggtcccaggcttgctgcatagctagctgagcaactggacagcttcagtcctccatcagattgagcatgtcgagctccgtcttcaccatactttcgaattcctcgcgatcgatcccggaagctctcgataacatgaacagactcttgatacttcgtgaaacgtgttgcttaaccccgaaatcgttctgctcttgtcgtgctgccgcagcttcaagcttttctaccgatgaatgggaatccgcgctcgatgctggtcgagggtgaggatgaaccaaggctgggtcgtcgccgctgcgcgagtgcgttgagctcgatctaggaggctctgccaatgtccaggactcctgaatcccattatcctcttcctctccattctggccctcatatggtgcggcgttgggagctgcgtgcgctaggcccaagggtggcgaaatgtctacttcctcatccggatcgtggttgtccatggcaggctgaacgctatcatactgagcgaagtatgcatcttcagcagaagcaaaattaccgttgttatttgtccgcattgtctggggcgctggtgaccgctttgtagccggggttttattcccaggagtagcatcatatctcgcccaataatcgtcgtcatcatcatcttcatccatgggcgtagctttcaagtatgaaggttggtaagccgaagcggatggtttggtggcaattttgttcttggactcgctgaattgtcgttcggcctcagcaatcgttgaaactccgccgaaagacgagaaggatgaaggtttttcagtcacgctgacctctgcgaccttccagccggttttttgctcagagtcgccaacacagtataagaggcgaaagacaagttccatttcgttgagcactacaagcgcctgcagagtctcctcatccacgcgtcgatagcggatctcgctgtcgtaatcccaatcgatctcaacttcaccggagacgggatgtggctctagccgctcgctttgggcgatctccgccagctttggtaccttggacggctcataacatagcagccggatccaaggatcattgcttgagttgaatgataataggttcactcgttgctgtaggattggcgtgagaagaggcaacactgaatctgaaggtcgaagtgacacagcggcggcgggtagcgacggtattagagggccgatgacctgctggggatttggtgacgggatgtttgaattcgccattgtactggatactaacgcgaaagtctgtagtctggagactcaaagctacagcctctgcgaaaattttgagaataagtagaatatggcatcagagcgcgcgttggcgcgttgaaaatgtatattctgatgaatatgagatatgacgatgaccagctggtgggtcaggtcacatgcaaagcctcagtcgaagcagctcgaatgggcagctgactcaagctgggcgagctggaatgagagcaggactaataataccccactgaatgtcgtttcttttcgtgctattctgaatgagacacgatccacagagtaatcagtatgaaacgacagtcatcgggtctaggtgtttagacctgagcgagcaatgacaataatgtgttaggtagagttggtggtatgatggatcgaatggtttgtggaggggcatataaagtagagggatacctttaaccaccacagttgtttcgtccacgacgctgcgcgaccattgaccaacgatgcgacgagaatactctgtcttatgcatgcagcatcaaggcgcctatggccacagtgcttttaacgagagatgtctaccgagcctacctcctgtaaaccttttaccaaggttgcgctgtcccgggccgagcgaggcttttcctacgcttccagtccggacggacggaagttctatagtggcttctagctccaagaaggtcccgctaacaacattcgcgcctatcagcaaaagcgagtttgtacgtggggaacagttgtaattgatagtttatatgaacagtgcgaggggtggtgaatgatctatatgaacatccgaagacaaagaagatctgatagcagagttaggagcggaataaatgataccgagaagaacatctaccaccagtctcgagctttggcagtggtggttctgcaagaacaaaaagccgaaacatcactcctacctgtgttgacacagcccccagcagccaccaactcgccaactacagtacaacgatgcaaacgtagtagagagttgcacgaagacaggcagactccaacacgacatggggcgtgaccatgctcgtgtctccatggggagctcggcgaactccaagagtgtaacgtaacgagccatacaagcattccccgacgtcaccgatcaccgatggaataattcagttgcagctaggtaccggtagctccctccctggatagctatacacttctgcacgtgtatcactgtatatacggtagtgaggacatcccggcacttgatagatcacattcacgatagacttgcgcctgctttgaagctatcatggaatgtatacattgcatgtcaaggtaataatgtgtatgttttgtagataaacccgcaacgctgtatgtaggtaccttaggtagcctagcacaaatatacactttaagtaattcatcttagcgaataccgacgaacatttcgagattcttaaaatagttctccactctaagctgatcgcgacaggggacacgtgcctttgaccatatcatcggaatttattgacaaaaatcaagttgacaacaaattgactttggcgccttcataactacgagatcggacgacgacaacttgatgccaaaagcgccccgtccgcaaacgacgtctaatagataagcacgcacgatacttccccctagtccgggcagggcgtctacggatgtatgtcgaagcatggtcagcgccttcaagatgagggtacacgactgcaagtcgtcgcagccggcggctcagccggtctcatctcgcgcttcgtcatcgcgcctctcgacgtcgtgaaaatccgtctgcagctacaatcgcattccctctcggacccattatcgcaaaccaatatcggcggctctccaatctacaaagggaccctgcgcacattgcgcaccatcgtaaaaaatgagggaatcacaggactgtggaaaggaaacgtgccggcggagctgatgtacgtatcctacgccgcgatacaattcaccgcctaccgatcgacaacgctcctcctccaccgcatgttcggcgaaaaccggctcccgaaagcgacggagagttttattagtggtgcttcggcgggtgccatggccacggcgactacgtatcccctggaccttttgcgcacgcgcttcgcggcgcagggtaacgatcgggtgtatacctctctctaccgtgcgatcagcgatattcgccgcgacgagggcgctagaggtttctttcgtggtttaacgcctggtctcgcgcagattgtaccgttcatgggggtgttcttcgctatgtacgagacctgtcgcctgccactttctaaactagacttgccgtggggctcgggtgatgcgacggccggtgtgcttgctagtatcgtggctaagacgggcgtgtttcccctcgatcttgtgcggaagcgtattcaggtccagggtccgacgaggagtcggtacatccataagaatatccccgagtatgcggggaccgtcagtacgataaagaggattttgcagcgcgagggagtgaggggtttgtatagggggttgactgtctctttgcttaaggctgcgcctgcgagtgcggttaccatgtggacttatgagcgggttttgcattttctggttgagaaggagcttggatagacgtgtaagaaaggcgcggatggatgtgtgcctggattgtaagcatcggtatagacatcggcatagacacacagatggacggctttgcggcattgcatgggaagaagctatagatacccggatagagacattagacttggagtattcacattatcaacacacacgtatcttcgcatcagtctattttgagatatacccttatacagtgcttaagcaggggtcgatacgaaagatgaacaaagaaaacgacatatgcatctattttggcgtctatagtacaaaatacagtacttcgctggcggatcagccgcagcagttctatgtgtgtctctctattttcccttcttgacccaatcttcgacgatatcgcgggcctcgccaactttgtcttcgacataaacctttcctaagtcggcgtgtagtttcgtcatgtggatagccttctgaattccttcacgtgtagacacgtgagcgtcggcgatggcggggaaccgcttctcgtacgtccacaagagatctgagacgttggtcatggtgatggggatgaccacccagccggctccgatacctaaggcgagcggcagtgaagcgcgcaggagtatgttgcggtttcgggagatgatgcttccggccataccggcgaccagcacgtagacaaggccgggcatcagctgctcgccgctctcgcgtgacggggcgagggaggcgatcgtggaggtaaaagagcgctcgaggttaaatgcgcggtcgacggctgcgttcacgctgtcctcggccgtaacaacatgttggtggaggaagagacgggccttgccgatctgtacggcgagacgatccgtaggcgtcgggccacgtgtgcgcgcggggacgtctatgggctctgagggaatcttggaggatgctggaatggtttctgagtgcggcgagggcacgggggtggtgtgcttggggagagggatcgcttcgaagtcatcgtaaatgggtttcctgacctatcgttcgcgggttagagtgatgcactcgatatggttaacactattaccgtcgcgctctcatagcaaggcgggatcgtgcatagtgcgtgacgtgtggtgcgaggtttggcataccgggtgctgaggtggtgcctctgccaggactacggcgggaaataaagctcctccggccagagtggcagcgatgaaaggcgcggcgacacgctgcagcgggttgtcagtgatctgagtgttcaattagccagcagtgtatgtctcgcacctgtcgcagcagcactctcgcagccatgttgcctcgaaatgacgttgtcgcggaaagttgtcgaggtgaggaatttccagcgacgtcgagactgaggcttcgttgcgtcgggagataccgtaatcttcgggcgcaggtacggtgcgagtaccgtttctgcggctgcgtttgtgacactacaggggggctatatgcgctgtaa

SEQ ID NO: 26315 - DNA, 777 bp, Muscodor strobelii
  misc_feature: SGI cDNA ID NO. 568997
  misc_feature: Reduced expression when VOC is produced
  misc_feature: Encodes the peptide sequence at SEQ ID NO 26316
atggctgcgagagtgctgctgcgacagcgtgtcgccgcgcctttcatcgctgccactctggccggaggagctttatttcccgccgtagtcctggcagaggcaccacctcagcacccggtcaggaaacccatttacgatgacttcgaagcgatccctctccccaagcacaccacccccgtgccctcgccgcactcagaaaccattccagcatcctccaagattccctcagagcccatagacgtccccgcgcgcacacgtggcccgacgcctacggatcgtctcgccgtacagatcggcaaggcccgtctcttcctccaccaacatgttgttacggccgaggacagcgtgaacgcagccgtcgaccgcgcatttaacctcgagcgctcttttacctccacgatcgcctccctcgccccgtcacgcgagagcggcgagcagctgatgcccggccttgtctacgtgctggtcgccggtatggccggaagcatcatctcccgaaaccgcaacatactcctgcgcgcttcactgccgctcgccttaggtatcggagccggctgggtggtcatccccatcaccatgaccaacgtctcagatctcttgtggacgtacgagaagcggttccccgccatcgccgacgctcacgtgtctacacgtgaaggaattcagaaggctatccacatgacgaaactacacgccgacttaggaaaggtttatgtcgaagacaaagttggcgaggcccgcgatatcgtcgaagattgggtcaagaagggaaaatag

SEQ ID NO: 26316 - protein, 258 aa, Muscodor strobelii
  misc_feature: SGI Peptide ID NO. 568997
  misc_feature (1)..(258): NCBI GI: 39974731 Blast Desc: MGG_00488 [Magnaporthe grisea 70-15] gi|145018616|gb|EDK02895.1| MGG_00488 [Magnaporthe grisea 70-15]
  misc_feature (1)..(258): NCBI GI: 261356035 Blast Desc: conserved [Verticillium albo-atrum VaMs.102]
  misc_feature (1)..(258): NCBI GI: 256733115 Blast Desc: NECHADRAFT_102562 [Nectria haematococca mpVI 77-13-4]
  misc_feature (24)..(258): NCBI GI: 85113851 Blast Desc: NCU02064 [Neurospora crassa OR74A] gi|28926379|gb|EAA35355.1| conserved [Neurospora crassa OR74A]
  misc_feature (24)..(258): NCBI GI: 154297328 Blast Desc: BC1G_12068 [Botryotinia fuckeliana B05.10] gi|150858573|gb|EDN33765.1| BC1G_12068 [Botryotinia fuckeliana B05.10]
  misc_feature (20)..(258): NCBI GI: 46124973 Blast Desc: FG06864.1 [Gibberella zeae PH-1]
  misc_feature (24)..(258): NCBI GI: 156062358 Blast Desc: SS1G_01295 [Sclerotinia sclerotiorum 1980] gi|154696631|gb|EDN96369.1| SS1G_01295 [Sclerotinia sclerotiorum 1980]
  misc_feature (1)..(258): NCBI GI: 171687559 Blast Desc: protein product [Podospora anserina] gi|170943741|emb|CAP69393.1| protein product [Podospora anserina]
  misc_feature (1)..(258): NCBI GI: 169625013 Blast Desc: SNOG_15772 [Phaeosphaeria nodorum SN15] gi|111055747|gb|EAT76867.1| SNOG_15772 [Phaeosphaeria nodorum SN15]
  misc_feature (6)..(258): NCBI GI: 258574651 Blast Desc: conserved [Uncinocarpus reesii 1704] gi|237901773|gb|EEP76174.1| conserved [Uncinocarpus reesii 1704]
  misc_feature: Useful for introducing or modulating the production of volatile compounds
MAARVLLRQRVAAPFIAATLAGGALFPAVVLAEAPPQHPVRKPIYDDFEAIPLPKHTTPVPSPHSETIPASSKIPSEPIDVPARTRGPTPTDRLAVQIGKARLFLHQHVVTAEDSVNAAVDRAFNLERSFTSTIASLAPSRESGEQLMPGLVYVLVAGMAGSIISRNRNILLRASLPLALGIGAGWVVIPITMTNVSDLLWTYEKRFPAIADAHVSTREGIQKAIHMTKLHADLGKVYVEDKVGEARDIVEDWVKKGK

SEQ ID NO: 26317 - DNA, 2493 bp, Muscodor strobelii
  misc_feature: SGI EST ID NO. CUFF.62502.1
  misc_feature: Variant of the nucleotide sequence at SEQ ID NO 26315
ttacagcgcatatagcccccctgtagtgtcacaaacgcagccgcagaaacggtactcgcaccgtacctgcgcccgaagattacggtatctcccgacgcaacgaagcctcagtctcgacgtcgctggaaattcctcacctcgacaactttccgcgacaacgtcatttcgaggcaacatggctgcgagagtgctgctgcgacagcgtgtcgccgcgcctttcatcgctgccactctggccggaggagctttatttcccgccgtagtcctggcagaggcaccacctcagcacccggtcaggaaacccatttacgatgacttcgaagcgatccctctccccaagcacaccacccccgtgccctcgccgcactcagaaaccattccagcatcctccaagattccctcagagcccatagacgtccccgcgcgcacacgtggcccgacgcctacggatcgtctcgccgtacagatcggcaaggcccgtctcttcctccaccaacatgttgttacggccgaggacagcgtgaacgcagccgtcgaccgcgcatttaacctcgagcgctcttttacctccacgatcgcctccctcgccccgtcacgcgagagcggcgagcagctgatgcccggccttgtctacgtgctggtcgccggtatggccggaagcatcatctcccgaaaccgcaacatactcctgcgcgcttcactgccgctcgccttaggtatcggagccggctgggtggtcatccccatcaccatgaccaacgtctcagatctcttgtggacgtacgagaagcggttccccgccatcgccgacgctcacgtgtctacacgtgaaggaattcagaaggctatccacatgacgaaactacacgccgacttaggaaaggtttatgtcgaagacaaagttggcgaggcccgcgatatcgtcgaagattgggtcaagaagggaaaatagagagacacacatagaactgctgcggctgatccgccagcgaagtactgtattttgtactatagacgccaaaatagatgcatatgtcgttttctttgttcatctttcgtatcgacccctgcttaagcactgtataagggtatatctcaaaatagactgatgcgaagatacgtgtgtgttgataatgtgaatactccaagtctaatgtctctatccgggtatctatagcttcttcccatgcaatgccgcaaagccgtccatctgtgtgtctatgccgatgtctataccgatgcttacaatccaggcacacatccatccgcgcctttcttacacgtctatccaagctccttctcaaccagaaaatgcaaaacccgctcataagtccacatggtaaccgcactcgcaggcgcagccttaagcaaagagacagtcaaccccctatacaaacccctcactccctcgcgctgcaaaatcctctttatcgtactgacggtccccgcatactcggggatattcttatggatgtaccgactcctcgtcggaccctggacctgaatacgcttccgcacaagatcgaggggaaacacgcccgtcttagccacgatactagcaagcacaccggccgtcgcatcacccgagccccacggcaagtctagtttagaaagtggcaggcgacaggtctcgtacatagcgaagaacacccccatgaacggtacaatctgcgcgagaccaggcgttaaaccacgaaagaaacctctagcgccctcgtcgcggcgaatatcgctgatcgcacggtagagagaggtatacacccgatcgttaccctgcgccgcgaagcgcgtgcgcaaaaggtccaggggatacgtagtcgccgtggccatggcacccgccgaagcaccactaataaaactctccgtcgctttcgggagccggttttcgccgaacatgcggtggaggaggagcgttgtcgatcggtaggcggtgaattgtatcgcggcgtaggatacgtacatcagctccgccggcacgtttcctttccacagtcctgtgattccctcattttttacgatggtgcgcaatgtgcgcagggtccctttgtagattggagagccgccgatattggtttgcgataatgggtccgagagggaatgcgattgtagctgcagacggattttcacgacgtcgagaggcgcgatgacgaagcgcgagatgagaccggctgagccgccggctgcgacgacttgcagtcgtgtaccctagtttatggtaagtcttcagggcgtttgaaatatttgaacttagtatgcgacgtacctcatcttgaaggcgctgaccatgcttcgacatacatccgtagacgccctgcccggactagggggaagtatcgtgcgtgcttatctattagacgtcgtttgcggacggggcgcttttggcatcaagttgtcgtcgtccgatctcgtagttatgaaggcgccaaagtcaatttgttgtcaacttgatttttgtcaataaattccgatgatatggtcaaaggcacgtgtccc

SEQ ID NO: 26318 - DNA, 2418 bp, Muscodor strobelii
  misc_feature: SGI cDNA ID NO. 568998
  misc_feature: Reduced expression when VOC is produced
  misc_feature: Encodes the peptide sequence at SEQ ID NO 26319
atgatcaaatccgtgcggtcaggtctctggacctgctcaacatgtgcccgtcggctatcgcgtgcgcaaccactctcactctcgaagcagcccagccggtggcattctgctgctcccggtctcgcccaccaggatgccgcttcacctcttcctgtccatcataccacctccgattccaagcacgacgatgttctgttgcgacagatattcgactctccgcccaccttcaagggcctcgtccgccctctcctcgaacgcgcaacccgaaagaacgctggcctgtttcgaaacaagtacttgacctcgcctcaggggtttctactcttcgccgatgtcaccatagccagagcctcgaagctcgtcgataaggtcaccaatgcgaccaccacggacgactacaagaccctggtgcgcgatctggaccggctgagtgatctgctctgccgtgtcctcgatgtctccgacttcgtgcgcataacccatcccgacgtcaagatccagcaagctgcgtctgctgcgtggtcgaaagtctacatgtatatgaaccagctcaacacgtccactgccctgagcgatcagcttggaaaggctttggacaaccccgagatcatggccagctggaacgaggaggagcagaccgttgcgaaactgctgcagcaagacttcaaaaagtctgctatacacttacccaaagagtatcgcgatgcttttgtagatgtctcacagaacatcagccatttaggtgcccagtttgtcgacggcatggaggctgagcagagctacctcagctttcccagtagcaaattccatggcatggaccctcgcattgcacaatccatggtgcggcgtggtactctacggcttccagtcatgtctccggccgcctcagtcgctttggggcaggttcatgatgaagagacgagaaaggcgatttactatgctactaggacggcgtccaagcgatctatcgacacgttagagacaatgctcaaactacgtgctcagcttgccgacctgtcggggtttgagaattatggacagatggctctacatgataagatgatggccaaaacccctgaatcagttcaacagtttctccaagctttgtctaagcacaattcgaacttcgttgatgccgagattttggaccttgcaagagagaagcgcagaagaattggtcccgatgaggatcttatccttcagccctgggataaagaatactactcttcgagtattcgcgcagctatgagatctacccgcaaaaacgacgatttcttgtctgcctacttttctctgggcactgttatgcaagggttgtctcgattatttactcgactatatggtatacggttagtgcctacggagacgttgcctggagagacctggcatcccgatgtgagacggctggatgtcatttcggacacggatggccatgttgcagttttgtactgcgatctcttctaccgggatgataagtctccgaacccagcccacttcactgtgcgttgctctagagaaatctcagcagaggaaatccaagaaacatgggcacagaatggcgtggaagggttgcctacttttgaatcgcccttggatgcggccaacgatggcatgcatgtttccgagcagtctagctccgtcaaacagctaccgacaatcgcgttagtatgtgatttccatcaggatagggactcgcgtgaccagcctgcactactcgaatacggtcaggttgagacattgttccatgagatgggacatgcgatacactccatcctagctagaacgtctctccagaatgttgcaggaacgcgatgcgcaacggatttcgccgagctcccctctaccttgatggagcacttctgtgcggatccctctgtcctgtcactgttcgcaagacattacaagaccgacgagccactaccgtacgagatggtcgcgaaaagacaacagattcatgaccgattcgaggcttcggatcgagagaaccagatcatcctcgctatgttggaccaggagtatcactcctctcgcgtcaagcgagatgacttcaactcaacagagacgtatcttaatctccaacagaaattcggcagattgcccactgatcccaagggaacgaggtggcagggattctttgggcatctgttcggatatggcagtacatattatagctacctctttgatcaggtgctttcggagagagtctggaggatcgtcttctccgccggtcaaaatagggctgcgctagatagagagaatggcgagagactcaaagaaagtctcctcaagtggggtggaagccgagatccctggaggtgtctttcggatgctctgagggatgagcggctcgttgatggtgatgagaaggctatgaggcttgtgggtagctggggcattaaggatgatacgcatggttag

SEQ ID NO: 26319 - protein, 805 aa, Muscodor strobelii
  misc_feature: SGI Peptide ID NO. 568998
  misc_feature (298)..(793): Pfam Id: PF01432 Pfam Desc: Peptidase family M3
  misc_feature (1)..(803): NCBI GI: 39974733 Blast Desc: MGG_00487 [Magnaporthe grisea 70-15] gi|190359953|sp|A4RF25.1|PMIP_MAGGR RecName: Full=Mitochondrial intermediate peptidase; Short=MIP; AltName: Full=Octapeptidyl
  misc_feature (1)..(798): NCBI GI: 85111610 Blast Desc: NCU02063 [Neurospora crassa OR74A] gi|74662740|sp|Q7SDD5.1|PMIP_NEUCR RecName: Full=Mitochondrial intermediate peptidase; Short=MIP; AltName: Full=Octapeptidyl
  misc_feature (1)..(804): NCBI GI: 256732668 Blast Desc: [Nectria haematococca mpVI 77-13-4]
  misc_feature (1)..(804): NCBI GI: 46124975 Blast Desc: FG06865.1 [Gibberella zeae PH-1]
  misc_feature (1)..(798): NCBI GI: 171687557 Blast Desc: protein product [Podospora anserina] gi|170943740|emb|CAP69392.1| protein product [Podospora anserina]
  misc_feature (1)..(801): NCBI GI: 190359977 Blast Desc: protein product [Podospora anserina] gi|170943740|emb|CAP69392.1| protein product [Podospora anserina]
  misc_feature (49)..(801): NCBI GI: 190359987 Blast Desc: protein product [Podospora anserina] gi|170943740|emb|CAP69392.1| protein product [Podospora anserina]
  misc_feature (10)..(798): NCBI GI: 116180716 Blast Desc: CHGG_00986 [Chaetomium globosum CBS 148.51] gi|121791452|sp|Q2HFL8.1|PMIP_CHAGB RecName: Full=Mitochondrial intermediate peptidase; Short=MIP; AltName: Full=Octapeptidyl CBS
  misc_feature (177)..(801): NCBI GI: 156062360 Blast Desc: SS1G_01296 [Sclerotinia sclerotiorum 1980] gi|154696632|gb|EDN96370.1| SS1G_01296 [Sclerotinia sclerotiorum 1980]
  misc_feature (177)..(801): NCBI GI: 154297326 Blast Desc: BC1G_12067 [Botryotinia fuckeliana B05.10] gi|150858572|gb|EDN33764.1| BC1G_12067 [Botryotinia fuckeliana B05.10]
  misc_feature (1)..(803): SWISSPROT Homolog: EC 3.4.24.59 Mitochondrial intermediate peptidase
  misc_feature: Useful for introducing or modulating the production of volatile compounds
MIKSVRSGLWTCSTCARRLSRAQPLSLSKQPSRWHSAAPGLAHQDAASPLPVHHTTSDSKHDDVLLRQIFDSPPTFKGLVRPLLERATRKNAGLFRNKYLTSPQGFLLFADVTIARASKLVDKVTNATTTDDYKTLVRDLDRLSDLLCRVLDVSDFVRITHPDVKIQQAASAAWSKVYMYMNQLNTSTALSDQLGKALDNPEIMASWNEEEQTVAKLLQQDFKKSAIHLPKEYRDAFVDVSQNISHLGAQFVDGMEAEQSYLSFPSSKFHGMDPRIAQSMVRRGTLRLPVMSPAASVALGQVHDEETRKAIYYATRTASKRSIDTLETMLKLRAQLADLSGFENYGQMALHDKMMAKTPESVQQFLQALSKHNSNFVDAEILDLAREKRRRIGPDEDLILQPWDKEYYSSSIRAAMRSTRKNDDFLSAYFSLGTVMQGLSRLFTRLYGIRLVPTETLPGETWHPDVRRLDVISDTDGHVAVLYCDLFYRDDKSPNPAHFTVRCSREISAEEIQETWAQNGVEGLPTFESPLDAANDGMHVSEQSSSVKQLPTIALVCDFHQDRDSRDQPALLEYGQVETLFHEMGHAIHSILARTSLQNVAGTRCATDFAELPSTLMEHFCADPSVLSLFARHYKTDEPLPYEMVAKRQQIHDRFEASDRENQIILAMLDQEYHSSRVKRDDFNSTETYLNLQQKFGRLPTDPKGTRWQGFFGHLFGYGSTYYSYLFDQVLSERVWRIVFSAGQNRAALDRENGERLKESLLKWGGSRDPWRCLSDALRDERLVDGDEKAMRLVGSWGIKDDTHG

SEQ ID NO: 26320 - DNA, 2697 bp, Muscodor strobelii
  misc_feature: SGI EST ID NO. CUFF.62505.0
  misc_feature: Variant of the nucleotide sequence at SEQ ID NO 26318
aaaaaaaggtgaatccggcatcgcaaacgccatcgatgatctttatcttagcacgtgctccctctttctcactcaactacttcctagatttcgatacacttgacatgcgcccgtaaactttcttatgcttctagatctgaagtgatccggtactatggtgcgcccgtcatgatcaaatccgtgcggtcaggtctctggacctgctcaacatgtgcccgtcggctatcgcgtgcgcaaccactctcactctcgaagcagcccagccggtggcattctgctgctcccggtctcgcccaccaggatgccgcttcacctcttcctgtccatcataccacctccgattccaagcacgacgatgttctgttgcgacagatattcgactctccgcccaccttcaagggcctcgtccgccctctcctcgaacgcgcaacccgaaagaacgctggcctgtttcgaaacaagtacttgacctcgcctcaggggtttctactcttcgccgatgtcaccatagccagagcctcgaagctcgtcgataaggtcaccaatgcgaccaccacggacgactacaagaccctggtgcgcgatctggaccggctgagtgatctgctctgccgtgtcctcgatgtctccgacttcgtgcgcataacccatcccgacgtcaagatccagcaagctgcgtctgctgcgtggtcgaaagtctacatgtatatgaaccagctcaacacgtccactgccctgagcgatcagcttggaaaggctttggacaaccccgagatcatggccagctggaacgaggaggagcagaccgttgcgaaactgctgcagcaagacttcaaaaagtctgctatacacttacccaaagagtatcgcgatgcttttgtagatgtctcacagaacatcagccatttaggtgcccagtttgtcgacggcatggaggctgagcagagctacctcagctttcccagtagcaaattccatggcatggaccctcgcattgcacaatccatggtgcggcgtggtactctacggcttccagtcatgtctccggccgcctcagtcgctttggggcaggttcatgatgaagagacgagaaaggcgatttactatgctactaggacggcgtccaagcgatctatcgacacgttagagacaatgctcaaactacgtgctcagcttgccgacctgtcggggtttgagaattatggacagatggctctacatgataagatgatggccaaaacccctgaatcagttcaacagtttctccaagctttgtctaagcacaattcgaacttcgttgatgccgagattttggaccttgcaagagagaagcgcagaagaattggtcccgatgaggatcttatccttcagccctgggataaagaatactactcttcgagtattcgcgcagctatgagatctacccgcaaaaacgacgatttcttgtctgcctacttttctctgggcactgttatgcaagggttgtctcgattatttactcgactatatggtatacggttagtgcctacggagacgttgcctggagagacctggcatcccgatgtgagacggctggatgtcatttcggacacggatggccatgttgcagttttgtactgcgatctcttctaccgggatgataagtctccgaacccagcccacttcactgtgcgttgctctagagaaatctcagcagaggaaatccaagaaacatgggcacagaatggcgtggaagggttgcctacttttgaatcgcccttggatgcggccaacgatggcatgcatgtttccgagcagtctagctccgtcaaacagctaccgacaatcgcgttagtatgtgatttccatcaggatagggactcgcgtgaccagcctgcactactcgaatacggtcaggttgagacattgttccatgagatgggacatgcgatacactccatcctagctagaacgtctctccagaatgttgcaggaacgcgatgcgcaacggatttcgccgagctcccctctaccttgatggagcacttctgtgcggatccctctgtcctgtcactgttcgcaagacattacaagaccgacgagccactaccgtacgagatggtcgcgaaaagacaacagattcatgaccgattcgaggcttcggatcgagagaaccagatcatcctcgctatgttggaccaggagtatcactcctctcgcgtcaagcgagatgacttcaactcaacagagacgtatcttaatctccaacagaaattcggcagattgcccactgatcccaagggaacgaggtggcagggattctttgggcatctgttcggatatggcagtacatattatagctacctctttgatcaggtgctttcggagagagtctggaggatcgtcttctccgccggtcaaaatagggctgcgctagatagagagaatggcgagagactcaaagaaagtctcctcaagtggggtggaagccgagatccctggaggtgtctttcggatgctctgagggatgagcggctcgttgatggtgatgagaaggctatgaggcttgtgggtagctggggcattaaggatgatacgcatggttagatcattgtgcggtattatgatagtgtacataaatagtgtaacattatgtgtagcggctgggactagtgattagatatgaatagacagcgggctattgcttgcaaattgaaa

SEQ ID NO: 26321 - DNA, 2472 bp, Muscodor strobelii
  misc_feature: SGI cDNA ID NO. 568999
  misc_feature: Elevated expression when VOC is produced
  misc_feature: Encodes the peptide sequence at SEQ ID NO 26322
atgaatacacaagccttcgtcacaagcgagcgatcgcaacatcaaatgctccagaaaagtcaatttcatgagagcttttttcggccgaagggccatgatattcgcccgacgtcagtgactacagaaatcgtggacacagactgggacgaggatgagataattagcgaggcagaggaagaagcaaactcaccccgtgtgagcttgaattcaactggccagcaaagcgcgacaacactctcatcatatgacgaggcgcacacgcctaggtcgagccggactcgcgaggcgtatccctaccattatgacctatcgcggccggtggaggggccgagaggaccgcacctgttccgatcatctacgacgtcgtcaaattccattgaataccaagacatcctcaccctttcgccggttacacctaagacggcccgaccgtacgacacggagtttcggcagcctttcgttcatgatccgttgcctcgcttgcgaagcagtccttatcaatttacaaatgagaagctagatccgattgatcttgcaatgtggtcgccggagaaggtggctcagtggatgctcaatgctggcattgagctgccaatagcagagaggtttatcgagaacgacatcaacggtgctatcttaattacattgaaattcgaggatctaagggaactcggtatccaatcatttggagcacggacgaaagtgtgggaggagatacacgttttaagagatcggaaggacatgtccccacggccagatacaccgatcgaagatgaagagagcaaagaggtcagaaaggaaagacggcagcgcgagagggaggcgaatgaccagtcggaacgttctcaaagctgcaagcgttcgaagagtgtgaagcggagccagagcaagcgaaagccttcacatgaggatattatttctccgttagaatctgtctctattgtcgggatcgagcagatgatgccaaagccacaccactgttcaaaaggggagaactgctctaagtacaggagacagcaacgtatgatcgaggctttcaaacaagatcatccgttcgtcaacatggacaacggcggtatgatcatggtagccggagatccgggaaatccagttacggcaccggcgatcaatcgtccttcatcaacggaagcactgcggccaatgtctgatgcagtaccttcggtcgttgcctcatccgatgttctgggacccggcatgcctcctttccagtatctgcgtgaagctacactgcgaaacttgcagacacaggatccccaagacaatgtgcggcaatttcttaacttccaacaccagcagagtggcgcaaacacgagcgaggtccctccgacacctcctttcgagctacacaatgggaagggaccgcatgaaggtctccgcgctctacccaagctttccattcccgaccagcaagctatggctcagagacaatctcagcagccaaagccatccaacctacaacaagagttcgtcccctaccgcatggataaggctgatccccggtcccctgatcttgccactcctgttgctccgtaccgtttcggtactcctttctcggatatggacatccccgtaacggcggtgccactaggcccggtagctcgggatgcgtcacaatcggttcctccggacatgagctatcgctccattcctgtcacccgatcgcgtgcgtcacatcgaccttcattacaaatcatggcaccagtcaaagaagacgtgatgagcccatccgcagcaaggaggaccagtccaacaacaccacagcggcgtccatccctttcgcctagagccggttcgccactcaaggccaactcaccaccaaagattccctcgcgaccgcaaaatccactccaggcgcccccgcggccccaatacccgtggtctcagccgcagaatctcgctggtggagtgggtgtgaccaaagatgccgagggtatcacgtaccaagggccagttaagaagcgtaagacccgtatgctgcggcacgaatggcacgaccaatacgccatcctcaaaggtacacgtctcgctctccataaggacgccttgacccgcgaccgcacactagagtacatagacatcgacgactacgccatcgcctgctcatccaacctctcgacatccaagctcaacgccgcgttcaaggccatgtcgatccgccacgggcgctcgaactcacaggaagacgtcggagccttcaacttccaactcatcccccaggacccagaaggtggcaaagtccgccgcctcaagaaaagggaatcgcagagtattggctcaggacccttgaccggcggtctagacggatccttcaacggcacgggcaagacgcaccattttgccgtcaagagccgcgatgagcgtattgactggatgcgtgagctcatgcttgctaaggctctcaagcagaagggcgaggggttcgaagtcagtgttaatgggagtatgatctaa

SEQ ID NO: 26322 - protein, 823 aa, Muscodor strobelii
  misc_feature: SGI Peptide ID NO. 568999
  misc_feature (652)..(806): Pfam Id: PF00169 Pfam Desc: PH domain
  misc_feature (178)..(245): Pfam Id: PF07647 Pfam Desc: SAM domain (Sterile alpha motif)
  misc_feature (179)..(243): Pfam Id: PF00536 Pfam Desc: SAM domain (Sterile alpha motif)
  misc_feature (24)..(823): NCBI GI: 164424291 Blast Desc: NCU07389 [Neurospora crassa OR74A] gi|157070453|gb|EAA28664.2| conserved [Neurospora crassa OR74A]
  misc_feature (3)..(820): NCBI GI: 116180726 Blast Desc: CHGG_00991 [Chaetomium globosum CBS 148.51] gi|88185288|gb|EAQ92756.1| CHGG_00991 [Chaetomium globosum CBS 148.51]
  misc_feature (16)..(823): NCBI GI: 256732609 Blast Desc: NECHADRAFT_92661 [Nectria haematococca mpVI 77-13-4]
  misc_feature (6)..(823): NCBI GI: 171687471 Blast Desc: protein product [Podospora anserina] gi|170943697|emb|CAP69349.1| protein product [Podospora anserina]
  misc_feature (13)..(823): NCBI GI: 145611314 Blast Desc: MGG_00492 [Magnaporthe grisea 70-15] gi|145018612|gb|EDK02891.1| MGG_00492 [Magnaporthe grisea 70-15]
  misc_feature (22)..(823): NCBI GI: 154314191 Blast Desc: BC1G_05189 [Botryotinia fuckeliana B05.10] gi|150848834|gb|EDN24027.1| BC1G_05189 [Botryotinia fuckeliana B05.10]
  misc_feature (1)..(823): NCBI GI: 156036030 Blast Desc: SS1G_12701 [Sclerotinia sclerotiorum 1980] gi|154698109|gb|EDN97847.1| SS1G_12701 [Sclerotinia sclerotiorum 1980]
  misc_feature (35)..(479): NCBI GI: 46125381 Blast Desc: FG07068.1 [Gibberella zeae PH-1]
  misc_feature (382)..(823): NCBI GI: 261356092 Blast Desc: SAM and PH domain-containing protein [Verticillium albo-atrum VaMs.102]
  misc_feature (15)..(820): NCBI GI: 225682328 Blast Desc: conserved [Paracoccidioides brasiliensis Pb03]
  misc_feature: Useful for introducing or modulating the production of volatile compounds
MNTQAFVTSERSQHQMLQKSQFHESFFRPKGHDIRPTSVTTEIVDTDWDEDEIISEAEEEANSPRVSLNSTGQQSATTLSSYDEAHTPRSSRTREAYPYHYDLSRPVEGPRGPHLFRSSTTSSNSIEYQDILTLSPVTPKTARPYDTEFRQPFVHDPLPRLRSSPYQFTNEKLDPIDLAMWSPEKVAQWMLNAGIELPIAERFIENDINGAILITLKFEDLRELGIQSFGARTKVWEEIHVLRDRKDMSPRPDTPIEDEESKEVRKERRQREREANDQSERSQSCKRSKSVKRSQSKRKPSHEDIISPLESVSIVGIEQMMPKPHHCSKGENCSKYRRQQRMIEAFKQDHPFVNMDNGGMIMVAGDPGNPVTAPAINRPSSTEALRPMSDAVPSVVASSDVLGPGMPPFQYLREATLRNLQTQDPQDNVRQFLNFQHQQSGANTSEVPPTPPFELHNGKGPHEGLRALPKLSIPDQQAMAQRQSQQPKPSNLQQEFVPYRMDKADPRSPDLATPVAPYRFGTPFSDMDIPVTAVPLGPVARDASQSVPPDMSYRSIPVTRSRASHRPSLQIMAPVKEDVMSPSAARRTSPTTPQRRPSLSPRAGSPLKANSPPKIPSRPQNPLQAPPRPQYPWSQPQNLAGGVGVTKDAEGITYQGPVKKRKTRMLRHEWHDQYAILKGTRLALHKDALTRDRTLEYIDIDDYAIACSSNLSTSKLNAAFKAMSIRHGRSNSQEDVGAFNFQLIPQDPEGGKVRRLKKRESQSIGSGPLTGGLDGSFNGTGKTHHFAVKSRDERIDWMRELMLAKALKQKGEGFEVSVNGSMI

SEQ ID NO: 26323 - DNA, 3218 bp, Muscodor strobelii
  misc_feature: SGI EST ID NO. CUFF.62056.0
  misc_feature: Variant of the nucleotide sequence at SEQ ID NO 26321
ctcccagtgcccctctctcttgcatgtgagccattgtcgtgagccgaagtatctagaccgcagagacactacatctttatctcttacatatactatccgcatgtgcccgtaaactcgcttcagctttcccttttcccgtttttgcaacgtcgaattggtccctcggacacccatagccagcctttttctttgtgttgtcgtctgcatctttgcatgtctcgtatatcccgtatccttggttatagaaaaataggagcctgccggcaacggcaacagaaacaccgtaaatagtaaacagcgtgacgggaagttttcttgtctatctctgtcaaaatgaatacacaagccttcgtcacaagcgagcgatcgcaacatcaaatgctccagaaaagtcaatttcatgagagcttttttcggccgaagggccatgatattcgcccgacgtcagtgactacagaaatcgtggacacagactgggacgaggatgagataattagcgaggcagaggaagaagcaaactcaccccgtgtgagcttgaattcaactggccagcaaagcgcgacaacactctcatcatatgacgaggcgcacacgcctaggtcgagccggactcgcgaggcgtatccctaccattatgacctatcgcggccggtggaggggccgagaggaccgcacctgttccgatcatctacgacgtcgtcaaattccattgaataccaagacatcctcaccctttcgccggttacacctaagacggcccgaccgtacgacacggagtttcggcagcctttcgttcatgatccgttgcctcgcttgcgaagcagtccttatcaatttacaaatgagaagctagatccgattgatcttgcaatgtggtcgccggagaaggtggctcagtggatgctcaatgctggcattgagctgccaatagcagagaggtttatcgagaacgacatcaacggtgctatcttaattacattgaaattcgaggatctaagggaactcggtatccaatcatttggagcacggacgaaagtgtgggaggagatacacgttttaagagatcggaaggacatgtccccacggccagatacaccgatcgaagatgaagagagcaaagaggtcagaaaggaaagacggcagcgcgagagggaggcgaatgaccagtcggaacgttctcaaagctgcaagcgttcgaagagtgtgaagcggagccagagcaagcgaaagccttcacatgaggatattatttctccgttagaatctgtctctattgtcgggatcgagcagatgatgccaaagccacaccactgttcaaaaggggagaactgctctaagtacaggagacagcaacgtatgatcgaggctttcaaacaagatcatccgttcgtcaacatggacaacggcggtatgatcatggtagccggagatccgggaaatccagttacggcaccggcgatcaatcgtccttcatcaacggaagcactgcggccaatgtctgatgcagtaccttcggtcgttgcctcatccgatgttctgggacccggcatgcctcctttccagtatctgcgtgaagctacactgcgaaacttgcagacacaggatccccaagacaatgtgcggcaatttcttaacttccaacaccagcagagtggcgcaaacacgagcgaggtccctccgacacctcctttcgagctacacaatgggaagggaccgcatgaaggtctccgcgctctacccaagctttccattcccgaccagcaagctatggctcagagacaatctcagcagccaaagccatccaacctacaacaagagttcgtcccctaccgcatggataaggctgatccccggtcccctgatcttgccactcctgttgctccgtaccgtttcggtactcctttctcggatatggacatccccgtaacggcggtgccactaggcccggtagctcgggatgcgtcacaatcggttcctccggacatgagctatcgctccattcctgtcacccgatcgcgtgcgtcacatcgaccttcattacaaatcatggcaccagtcaaagaagacgtgatgagcccatccgcagcaaggaggaccagtccaacaacaccacagcggcgtccatccctttcgcctagagccggttcgccactcaaggccaactcaccaccaaagattccctcgcgaccgcaaaatccactccaggcgcccccgcggccccaatacccgtggtctcagccgcagaatctcgctggtggagtgggtgtgaccaaagatgccgagggtatcacgtaccaagggccagttaagaagcgtaagacccgtatgctgcggcacgaatggcacgaccaatacgccatcctcaaaggtacacgtctcgctctccataaggacgccttgacccgcgaccgcacactagagtacatagacatcgacgactacgccatcgcctgctcatccaacctctcgacatccaagctcaacgccgcgttcaaggccatgtcgatccgccacgggcgctcgaactcacaggaagacgtcggagccttcaacttccaactcatcccccaggacccagaaggtggcaaagtccgccgcctcaagaaaagggaatcgcagagtattggctcaggacccttgaccggcggtctagacggatccttcaacggcacgggcaagacgcaccattttgccgtcaagagccgcgatgagcgtattgactggatgcgtgagctcatgcttgctaaggctctcaagcagaagggcgaggggttcgaagtcagtgttaatgggagtatgatctaaggtctctccctctacattcccttagttatttctgcatatgacgggtggagaatttgcataactctcatctctattccctttctttgatttgttccattcttcggagcgtgcatgttgatatcccaatgttttcttggttaaaaacgaaagattgcagcgagccacctacggtccttttacttggtttatgttcgtttttggttcagctggctggtttgacgatggggcactatggtgtctggggatatattagatgataggctaaagcaatacggatagttatgatgagatgaggcgagggttacttggaggattggaagtattgggcagaacatcacagtcgttttcatacttttgtatgtgcttctggtaattagcatatgaatgaagatattgaaactttgggaattgag

SEQ ID NO: 26324 - DNA, 2034 bp, Muscodor strobelii
  misc_feature: SGI cDNA ID NO. 569000
  misc_feature: Elevated expression when VOC is produced
  misc_feature: Encodes the peptide sequence at SEQ ID NO 26325
atgtcaaccttaccccccaactcgcgtgaaggcttcatgagagcagcacccgtcaacatggctgccgcacaacccgcaaagtcgaaggcttcaagggccggtaacaatgcaaacccaaaagcaaagacacagatgcatcgtcgttcaagaacaggctgctacacctgcagattacggcgcaaaaagtgcgatgagggaacaccaatgtgcactgcttgcaagcatctcggtctcgagtgcgaatataagcgaccgatgtggtggagtaacaacgacgccaggagacaacacaaggacaacatcaagatgatcatcaagcgcaagaagctctccgagaagtcgtcacataccattcagacatcaatcagctcgccgccaggtctctctcactccctcccgacctccgcaaccttctcagatccttttgatcgcacgagatcggcgtcaattgactcgcaattccctttcaacttcaacagccctcccaatgccgcagaatatggtgcctataatccccactatctgccaacgcaatcggaattgatgtacaacatgtccccatacgagatagatgtaaagactgaacgccagatgtttgtcaacgatgtcccgacgttgaaagaatcaacaatctcaacgtttagcacttatcatacacctccgccgccaggtacgatactacctagctacccggtggagggcggcgaatggaccgagcacatctaccaggagcgtcgggagtctttagctgaggagtcattaaacgtcaactttttcgacttctcccatggaccatcgagacaaattgacattgagctagacgagaacgatcagcgcctgttggatcacttcattcaatatgttctgcccaccatttttcccattcttgagacaaaccaacacgggtctgttggctctgatctgattctccctgctttacaaactaacaagggctaccttcactgttgcctcatgattgctgcccagcatttcaaagccacgatgaacatccaaagcgaagaaattgacaatgatattatgcgacatcgacatgcgacgattttgtcactctgcgaggcgctcaaccaggacgaaaatcaccaacaaatccttgaagctaccttgggtcttatcttcttccagtgctgcgttggccgatacggcgactcgctccccgacattgcatggcatcagcactttcaggcggtcttttctttggtcaacaaactcgagttgccccagctcgtcgccaatcccgctgatcaaatgtcacaaactcccttcaatatgacattgactgcctggatcgatatactaggctcgacaatgcagggacgcgcaccctctttcgcgcacacttacagggagaagcatctttcaactgcaaatagctcccttggcctacgcgagctcatgggttgtgaagatcgtgttatgtacctaatctccgaaattgcttgtctcgaggcattgaagagagacggtatggacgacattactctatgtacgcacgttcattcgctcggcgagcaaatcaatctcaccgaaacaggtgattgcgcagctaaaatgccgttcaacgccaacggatccttgagccccaagcaattgagcaagaacatcacaagtgctttccgcttggctgcgcgcatctatctgtgcagcctagtccctggcttttctcctagccaaggtagctgtgtaggccttgtcgaaaagctcactaccgtccttcaacacatcccgtcgggacctggtggcttcgaccgaagtctttcttgggtttacttgatcggtggctctgtatgcggtgcaaagtctactttcagacagttttttagcgatcgaatttctcagcttggtgattctgctagctttgggagcttcggcggagttgtgtctcttttgcacgaagtctggcagcaggtcgacagcttccagccaaccccaagtggcacaggaccaactgaggcaccatacatctcctggagagatgttatgcaaatgagaggatgggattaccttctgatatga

SEQ ID NO: 26325 - protein, 677 aa, Muscodor strobelii
  misc_feature: SGI Peptide ID NO. 569000
  misc_feature (51)..(89): Pfam Id: PF00172 Pfam Desc: Fungal Zn(2)-Cys(6) binuclear cluster domain
  misc_feature (34)..(677): NCBI GI: 116180730 Blast Desc: conserved [Chaetomium globosum CBS 148.51] gi|88185290|gb|EAQ92758.1| conserved [Chaetomium globosum CBS 148.51]
  misc_feature (20)..(677): NCBI GI: 46125379 Blast Desc: FG07067.1 [Gibberella zeae PH-1]
  misc_feature (39)..(647): NCBI GI: 261356095 Blast Desc: transcriptional regulatory protein pro-1 [Verticillium albo-atrum VaMs.102]
  misc_feature (20)..(677): NCBI GI: 256733058 Blast Desc: [Nectria haematococca mpVI 77-13-4]
  misc_feature (1)..(677): NCBI GI: 209944105 Blast Desc: PRO1 [Cryphonectria parasitica]
  misc_feature (1)..(677): NCBI GI: 8218220 Blast Desc: PRO1 protein [Sordaria macrospora]
  misc_feature (1)..(677): NCBI GI: 14285695 Blast Desc: PRO1_NEUCR RecName: Full=Transcriptional regulatory protein pro-1 gi|7688261|emb|CAB89818.1| PRO1 [Neurospora crassa] gi|7688263|emb|CAB89819.1| PRO1 protein [Neurospora crassa]
  misc_feature (39)..(677): NCBI GI: 164424287 Blast Desc: NCU07392 [Neurospora crassa OR74A] gi|157070451|gb|EAA29240.2| NCU07392 [Neurospora crassa OR74A]
  misc_feature (36)..(677): NCBI GI: 39974719 Blast Desc: MGG_00494 [Magnaporthe grisea 70-15] gi|145018610|gb|EDK02889.1| MGG_00494 [Magnaporthe grisea 70-15]
  misc_feature (1)..(671): NCBI GI: 7688277 Blast Desc: PRO1 protein [Sordaria brevicollis]
  misc_feature: Useful for introducing or modulating the production of volatile compounds
MSTLPPNSREGFMRAAPVNMAAAQPAKSKASRAGNNANPKAKTQMHRRSRTGCYTCRLRRKKCDEGTPMCTACKHLGLECEYKRPMWWSNNDARRQHKDNIKMIIKRKKLSEKSSHTIQTSISSPPGLSHSLPTSATFSDPFDRTRSASIDSQFPFNFNSPPNAAEYGAYNPHYLPTQSELMYNMSPYEIDVKTERQMFVNDVPTLKESTISTFSTYHTPPPPGTILPSYPVEGGEWTEHIYQERRESLAEESLNVNFFDFSHGPSRQIDIELDENDQRLLDHFIQYVLPTIFPILETNQHGSVGSDLILPALQTNKGYLHCCLMIAAQHFKATMNIQSEEIDNDIMRHRHATILSLCEALNQDENHQQILEATLGLIFFQCCVGRYGDSLPDIAWHQHFQAVFSLVNKLELPQLVANPADQMSQTPFNMTLTAWIDILGSTMQGRAPSFAHTYREKHLSTANSSLGLRELMGCEDRVMYLISEIACLEALKRDGMDDITLCTHVHSLGEQINLTETGDCAAKMPFNANGSLSPKQLSKNITSAFRLAARIYLCSLVPGFSPSQGSCVGLVEKLTTVLQHIPSGPGGFDRSLSWVYLIGGSVCGAKSTFRQFFSDRISQLGDSASFGSFGGVVSLLHEVWQQVDSFQPTPSGTGPTEAPYISWRDVMQMRGWDYLLI

SEQ ID NO: 26326 - DNA, 3090 bp, Muscodor strobelii
  misc_feature: SGI EST ID NO. CUFF.62431.1
  misc_feature: Variant of the nucleotide sequence at SEQ ID NO 26324
tttaaatctgttgctatttttgaacacagcccatccaccaagaaagcaccaactcatgatgcaggtcaatgagggcaaggccatgatataaggcttcacgcatcacctttgcccaccattcgttctcttcgatggaggtgaagggtaaaatatccaagtgtcgttccatttctccttcatcatctcctcctctctttcctccgcctccccccgactctcttatccgctaactcatattaacgtgaaaggcaagctggtacttgcttggatcaacacattcattcgacgagaagtaatattaattatcacaaatttcaaccgctagcttgggcctcgactggtatcgtctcccaaaccccggcacaggaatattcatctttcgagtgggcttggagaatcagtggactgccgaaggaaccctggcaatatcggcttggacctggaccccggcgcctcttgatctcctcccgctttcgctccgcttgttgactagcatcgagcatccccccacccacctatactcgcatatcaacgcaggtacctcgacaccccgagcgtaacatacaaatgtcaaccttaccccccaactcgcgtgaaggcttcatgagagcagcacccgtcaacatggctgccgcacaacccgcaaagtcgaaggcttcaagggccggtaacaatgcaaacccaaaagcaaagacacagatgcatcgtcgttcaagaacaggctgctacacctgcagattacggcgcaaaaagtgcgatgagggaacaccaatgtgcactgcttgcaagcatctcggtctcgagtgcgaatataagcgaccgatgtggtggagtaacaacgacgccaggagacaacacaaggacaacatcaagatgatcatcaagcgcaagaagctctccgagaagtcgtcacataccattcagacatcaatcagctcgccgccaggtctctctcactccctcccgacctccgcaaccttctcagatccttttgatcgcacgagatcggcgtcaattgactcgcaattccctttcaacttcaacagccctcccaatgccgcagaatatggtgcctataatccccactatctgccaacgcaatcggaattgatgtacaacatgtccccatacgagatagatgtaaagactgaacgccagatgtttgtcaacgatgtcccgacgttgaaagaatcaacaatctcaacgtttagcacttatcatacacctccgccgccaggtacgatactacctagctacccggtggagggcggcgaatggaccgagcacatctaccaggagcgtcgggagtctttagctgaggagtcattaaacgtcaactttttcgacttctcccatggaccatcgagacaaattgacattgagctagacgagaacgatcagcgcctgttggatcacttcattcaatatgttctgcccaccatttttcccattcttgagacaaaccaacacgggtctgttggctctgatctgattctccctgctttacaaactaacaagggctaccttcactgttgcctcatgattgctgcccagcatttcaaagccacgatgaacatccaaagcgaagaaattgacaatgatattatgcgacatcgacatgcgacgattttgtcactctgcgaggcgctcaaccaggacgaaaatcaccaacaaatccttgaagctaccttgggtcttatcttcttccagtgctgcgttggccgatacggcgactcgctccccgacattgcatggcatcagcactttcaggcggtcttttctttggtcaacaaactcgagttgccccagctcgtcgccaatcccgctgatcaaatgtcacaaactcccttcaatatgacattgactgcctggatcgatatactaggctcgacaatgcagggacgcgcaccctctttcgcgcacacttacagggagaagcatctttcaactgcaaatagctcccttggcctacgcgagctcatgggttgtgaagatcgtgttatgtacctaatctccgaaattgcttgtctcgaggcattgaagagagacggtatggacgacattactctatgtacgcacgttcattcgctcggcgagcaaatcaatctcaccgaaacaggtgattgcgcagctaaaatgccgttcaacgccaacggatccttgagccccaagcaattgagcaagaacatcacaagtgctttccgcttggctgcgcgcatctatctgtgcagcctagtccctggcttttctcctagccaaggtagctgtgtaggccttgtcgaaaagctcactaccgtccttcaacacatcccgtcgggacctggtggcttcgaccgaagtctttcttgggtttacttgatcggtggctctgtatgcggtgcaaagtctactttcagacagttttttagcgatcgaatttctcagcttggtgattctgctagctttgggagcttcggcggagttgtgtctcttttgcacgaagtctggcagcaggtcgacagcttccagccaaccccaagtggcacaggaccaactgaggcaccatacatctcctggagagatgttatgcaaatgagaggatgggattaccttctgatatgaggtacctatccgggaagaaaagaaataaagaagcaggacttggaagagatgatcaggatatcatcggcgctcaggagccatttcttcttactacacgacacataattataccaaagagagagcgccgcaaggcgaattggagcgacacttggacttggaattttattcatattatcagagatacttatctcgcacaaagcgcagcgcagcgcagcatcgaccgcgacgaactggatcatgtcatggcttatgaggagacagcggtgaatttttctcatttcgtctttttccccttgaattggatctacgtcttgatatacccaggcatacttggagaggagaaggcgtctagatacgggaagggttatgggatagcaccgctattgaatgcttcctacctctcccactcagtgaactcagcgtaattaacacattaccttaaaaaaatcaataaataatctctatacaatccaacactctcattaacaa

SEQ ID NO: 26327 - DNA, 447 bp, Muscodor strobelii
  misc_feature: SGI cDNA ID NO. 569001
  misc_feature: Elevated expression when VOC is produced
  misc_feature: Encodes the peptide sequence at SEQ ID NO 26328
atgggattaccttctgatatgaggtacctatccgggaagaaaagaaataaagaagcaggacttggaagagatgatcaggatatcatcggcgctcaggagccatttcttcttactacacgacacataattataccaaagagagagcgccgcaaggcgaattggagcgacacttggacttggaattttattcatattatcagagatacttatctcgcacaaagcgcagcgcagcgcagcatcgaccgcgacgaactggatcatgtcatggcttatgaggagacagcggtgaatttttctcatttcgtctttttccccttgaattggatctacgtcttgatatacccaggcatacttggagaggagaaggcgtctagatacgggaagggttatgggatagcaccgctattgaatgcttcctacctctcccactcagtgaactcagcgtaa

SEQ ID NO: 26328 - protein, 148 aa, Muscodor strobelii
  misc_feature: SGI Peptide ID NO. 569001
  misc_feature: Useful for introducing or modulating the production of volatile compounds
MGLPSDMRYLSGKKRNKEAGLGRDDQDIIGAQEPFLLTTRHIIIPKRERRKANWSDTWTWNFIHIIRDTYLAQSAAQRSIDRDELDHVMAYEETAVNFSHFVFFPLNWIYVLIYPGILGEEKASRYGKGYGIAPLLNASYLSHSVNSA

SEQ ID NO: 26329 - DNA, 3090 bp, Muscodor strobelii; identical to SEQ ID NO: 26326
  misc_feature: SGI EST ID NO. CUFF.62431.1
  misc_feature: Variant of the nucleotide sequence at SEQ ID NO 26327

SEQ ID NO: 26330 - DNA, 792 bp, Muscodor strobelii
  misc_feature: SGI cDNA ID NO. 569002
  misc_feature: Encodes the peptide sequence at SEQ ID NO 26331
atgtcgcatacgcacacaagtccgccacagcggatccgagcggtgttcttcgacttcatgggaacatgcctgaactggcataccgcagtagtcaaggcactacctgctttgattccggaagacatgaggtccattatggcactggattggcgagaagaattcttcagtgagctgcattcgcgttcggaacaagggttggcccccgaagatattgatgtcacgcaccgccgcacgttgcttcgtattcttcgccgcagaccgtatctctcgttccgtcaccactttgtaggtaatttcgaagacgttctggaaaatggagaacataagacgccttatgatccgattgaacgggctgtggagtcttggcatcacatggaagcctggcctgatgtattgcctgcattgacggcactgagagaggagctgaatgtcgagacatttgtgctcgcgaacggtactacgaggttgcaattagatctcgccaagtcctcagccttagcttcttcattcaatttactcttctccagtgagctgctaggttactataagccgcattcggaagcttaccagaaagccatggaacttgtcaaagtgcgcccagagcagtccgtcatggttgcagctcatgcttatgacctacgggctgcgaaatcattggggttgcataccatatatgtgagaagatggacagatgatacgaacgaggatatggacaaagtccgcagcgagaatgagcactttctggaagacgacggcatgagttccttggttgatacgatacgttcattgtaa

SEQ ID NO: 26331 - protein, 263 aa, Muscodor strobelii
  misc_feature: SGI Peptide ID NO. 569002
  misc_feature (12)..(229): Pfam Id: PF00702 Pfam Desc: haloacid dehalogenase-like hydrolase
  misc_feature (1)..(261): NCBI GI: 46115110 Blast Desc: FG03397.1 [Gibberella zeae PH-1]
  misc_feature (20)..(263): NCBI GI: 256722747 Blast Desc: NECHADRAFT_64583 [Nectria haematococca mpVI 77-13-4]
  misc_feature (20)..(263): NCBI GI: 169766260 Blast Desc: [Aspergillus oryzae RIB40] gi|83765456|dbj|BAE55599.1| protein product [Aspergillus oryzae]
  misc_feature (8)..(263): NCBI GI: 242805809 Blast Desc: conserved [Talaromyces stipitatus ATCC 10500] gi|218715234|gb|EED14656.1| conserved [Talaromyces stipitatus ATCC 10500]
  misc_feature (43)..(263): NCBI GI: 238482965 Blast Desc: (S)-2-haloacid dehalogenase IVA, [Aspergillus flavus NRRL3357] gi|220700771|gb|EED57109.1| (S)-2-haloacid dehalogenase IVA, [Aspergillus flavus NRRL3357]
  misc_feature (54)..(263): NCBI GI: 212538707 Blast Desc: haloacid dehalogenase, type II [Penicillium marneffei ATCC 18224] gi|210069251|gb|EEA23342.1| haloacid dehalogenase, type II [Penicillium marneffei ATCC 18224]
  misc_feature (7)..(244): NCBI GI: 242206436 Blast Desc: [Postia placenta Mad-698-R] gi|220731939|gb|EED85779.1| [Postia placenta Mad-698-R]
  misc_feature (12)..(251): NCBI GI: 161521083 Blast Desc: haloacid dehalogenase, type II [Burkholderia multivorans ATCC 17616] gi|189352739|ref|YP_001948366.1| 2-haloacid dehalogenase [Burkholderia multivorans ATCC 17616] II
  misc_feature (12)..(228): NCBI GI: 15596007 Blast Desc: haloacid dehalogenase [Pseudomonas aeruginosa PAO1] gi|254245062|ref|ZP_04938384.1| PA2G_05948 [Pseudomonas aeruginosa 2192] gi|9946703|gb|AAG04199.1|AE004516_4 haloacid
  misc_feature (12)..(228): NCBI GI: 107100271 Blast Desc: PaerPA_01001295 [Pseudomonas aeruginosa PACS2] gi|116048728|ref|YP_792472.1| haloacid dehalogenase [Pseudomonas aeruginosa UCBPP-PA14] gi|152988637|ref|YP_001350050.1| haloacid
  misc_feature (12)..(228): SWISSPROT Homolog: EC 3.8.1.2 (S)-2-haloacid dehalogenase
MSHTHTSPPQRIRAVFFDFMGTCLNWHTAVVKALPALIPEDMRSIMALDWREEFFSELHSRSEQGLAPEDIDVTHRRTLLRILRRRPYLSFRHHFVGNFEDVLENGEHKTPYDPIERAVESWHHMEAWPDVLPALTALREELNVETFVLANGTTRLQLDLAKSSALASSFNLLFSSELLGYYKPHSEAYQKAMELVKVRPEQSVMVAAHAYDLRAAKSLGLHTIYVRRWTDDTNEDMDKVRSENEHFLEDDGMSSLVDTIRSL

SEQ ID NO: 26332 - DNA, 1686 bp, Muscodor strobelii
  misc_feature: SGI EST ID NO. CUFF.62058.1
  misc_feature: Variant of the nucleotide sequence at SEQ ID NO 26330
cagaagatgtatgagattagccgagctagctaagcggtgagtgtcgaaagaggcctcatgatgtcttttagagagtctcgtgagtcacggtattaaacgtctccatttccagtgttcgaatttcgccgctgcggccatttagcttgcaagatcggactgtggggtgattgatggcgaggattacgacgagctctacccctgcccaaccaatacctcgcattttcagcatttaaaatccttggtaggatgcggaggaatgcgttactcgaggtatttgtcttgcaatttttcggggctaagtgttgttagcttgagattggtggcagctgcatcattgatcgtcgctatctctgaaggacaacgtaacccgtatctacccgaaagtctggaccctggattgcctattgatgagacctgaaattgaagcatctaaaacttggaatcactgggatgcgccgatgattcgttggtgggggtcgccctgttctcactgcgccccagattttggcaatacgccaccataaaagagatccaattgggagagtggtttcgcctgcaagtggaatggcccattgtccaagcccgttcttcagtcacgggacaaataactaccggctagagagcagctgacgagagacaagagaacaagacagggcgattaaatgccactgatccatgtcgcatacgcacacaagtccgccacagcggatccgagcggtgttcttcgacttcatgggaacatgcctgaactggcataccgcagtagtcaaggcactacctgctttgattccggaagacatgaggtccattatggcactggattggcgagaagaattcttcagtgagctgcattcgcgttcggaacaagggttggcccccgaagatattgatgtcacgcaccgccgcacgttgcttcgtattcttcgccgcagaccgtatctctcgttccgtcaccactttgtaggtaatttcgaagacgttctggaaaatggagaacataagacgccttatgatccgattgaacgggctgtggagtcttggcatcacatggaagcctggcctgatgtattgcctgcattgacggcactgagagaggagctgaatgtcgagacatttgtgctcgcgaacggtactacgaggttgcaattagatctcgccaagtcctcagccttagcttcttcattcaatttactcttctccagtgagctgctaggttactataagccgcattcggaagcttaccagaaagccatggaacttgtcaaagtgcgcccagagcagtccgtcatggttgcagctcatgcttatgacctacgggctgcgaaatcattggggttgcataccatatatgtgagaagatggacagatgatacgaacgaggatatggacaaagtccgcagcgagaatgagcactttctggaagacgacggcatgagttccttggttgatacgatacgttcattgtaagcatcgaatcaatatgaaatatatatgtatatgtttagtggtcccgaatttgaagagtagattgcgatgagcattatgctcatcaaaggtaaatcacgagggatctcatagtgttttagtccttatgcggcgagcgcattcgaccgtactctcatatatagtagtgattcatacagtcctcacagacatcatgaggtatatcatattgcccgatattgc

SEQ ID NO: 26333 - DNA, 687 bp, Muscodor strobelii
  misc_feature: SGI cDNA ID NO. 569003
  misc_feature: Encodes the peptide sequence at SEQ ID NO 26334
atgcgcagcggcatcaccacctcctccacgccatttgcagcctcgggatcccttcaacctgtttcctgctgggaatcctcttcgccgaattcccctacgactaccccctcctcctggacctcggaccccatcgagccctcctacctcgaccagcttgaaacccacctcaaattcgtgcacaacgcccctgcgctcatcagccgcatgctgaacatcatgatcggcacaggcttcaccggcttcttcatcaagctcttcaaggcctccgagtccaacatcctcttcgacggcgcctctctcgtgctctacgtcatcggcatcggcgtctacgtcgccaacatcgtcaagggcttccgcttcgtcaccagtggcatctggcacaagcccgacttcgagggcaacctgcccgtcgccgagcagaacctccaggagaacggcggccgcgtcgttctgaaccgcgaggacagtctcaaggtcatggccgccagcaacaccatccttgccctcgtcctcgtcggtgtcctgatcctgcaggctggccagtggtacgccgagcgcaaggacaatgaggagtttgagcgcgtcgaggctgagcaggccgagaaagataaggcttctgctgagacgaccggcaagagttccccacctaccgctgctgagaagagggctagcaagaagaagcaatga

SEQ ID NO: 26334 - protein, 228 aa, Muscodor strobelii
  misc_feature: SGI Peptide ID NO. 569003
  misc_feature (20)..(227): Pfam Id: PF08229 Pfam Desc: ER membrane protein SH3
  misc_feature (53)..(114): Pfam Id: PF08229 Pfam Desc: ER membrane protein SH3
  misc_feature (157)..(227): Pfam Id: PF08229 Pfam Desc: ER membrane protein SH3
  misc_feature (32)..(203): NCBI GI: 85090584 Blast Desc: NCU07403 [Neurospora crassa OR74A] gi|28919853|gb|EAA29251.1| conserved [Neurospora crassa OR74A]
  misc_feature (6)..(191): NCBI GI: 46108302 Blast Desc: FG01033.1 [Gibberella zeae PH-1]
  misc_feature (32)..(228): NCBI GI: 242801443 Blast Desc: secretory component protein shr3, [Talaromyces stipitatus ATCC 10500] gi|218717112|gb|EED16533.1| secretory component protein shr3, [Talaromyces stipitatus ATCC 10500]
  misc_feature (32)..(228): NCBI GI: 212540566 Blast Desc: secretory component protein shr3, [Penicillium marneffei ATCC 18224] gi|210067737|gb|EEA21829.1| secretory component protein shr3, [Penicillium marneffei ATCC 18224]
  misc_feature (32)..(183): NCBI GI: 256734444 Blast Desc: [Nectria haematococca mpVI 77-13-4]
  misc_feature (32)..(228): NCBI GI: 238844502 Blast Desc: secretory component protein SHR3 [Microsporum canis CBS 113480]
  misc_feature (32)..(212): NCBI GI: 39974715 Blast Desc: MGG_00496 [Magnaporthe grisea 70-15] gi|145018608|gb|EDK02887.1| MGG_00496 [Magnaporthe grisea 70-15]
  misc_feature (32)..(228): NCBI GI: 154273394 Blast Desc: conserved [Ajellomyces capsulatus NAm1] gi|150416061|gb|EDN11405.1| conserved [Ajellomyces capsulatus NAm1] gi|225555738|gb|EEH04029.1| conserved [Ajellomyces G186AR]
  misc_feature (32)..(228): NCBI GI: 240279060 Blast Desc: secretory component protein shr3 [Ajellomyces capsulatus H143]
  misc_feature (32)..(203): NCBI GI: 255943031 Blast Desc: Pc18g04510 [Penicillium chrysogenum Wisconsin 54-1255] gi|211587017|emb|CAP94675.1| Pc18g04510 [Penicillium chrysogenum Wisconsin 54-1255]
MRSGITTSSTPFAASGSLQPVSCWESSSPNSPTTTPSSWTSDPIEPSYLDQLETHLKFVHNAPALISRMLNIMIGTGFTGFFIKLFKASESNILFDGASLVLYVIGIGVYVANIVKGFRFVTSGIWHKPDFEGNLPVAEQNLQENGGRVVLNREDSLKVMAASNTILALVLVGVLILQAGQWYAERKDNEEFERVEAEQAEKDKASAETTGKSSPPTAAEKRASKKKQ

SEQ ID NO: 26335 - DNA, 4013 bp, Muscodor strobelii
  misc_feature: SGI EST ID NO. CUFF.62062.0
  misc_feature: Variant of the nucleotide sequence at SEQ ID NO 26333
caaaactctataatttacacaatggagctatacagctacaagtgttagcgattgcctacccaaggcttgggagtttggacgagttcgttatatagtcccggatctaaaggcatcaagtattgttgctaagctcacgatctaccctggaagggcatgtcgaccgaagagaccgaactgcggtaacgagtcacgactacgccaagatttctattccagaccctgaggagcagcatcagctagcatcaattcggtaagctgaaaacgaaaaccaccaacgccgacgaattcacatcgcgcacactgtgaatgtgataaggacacatcttgttctgtcacctccccgctgtccatcagagcagcagacgactacaatcttccatcacggcctttttgcttgcacttttttctttttcaaaaatcgaggcaacgaagcaactgcctacacacggaatctagcttcacccgcaagcgcaactctcctttgcgctcctcctcgacagacaaacccccttttacacttgtcctggataaccaccgttcttgatcgtcgccatgccggagaaatgggtggactggtctaaaaatgtgcggtctaagaactatcgcggttccgcctcgtttgcgaccttcatgatcatcggcccaacctgtttcctgctgggaatcctcttcgccgaattcccctacgactaccccctcctcctggacctcggaccccatcgagccctcctacctcgaccagcttgaaacccacctcaaattcgtgcacaacgcccctgcgctcatcagccgcatgctgaacatcatgatcggcacaggcttcaccggcttcttcatcaagctcttcaaggcctccgagtccaacatcctcttcgacggcgcctctctcgtgctctacgtcatcggcatcggcgtctacgtcgccaacatcgtcaagggcttccgcttcgtcaccagtggcatctggcacaagcccgacttcgagggcaacctgcccgtcgccgagcagaacctccaggagaacggcggccgcgtcgttctgaaccgcgaggacagtctcaaggtcatggccgccagcaacaccatccttgccctcgtcctcgtcggtgtcctgatcctgcaggctggccagtggtacgccgagcgcaaggacaatgaggagtttgagcgcgtcgaggctgagcaggccgagaaagataaggcttctgctgagacgaccggcaagagttccccacctaccgctgctgagaagagggctagcaagaagaagcaatgatcccgccctatccacgtggcacccttgattccatgtgtagagaaaaggatattttatgagattggtggatgtattcatgtatatgcatatcgcttgctagtaatttagagttgcttgattacattcacctttggctaagcacgcagtctatgttggctatccccggatattctgattctcccgagtcacggcctctcctatgtatgtaaatggtcgcctgaacaccaagcagaatatctcaaaactatgtcaattggacagcatatacactgcactattataaacaaatggtatctcaaattccaagacattatatgccatcaaacgccatgccatgcaaacgatttcacgcgccgcgtgtcctcccaattaactacgcccttctgcgaaccggagattcaggttgaggtacaggtggagcttgaggcatcttttccatagtcggccagaccgttccgcggttgttattaggggggtttattcccgtgtcgagggtgacgttgatgctctcactaccgccactaccctcacggggcctgttgtaggcattcgcagcctggaaatcagatccatacgagtaacgatctgtgccgttagagtaacgattcgtgaggctccgcgaattgctcaaaggcggaggttcggccgacacatgatggctgcgggcagatgtagcattgtcggtactgtctcgcgggtatccgtaagacggcgactgccaagcaggtgaccgaggcgagaaacggtcttgcacctgcgttggcgaggaagcgtaactcgagctctggcctattggttggccgacgaacacctggcgcccggctgggtacttgtcgtgtagcatcggattgccgattattgggacacctatagatgacgaccctgaccgacgcttctcatcgtctgctttgttacgattacgccgacagcaaaagaagactactcctgcgatgagggcgaaggctaagagtcccccaatcactcccccgaccactgcggctgtgttcgtgcttttcgccgccgttgttcctgacgatgacgccggacttgttgagctagctgtactagctgtggatgtgtgtgcgcccgaggtagtggcacttgggtgagtagctgaagtagagggactcgtcgattcgcctggtttgaggctttgatcatcatcttctatacagttccccgaatcgcaatggaacccaaaaggacagcagccgttggcacaggtcgggagttttatatctatttccgttgtcttaacctcggctgatggaaatttggaggggtcctgaagtgtgatgttgcagctaataggctcgatgaccgaacaatcgctaccatttgggcagcatactactgtcgtgttgccggcaaggactaagcatgtctcctttgtgccgcagcagaaattggccggcagtcctgcttgcggacatttcgacgagccggcggcacaagtgtctgccctttcgagtagccatccaggctgtatcgaggatgcagaaacgagcgtcagtgccgctgcgagatagaagaaaagcgtcgggtgttgggcgattggcatcactcggcagattcgcttaacgtgctgaggaatgctgcgtactttcgcgaggcgatcgatggttgatgctattaaatatagagatattgagcgagcaataagtgtgtgagttgagtgagacagaaaatattactgaaaaatctatgtaacgtcaagaaaagatctagtttattcacgaggattccctacgagcgatgcagtgcaagggtgaatagagttatagttgtgcaagaggtcacgatgacacaatgaatgtcatgtcggaagaaggtgttggagactgagttgacgatctacaaagagagatttgggtcaaacaaaggcaagtctagcgacgaaccaacggggaggaaggacaagaacaaggacgagaacaagatctgtactaaggcatggtgacgggggcccaaagggtcttcgagcttttctttgtttctagttcgagacaatcatttggatctttgggccaggatagacccgagaaacggactcctatcgaaacatttcgactgaaccgagcgacatacaacactcgcgtgaacaagaggcagccactgactagagattgtaccagttaaaattagtcgacagcggcgtctctggggctgcagaatggggtctgtcaattcggtagcaatatcgcagagccaccgtcggcattaaacagcctggtcatggcgagaacgaaaggctatggtgaagcgaatcgctcaaggttgctcttctttgggcggctataagtgcgcaaggttacatgcgaagagaattgagaggacgaggttggcccgagtcggattcacattaggcgcgactagtccagacaacggcctgtgattggaccttctggttgcagggttagcgcgacctctcatcaggtacaccaaattgtcattccgccccacctgacgactccttcttgaagcaaccaaagagtcgtttttctctctttcggccccagtcgtgaaacaaacactataatgcctcaagacttggacacgtatgatggcgcagaaaaagatgtgcttctatatctacaatagcgggggcagtgcagcatggtttgcatcactgatcatagaatactgctacagtcgcgagactcaacttagtcatacagtcaatcataggtagtacgacgcttgtgaagcggcgaaatgaatgaaaggtccattgccg

SEQ ID NO: 26336 - DNA, 999 bp, Muscodor strobelii
  misc_feature: SGI cDNA ID NO. 569004
  misc_feature: Encodes the peptide sequence at SEQ ID NO 26337
atggcactatctgctcaatgcacgaatgttacagaggacacaaaaacaacatgcaacagtgtcggatcgtcacagacctgcgagtacattacaccttctgacttcaaaatctctgcttcgtcagcattcagtcagggaggcgccacctacacccttttcaattcctcgggaatatcaagatggaatcgaacgctggattgggccaacagcacgcttgtgcagttcgccacggtcaacattacgtcccatgagacttctacgggagggactgatgcagattatgagaatccttatgttctggaatgctcgatgaagtggagagccagaacttttcacggcatttttgtcgagaacgggacgttcctcgctggagataccgatgatcatgacttagatggggttgtggtcgagaacccgacttctggttctgccgccgcaggtgatgctttttggtggccgcaaaactattattatacaattaccaacgcgaccacgaatgatctcaaggatctgaaatttgtcatcaatcctaacgaccacggaatcattgccgggcatctacagcaagttttcaattcggactcaagcagtgactacggtatggcgcttatgcaaagtaccgatctcgttcagacgatccagaacatcacgacgagcgtgacatatgcgcttggccagggatcaaacgcgactatagcgaacgggacgatttataccaccgagacttacatcaaagtgcaatggcaatggatttcattgccactgctggttgtatttgcctctatgcttttcttcatcctgacgatagtccattcgagaaatcgcaatgtagcgacttggaaggcttcaagcttactgccgctgtttacacagtttgctggatggcataattcggacctcatcgtcaattcgccgcgacaaatggacatacgagttcggcagatgggcgcgagattccatgtcaatgaggatgggcccaggttgacggctgcgacgtga

SEQ ID NO: 26337 - protein, 332 aa, Muscodor strobelii
  misc_feature: SGI Peptide ID NO. 569004
  misc_feature (6)..(289): NCBI GI: 238495102 Blast Desc: conserved [Aspergillus flavus NRRL3357] gi|220695437|gb|EED51780.1| conserved [Aspergillus flavus NRRL3357]
  misc_feature (1)..(311): NCBI GI: 256729615 Blast Desc: NECHADRAFT_95402 [Nectria haematococca mpVI 77-13-4]
  misc_feature (1)..(315): NCBI GI: 145243784 Blast Desc: An11g04090 [Aspergillus niger] gi|134079085|emb|CAK48394.1| protein product [Aspergillus niger]
  misc_feature (208)..(293): NCBI GI: 240280136 Blast Desc: conserved [Ajellomyces capsulatus H143]
  misc_feature (208)..(293): NCBI GI: 225560573 Blast Desc: conserved [Ajellomyces capsulatus G186AR]
  misc_feature (1)..(289): NCBI GI: 240111281 Blast Desc: CPC735_071160 [Coccidioides posadasii C735 delta SOWgp]
  misc_feature (207)..(330): NCBI GI: 115400213 Blast Desc: [Aspergillus terreus NIH2624] gi|114191361|gb|EAU33061.1| [Aspergillus terreus NIH2624]
  misc_feature (109)..(323): NCBI GI: 169785503 Blast Desc: [Aspergillus oryzae RIB40] gi|83775960|dbj|BAE66079.1| protein product [Aspergillus oryzae]
  misc_feature (196)..(285): NCBI GI: 159125812 Blast Desc: conserved [Aspergillus fumigatus A1163]
  misc_feature (196)..(285): NCBI GI: 70985502 Blast Desc: conserved [Aspergillus fumigatus Af293] gi|66845885|gb|EAL86219.1| conserved [Aspergillus fumigatus Af293]
MALSAQCTNVTEDTKTTCNSVGSSQTCEYITPSDFKISASSAFSQGGATYTLFNSSGISRWNRTLDWANSTLVQFATVNITSHETSTGGTDADYENPYVLECSMKWRARTFHGIFVENGTFLAGDTDDHDLDGVVVENPTSGSAAAGDAFWWPQNYYYTITNATTNDLKDLKFVINPNDHGIIAGHLQQVFNSDSSSDYGMALMQSTDLVQTIQNITTSVTYALGQGSNATIANGTIYTTETYIKVQWQWISLPLLVVFASMLFFILTIVHSRNRNVATWKASSLLPLFTQFAGWHNSDLIVNSPRQMDIRVRQMGARFHVNEDGPRLTAAT

SEQ ID NO: 26338 - DNA, 3351 bp, Muscodor strobelii
  misc_feature: SGI EST ID NO. CUFF.62073.0
  misc_feature: Variant of the nucleotide sequence at SEQ ID NO 26336
gccaacagcacgcttgtgcagttcgccacggtcaacattacgtcccatgagacttctacgggagggactgatgcagattatgagaatccttatgttctggaatgctcgatgaagtggagagccagaacttttcacggcatttttgtcgagaacgggacgttcctcgctggagataccgatgatcatgacttagatggggttgtggtcgagaacccgacttctggttctgccgccgcaggtgatgctttttggtggccgcaaaactattattatacaattaccaacgcgaccacgaatgatctcaaggatctgaaatttgtcatcaatcctaacgaccacggaatcattgccgggcatctacagcaagttttcaattcggactcaagcagtgactacggtatggcgcttatgcaaagtaccgatctcgttcagacgatccagaacatcacgacgagcgtgacatatgcgcttggccagggatcaaacgcgactatagcgaacgggacgatttataccaccgagacttacatcaaagtgcaatggcaatggatttcattgccactgctggttgtatttgcctctatgcttttcttcatcctgacgatagtccattcgagaaatcgcaatgtagcgacttggaaggcttcaagcttactgccgctgtttacacagtttgctggatggcataattcggacctcatcgtcaattcgccgcgacaaatggacatacgagttcggcagatgggcgcgagattccatgtcaatgaggatgggcccaggttgacggctgcgacgtgagatgtgtacctgcatgttgaaggatcgtagatgatagaaattaaatatattgtatcaagcatatcagcaacctcaatagaaccatattcttgttgagcaaagtatgttgtggtagagatagaggtttgtatgaccacgccaggaaatttgggtaagcaggcaaacggctcaagctaataggcaaaggctaaggtaaggagggagtagaaaccggaatgaccgggggctctctcgtaccaacaaggaccagcaccaactgtccaggtgcacggagctgcggctgcagataagccttcgtcctttcacctctatcttatgttgtttctaccatacgatgtctggattcatagcatcaagcgttctggcggccgtgatcgcgctcgtcgcccgctttgtcctcgccttcagggccaatcgacgacatgtacggaagcttgaggcggcaaatgtggtaagctagactcaatcgcacaccacagcgctctgctgacgatgttgaaagccgatgccccaattgcatcctgttgcgggtcatctagtcgcgctcaaggagtctacgcagagtctgccccggaacacgacgatgcatgttgtcattcaacaaatggcgaggcgctttccaaagggcatattctacctgaacttgtggccttttaacaagacgatgatcgtcgtcgccaaccatttgccgctgctcaggtcgaggcggccttcctcgacaagccggctgctatgtgcgacacgctggagatcatcaacggggggccgtccttgatgacgatgcacggatctacctggaagagatggcgcggcttcttcaaccccggtttcgccgccggctacatgaccggactcgccccggccatcgccggcgaagtagccgtcttctgcaccttactccagaacctcgcacgaaaggggggtatgttccagctggaggagcacacactgcgactcacttttgatgtcattagtcgcgtgacattcgatgcgcggcttcactaccagacacaggggagtgctctcgcagactgcctccggcggcaggtatactggacaccatttggaacgagctttaatcctttccgccgctatctcagcctccgcccgctcgtgcagaagtacaacagctaccgcatggactcgtacttggacgaggagattgacaagcgcttcgaagagctcgcacactctcgccagagccagcccaaagggacgaaggcggcgtctaagtctataatcgccctagccatggataagtatctagaagaggttggcagcgagggagacctttcgaagaaggcgttcaagaagcttgccaagccacagcttcgtatgttcctctacgctggccacgacacgacgagcagcacgctgctgtactgttttctgctactctcacggcatccggaagtactatcgagactccacgccgaacacgacgaggttttcggcgcgcaatcgtctgccgacagctacgtccagtccatcgaaagcgatcctgctatcatgaatcggatcccctatacattagccgtcatcaaagaagtcctccgtgtcttccctcccgctggaagtctacgtgacggccgacccgacttcgtccttaccgacgaggacggtaagcaataccctaccgaagactgccacatatggaccctcagcctggccatgcatcatcaacccggcgtcttcgtgagaccggacgagtttctccccgaccggtggctagttggcccggaagacccgctgcatccgacgaaaggctcgtggcgggctttcgaatggggccaacgtagctgcattggtcagactctcgcgcagatggagctaaaggtcgcgctcgtcatgacgatcaggatatttgacattacgcctgcctacgaggagtgggatcgcctgcatcccaccgagggcattaggtcagtcaacggggaccgggcgtaccaagcggagatgggcggtggtggttcacatccagtcgatggtttcccggttcgagtcacgatcagggggtaggtagcattggatgcgtgcgtaatagtagtgagtggctaccataggtagcatcacccccgtgacacgtgacgccatctgcaaatgtgatgctcgcttagtcctagaccagctacttttgaacaccagcctcagctccaggtgttgtcgggtagcgaccctatcctgacatgttacttcactattacgaaacggccgcgcgttggcgatcctgctcgctaaagaatttaatcatgacatatgaaatagcgaactagcctaactttggcagtggcttttttgcgctgcgagcctccctaatcactaggagctacctaagggaagcaatggattcggagatgactacctcatattcgtactgaacctcgatcgtgagcggccaggtctcagcagagaaaatgctcgtgcaactattatagccagagtacattccatcaatgtggaagttaagcagaacctcggttccccttggtgcattacaaacgagtagttcggtatcgactaagacctgtcgaagattcccttttgaagttccag

SEQ ID NO: 26339 - DNA, 1437 bp, Muscodor strobelii
  misc_feature: SGI cDNA ID NO. 569005
  misc_feature: Elevated expression when VOC is produced
  misc_feature: Encodes the peptide sequence at SEQ ID NO 26340
atgtctggattcatagcatcaagcgttctggcggccgtgatcgcgctcgtcgcccgctttgtcctcgccttcagggccaatcgacgacatgtacggaagcttgaggcggcaaatgtggtcgaggcggccttcctcgacaagccggctgctatgtgcgacacgctggagatcatcaacggggggccgtccttgatgacgatgcacggatctacctggaagagatggcgcggcttcttcaaccccggtttcgccgccggctacatgaccggactcgccccggccatcgccggcgaagtagccgtcttctgcaccttactccagaacctcgcacgaaaggggggtatgttccagctggaggagcacacactgcgactcacttttgatgtcattagtcgcgtgacattcgatgcgcggcttcactaccagacacaggggagtgctctcgcagactgcctccggcggcaggtatactggacaccatttggaacgagctttaatcctttccgccgctatctcagcctccgcccgctcgtgcagaagtacaacagctaccgcatggactcgtacttggacgaggagattgacaagcgcttcgaagagctcgcacactctcgccagagccagcccaaagggacgaaggcggcgtctaagtctataatcgccctagccatggataagtatctagaagaggttggcagcgagggagacctttcgaagaaggcgttcaagaagcttgccaagccacagcttcgtatgttcctctacgctggccacgacacgacgagcagcacgctgctgtactgttttctgctactctcacggcatccggaagtactatcgagactccacgccgaacacgacgaggttttcggcgcgcaatcgtctgccgacagctacgtccagtccatcgaaagcgatcctgctatcatgaatcggatcccctatacattagccgtcatcaaagaagtcctccgtgtcttccctcccgctggaagtctacgtgacggccgacccgacttcgtccttaccgacgaggacggtaagcaataccctaccgaagactgccacatatggaccctcagcctggccatgcatcatcaacccggcgtcttcgtgagaccggacgagtttctccccgaccggtggctagttggcccggaagacccgctgcatccgacgaaaggctcgtggcgggctttcgaatggggccaacgtagctgcattggtcagactctcgcgcagatggagctaaaggtcgcgctcgtcatgacgatcaggatatttgacattacgcctgcctacgaggagtgggatcgcctgcatcccaccgagggcattaggtcagtcaacggggaccgggcgtaccaagcggagatgggcggtggtggttcacatccagtcgatggtttcccggttcgagtcacgatcagggggtag

SEQ ID NO: 26340 - protein, 478 aa, Muscodor strobelii
  misc_feature: SGI Peptide ID NO. 569005
  misc_feature (1)..(459): Pfam Id: PF00067 Pfam Desc: Cytochrome P450
  misc_feature (253)..(459): Pfam Id: PF00067 Pfam Desc: Cytochrome P450
  misc_feature (31)..(477): NCBI GI: 208879566 Blast Desc: AflN [Aspergillus ochraceoroseus]
  misc_feature (36)..(477): NCBI GI: 169774109 Blast Desc: [Aspergillus oryzae RIB40] gi|83769385|dbj|BAE59520.1| protein product [Aspergillus oryzae] gi|84468472|dbj|BAE71324.1| monooxygenase [Aspergillus oryzae]
  misc_feature (36)..(477): NCBI GI: 46370633 Blast Desc: verA [Aspergillus flavus]
  misc_feature (36)..(477): NCBI GI: 67901642 Blast Desc: STCS_EMENI sterigmatocystin biosynthesis P450 monooxygenase STCS (Cytochrome P450 59) [Aspergillus nidulans FGSC A4] gi|40742406|gb|EAA61596.1| STCS_EMENI sterigmatocystin
  misc_feature (36)..(477): NCBI GI: 238054327 Blast Desc: STCS_EMENI RecName: Full= sterigmatocystin biosynthesis P450 monooxygenase stcS; AltName: Full=Cytochrome P450 59 gi|259484163|tpe|CBF80149.1| TPA: sterigmatocystin P450
  misc_feature (36)..(477): NCBI GI: 46370524 Blast Desc: VerA [Aspergillus nomius]
  misc_feature (36)..(477): NCBI GI: 238497407 Blast Desc: aflN/ verA/ monooxygenase [Aspergillus flavus NRRL3357] gi|220694819|gb|EED51163.1| aflN/ verA/ monooxygenase [Aspergillus flavus NRRL3357]
  misc_feature (36)..(477): NCBI GI: 171693177 Blast Desc: protein product [Podospora anserina] gi|170946537|emb|CAP73338.1| protein product [Podospora anserina]
  misc_feature (36)..(477): NCBI GI: 46370474 Blast Desc: VerA [Aspergillus flavus]
  misc_feature (36)..(477): NCBI GI: 46370545 Blast Desc: VerA [Aspergillus flavus]
  misc_feature (61)..(449): SWISSPROT Homolog: EC 1.14.14.1 Unspecific monooxygenase
  misc_feature: Useful for introducing or modulating the production of volatile compounds
MSGFIASSVLAAVIALVARFVLAFRANRRHVRKLEAANVVEAAFLDKPAAMCDTLEIINGGPSLMTMHGSTWKRWRGFFNPGFAAGYMTGLAPAIAGEVAVFCTLLQNLARKGGMFQLEEHTLRLTFDVISRVTFDARLHYQTQGSALADCLRRQVYWTPFGTSFNPFRRYLSLRPLVQKYNSYRMDSYLDEEIDKRFEELAHSRQSQPKGTKAASKSIIALAMDKYLEEVGSEGDLSKKAFKKLAKPQLRMFLYAGHDTTSSTLLYCFLLLSRHPEVLSRLHAEHDEVFGAQSSADSYVQSIESDPAIMNRIPYTLAVIKEVLRVFPPAGSLRDGRPDFVLTDEDGKQYPTEDCHIWTLSLAMHHQPGVFVRPDEFLPDRWLVGPEDPLHPTKGSWRAFEWGQRSCIGQTLAQMELKVALVMTIRIFDITPAYEEWDRLHPTEGIRSVNGDRAYQAEMGGGGSHPVDGFPVRVTIRG

SEQ ID NO: 26341 - DNA, 3351 bp, Muscodor strobelii; identical to SEQ ID NO: 26338
  misc_feature: SGI EST ID NO. CUFF.62073.0
  misc_feature: Variant of the nucleotide sequence at SEQ ID NO 26339

SEQ ID NO: 26342 - DNA, 2370 bp, Muscodor strobelii
  misc_feature: SGI cDNA ID NO. 569006
  misc_feature: Encodes the peptide sequence at SEQ ID NO 26343
atgggttccaacctcggcgacaatgctgccaacttgccactcgacccgccgcacgacgacgcgcccgccagagcgtccttcttctcgcgcatcgcctcccccttccgctcccgctctcgcaacctgcccgacttccacatccgcctgaaggagccccaccgccagtactcggccggcgaccgcgtccagggcgcagtcgtcctctccgtcatcaagcccttccgcgtcacccacctgaccgtcgccttgcacggccacgtctgcgccttcaagaacgccggtgctgccgcccgcgccctgcccctcagctccgccctcaccccgcacgccggccccagcttccgctaccatggcaatggccacgcctccctcttccacgacgagatcgttctctgcggcgagggccgcctgcagccctccaagtgggaattccagttcgacctgcagttccccgacacagagctgcccagcagcatcgacttcgagagaggcatgattacctacctgataacagcaacgttgacacgcccgacctcaatcatgcccacggccaactgcgaggccagggttgctctcgtcgaaaaggtcgatgtggggctaatcacgcctccgagggaacgcaaggtgtttttgcagacaatgaagcggcgccacggcaagaagaagcacctacaatcgacaggggccttgatcacaccgcgccagccgccctcgactgaggcggccgatgcactgtcagatcgcgactcggcccgcgccaccgagagctccaacgagagtgtccgcaacctcagcaacctggcgtcggtcaaccctgacgacagcaatgtgcaaagatcatctgttggcgtcgacgtgcagagcgagctgagcggcgagagtaataacagcaactcccatagcggccgtggtgccgatggaagtggcgagtcccattctggcagcagatattcgatacgcgaggagagggagattaccgccacagtcgagctgctcaagggcggttgtctgcccggcgacttggtccccgtgaggataaaagtcgagcataatcgctacatgaagagcttgcacggcatcatcgtcacgctctacaggcaagggcgtgtcgactatgccccaccgctatcctcattcaagggtctctcccaggaagatgcccagaaactggaaccagatgaatactaccctaagtccaagactggtcttggtggtctgtcgttgacttcggccggctcctgtagtgtctttaggaaagacctatcgcaagcagtcgctccactgatcattgatccgtcaaccctcaccgccaccatcaccaccgccgtcagagttcccgaggatgcctttccgagcatacggaatgtccctggcgccctcataacctttcggtactatatcgaggtcgttgtcgacctgggcgggaaactggctcgctcatctgctggtctttcacagcctcaacagcccacgagggtaaacactaatagttctctacatggcacctatggcatcgatgtgaatttgctggcgaattggaaaggctccatcgtagacacggatcatattcgtcgagaaaagggagtcatctcggttgtgttcgagactgtggttggcactacggacggttctcgggcacaagggaagaatgtgatgggcgcagtgctcgagaaccaagcgcctgccggcggagagctctacgacggcgacactcatgatcatttcgactggcagaatgaatacgatggtgatcacgactatgagggagagtttgaaccagtagaagaccagccgattcaagaagacccgacccacctgccgactgatcacacgtcatttcacgatttccagactcccaggggacaagcaccgatatacgtgccgcgccccgaattgcccagcgaccgcgatctgacggagaaagagcgggtacgccgggctgagcagcgactgctcccaagtcagcctgagccgcatccagtgacacaacatgaaccatcagaaccatcagcccctgatggtgccgttccgagctcttctaacttagagccacgtataaatagtcaagacaatacatcggctccgacgcttcgcgacgtgagtgggcccaatggagatggtatggacgataagcaagaattggaacgaagaagattgatggccgaagccagcgcgccgcctgacatgcctgaagactgccagaatggagaggcttcggcgccagggcctagtcgtgcgcgctcggaggcacagtgggctcaagagccctctgcaccagttttggatgaagatgatctttatgacgatagaagtacgcatttacatgggactgaaaacaactcggaacctcttccgagatatgagagatga

SEQ ID NO: 26343 - protein, 789 aa, Muscodor strobelii
  misc_feature: SGI Peptide ID NO. 569006
  misc_feature (321)..(482): Pfam Id: PF02752 Pfam Desc: Arrestin (or S-antigen), C-terminal domain
  misc_feature (45)..(199): Pfam Id: PF00339 Pfam Desc: Arrestin (or S-antigen), N-terminal domain
  misc_feature (321)..(476): Pfam Id: PF02752 Pfam Desc: Arrestin (or S-antigen), C-terminal domain
  misc_feature (1)..(789): NCBI GI: 261356322 Blast Desc: pH-response regulator protein palF/RIM8 [Verticillium albo-atrum VaMs.102]
  misc_feature (34)..(789): NCBI GI: 116181706 Blast Desc: CHGG_01481 [Chaetomium globosum CBS 148.51] gi|88185778|gb|EAQ93246.1| CHGG_01481 [Chaetomium globosum CBS 148.51]
  misc_feature (37)..(733): NCBI GI: 256734447 Blast Desc: NECHADRAFT_32116 [Nectria haematococca mpVI 77-13-4]
  misc_feature (34)..(789): NCBI GI: 171696142 Blast Desc: protein product [Podospora anserina] gi|170948313|emb|CAP60477.1| protein product [Podospora anserina]
  misc_feature (24)..(741): NCBI GI: 46108294 Blast Desc: FG01029.1 [Gibberella zeae PH-1]
  misc_feature (26)..(789): NCBI GI: 39951945 Blast Desc: MGG_01615 [Magnaporthe grisea 70-15] gi|73921600|sp|Q52FM1.1|PALF_MAGGR RecName: Full=pH-response regulator protein palF/RIM8 gi|145020538|gb|EDK04667.1| MGG_01615
  misc_feature (19)..(765): NCBI GI: 85118206 Blast Desc: NCU03021 [Neurospora crassa OR74A] gi|73921601|sp|Q7SGZ5.1|PALF_NEUCR RecName: Full=pH-response regulator protein palF/rim-8 gi|28927215|gb|EAA36171.1| crassa to
  misc_feature (26)..(789): NCBI GI: 226289705 Blast Desc: pH-response regulator protein palF/RIM8 [Paracoccidioides brasiliensis Pb18]
  misc_feature (26)..(789): NCBI GI: 225682321 Blast Desc: pH-response regulator protein palF/RIM8 [Paracoccidioides brasiliensis Pb03]
  misc_feature (26)..(789): NCBI GI: 226279828 Blast Desc: pH-response regulator protein palF/RIM8 [Paracoccidioides brasiliensis Pb01]
MGSNLGDNAANLPLDPPHDDAPARASFFSRIASPFRSRSRNLPDFHIRLKEPHRQYSAGDRVQGAVVLSVIKPFRVTHLTVALHGHVCAFKNAGAAARALPLSSALTPHAGPSFRYHGNGHASLFHDEIVLCGEGRLQPSKWEFQFDLQFPDTELPSSIDFERGMITYLITATLTRPTSIMPTANCEARVALVEKVDVGLITPPRERKVFLQTMKRRHGKKKHLQSTGALITPRQPPSTEAADALSDRDSARATESSNESVRNLSNLASVNPDDSNVQRSSVGVDVQSELSGESNNSNSHSGRGADGSGESHSGSRYSIREEREITATVELLKGGCLPGDLVPVRIKVEHNRYMKSLHGIIVTLYRQGRVDYAPPLSSFKGLSQEDAQKLEPDEYYPKSKTGLGGLSLTSAGSCSVFRKDLSQAVAPLIIDPSTLTATITTAVRVPEDAFPSIRNVPGALITFRYYIEVVVDLGGKLARSSAGLSQPQQPTRVNTNSSLHGTYGIDVNLLANWKGSIVDTDHIRREKGVISVVFETVVGTTDGSRAQGKNVMGAVLENQAPAGGELYDGDTHDHFDWQNEYDGDHDYEGEFEPVEDQPIQEDPTHLPTDHTSFHDFQTPRGQAPIYVPRPELPSDRDLTEKERVRRAEQRLLPSQPEPHPVTQHEPSEPSAPDGAVPSSSNLEPRINSQDNTSAPTLRDVSGPNGDGMDDKQELERRRLMAEASAPPDMPEDCQNGEASAPGPSRARSEAQWAQEPSAPVLDEDDLYDDRSTHLHGTENNSEPLPRYER

SEQ ID NO: 26344 - DNA, 6305 bp, Muscodor strobelii
  misc_feature: SGI EST ID NO. CUFF.62205.1
  misc_feature: Variant of the nucleotide sequence at SEQ ID NO 26342
gccatacccccggactcctcgtttagggcgataggcacatgtagacctcctctcttcaaactgcacgtagtccatacatgtacatagcttcaaatccattcacctcacgattgctcggtcaattcacctcatatacatcttcaattgacttggtagtagagggaagcggcagaagacacatacacagttggcgtttatagaacagagatggctgcacctgccctagggaagcgaagtaggccttcggccgacgttgtcgacttcccggccaagcggacacgacgccagactcgctatgactcgctcctcctcaacgatgaaaatgcagacccggaggcagtcagcatccgagacgacgatgacgatgctaatcacgatgctgccaccccatccagcacacctactccctctaagcacaccaccggcgacatcagaaaggcaccttctgtcttcaaaccagtcacgccaagcacgccgcggttccgagatgctctttctcgtgtcccccgtcaccccacgccatcgcatcgcctcggccggcaggatatccaagcgcatgaccccgcagaccccttcgacacccagtgccattcagactgtctatcatctcgccagacagctcttctcgcggagtgccgacccgggccgtctgatcgggcgcgaggacgagcgcagcaccctcaatggcttccttgatcgatgccgcacttccaagcctaatggatgcatctacgtcagcgggtcgccgggcacgggcaaaagtgccatgatcaacgaagctgcgcaggcgattgccgacgacatgcccatcaagaaagcatacataaactgcatgagcatcaaatcatccaaagatctgtacgagtcgctgctagaccagctttcagagacgtcagacgtcgcccaagcggacgcggccgtagctcttcaaaagctattgatgccacgcaagaagtccacagaggtgtacctcgtcattctagatgagatcgaccacatcctcactctggacatggaaagcttatacaaagtgttcgagtggtccatgcagaaaacctcgcgcctcgtccttgtcggcatcgccaacgccttggacctcacagaccgctttctgccgcggctcaaagctcgaaacttgaaacctgaactacttccgttccttccctactcagcggcgcagatcaaaagcatcatcacgggccgattgaagagtctcgtgccggagggaagccctttacccttcatccaccctgcggccatcgagctctgctcgcgaaaagtctcgagccagaccggggatctgcggaaagctttcgagatctgtcgaagggccatcgacttgatcgaggctgaaacgaaacagaaacatgaagctgaagtgcaagaaaaaatcttgctgtctacgccctcgcggcgaccactgggagaaaaagccaatctctcgtcgccacccaaggaagcgccggagaagagcatctcatccatggtggcagagtcactcaagtcactaacaatagaaaatgcgccccgagcaagcatatcacatctcaacaagatcacggcagccgctttcagtcacggaacaaaccagcggctcaagacacttaatctccagcaaaaggcggcgctctgctccctcacggctctcgagaaacgaaaccgcgagtggcgaacgtcgtccttgactagttcaccctctaaggctcaagcggtggcgccgacggtgaaagcattatacgaaacttacaatctactctgtacgcgggactcggtgctccacccactgtcgggttccgagtttcgagaggtcgtgggcagcctggagacgctatcgctcatcactgaagtcaacgggaagacgggctcactggcgatgttgcagacgccaagccgccgaggcaagaagtctgggtttggcagcggcgcagggttggcagacgagaagaaggtggccagttgcgtgggagaaaaggaactggagcaggccgtggacggactaggagcaggtattctgcgaagcatcctgagcggcgaggggttggattgataatggagacggggctggtcaggaatacgcttgttgggttgtctcttgttcagcattgggaggcgttggttatcatattgcatagcgttgtgggcggaattgggtcaatggaagttgtacaacacggatcagttctctgcataggaaactggaagccctgggactggagttttagacagcttgagctatgcattagccaatggcactaggcgggtagctagtgcggatcagaattgagcttaatttgggccaagaaagagccaagggtgtcgatcgtcttgtgtcaacgggtgtgaatcttggccagcaggaagatgtgctgttcatgacaccaaggcgaacgtgcccagagtgccaagggccaggagacagccttcgcagtgccaatagacttggctgctgatggtggataatcgatgagatctgacaaacatgtatacgtagcacctaacgtatatgcgtacctctcccggccactacgataggtgaatacggtatcgggatgcatgtacggtctgcaacggcttcgatcgacttatcagctagtcgtgagcgcgatactcaccgctcgagtcgtgtaagcccaccaatgagtcggcagagcagaagagatgctttttcttctgggcggcgcgagctggagggcggcgcgccggcagtcggtgtgcttctgcatggtactgttgcagcacaagcacgttgtcatacatagtacgacgacatcaacgggaatacacacacacacatatacatggcgggccgcacaacgcgtggcgcggagacatggacgggcagggactggctacggcaaacttctctcctcaacgcagacgatggtgtcgggtgcgcacgttagcagtcgttgtcgagagcattaactgctcgactatatgcgtacatgcagggaattgactgacgggtgatgcatgtcagcagccccgctacatctctccacacaacaggcgagacaggggccctgccgacagtctcctcgacagcgtccagccatcccagagcagaggagcagaggccccccttggaccccgtcagccgggactcgtccgcctctgccactcgttcgtccccgattccccacggctcgccatctgccctccctattgcttattgccatcaccgcccagtggaatcgtgcttagccttggctccaagacctgtccttcccttggcactgttaatgcaacatccaagacacgcccgaagccatcgaatttcttgcctcgtccccatttctatccccgtctccgtccccgtccctgttcctcggccgccgcagcgtcttggcaagtggcctctccccccatcccgtgtgccatcccgcgagaatagtacgacaaagaagacgcccgccttgcccggctcgcccagtcggtacgaggcagcgagccaccacgcgccgtccgtcctgccgcacagagacgaggctaccctgcggttgccccaacgccccaacgccccgacgccctcggtgcagagcctgagcacgcctcggaccgtgtgtcgccatcccgcccgactcgccggtttgtcgcagcctcgtcacactcgacctcgacctcgaccccggggcgttgtgccttgtgccttgcgctgcgctgcgtgccatgcgctgacgtctggggcaaccacacgtcggacctttgtgacatccccaccgtccccccgtgctgaataaatgggttccaacctcggcgacaatgctgccaacttgccactcgacccgccgcacgacgacgcgcccgccagagcgtccttcttctcgcgcatcgcctcccccttccgctcccgctctcgcaacctgcccgacttccacatccgcctgaaggagccccaccgccagtactcggccggcgaccgcgtccagggcgcagtcgtcctctccgtcatcaagcccttccgcgtcacccacctgaccgtcgccttgcacggccacgtctgcgccttcaagaacgccggtgctgccgcccgcgccctgcccctcagctccgccctcaccccgcacgccggccccagcttccgctaccatggcaatggccacgcctccctcttccacgacgagatcgttctctgcggcgagggccgcctgcagccctccaagtgggaattccagttcgacctgcagttccccgacacagagctgcccagcagcatcgacttcgagagaggcatgattacctacctgataacagcaacgttgacacgcccgacctcaatcatgcccacggccaactgcgaggccagggttgctctcgtcgaaaaggtcgatgtggggctaatcacgcctccgagggaacgcaaggtgtttttgcagacaatgaagcggcgccacggcaagaagaagcacctacaatcgacaggggccttgatcacaccgcgccagccgccctcgactgaggcggccgatgcactgtcagatcgcgactcggcccgcgccaccgagagctccaacgagagtgtccgcaacctcagcaacctggcgtcggtcaaccctgacgacagcaatgtgcaaagatcatctgttggcgtcgacgtgcagagcgagctgagcggcgagagtaataacagcaactcccatagcggccgtggtgccgatggaagtggcgagtcccattctggcagcagatattcgatacgcgaggagagggagattaccgccacagtcgagctgctcaagggcggttgtctgcccggcgacttggtccccgtgaggataaaagtcgagcataatcgctacatgaagagcttgcacggcatcatcgtcacgctctacaggcaagggcgtgtcgactatgccccaccgctatcctcattcaagggtctctcccaggaagatgcccagaaactggaaccagatgaatactaccctaagtccaagactggtcttggtggtctgtcgttgacttcggccggctcctgtagtgtctttaggaaagacctatcgcaagcagtcgctccactgatcattgatccgtcaaccctcaccgccaccatcaccaccgccgtcagagttcccgaggatgcctttccgagcatacggaatgtccctggcgccctcataacctttcggtactatatcgaggtcgttgtcgacctgggcgggaaactggctcgctcatctgctggtctttcacagcctcaacagcccacgagggtaaacactaatagttctctacatggcacctatggcatcgatgtgaatttgctggcgaattggaaaggctccatcgtagacacggatcatattcgtcgagaaaagggagtcatctcggttgtgttcgagactgtggttggcactacggacggttctcgggcacaagggaagaatgtgatgggcgcagtgctcgagaaccaagcgcctgccggcggagagctctacgacggcgacactcatgatcatttcgactggcagaatgaatacgatggtgatcacgactatgagggagagtttgaaccagtagaagaccagccgattcaagaagacccgacccacctgccgactgatcacacgtcatttcacgatttccagactcccaggggacaagcaccgatatacgtgccgcgccccgaattgcccagcgaccgcgatctgacggagaaagagcgggtacgccgggctgagcagcgactgctcccaagtcagcctgagccgcatccagtgacacaacatgaaccatcagaaccatcagcccctgatggtgccgttccgagctcttctaacttagagccacgtataaatagtcaagacaatacatcggctccgacgcttcgcgacgtgagtgggcccaatggagatggtatggacgataagcaagaattggaacgaagaagattgatggccgaagccagcgcgccgcctgacatgcctgaagactgccagaatggagaggcttcggcgccagggcctagtcgtgcgcgctcggaggcacagtgggctcaagagccctctgcaccagttttggatgaagatgatctttatgacgatagaagtacgcatttacatgggactgaaaacaactcggaacctcttccgagatatgagagatgacaaaggataaagcgaagttttggaaagcagagacatgacttgtatggatacctttgcatattgttatatatcagttcacgagggaccatgaatatctgtactggccctatgttgatgatccatatgtgtatgactgacctgtgatgatggttgtacgtattgttgagttcagagattaattacagtgattggatg

SEQ ID NO: 26345 - DNA, 1773 bp, Muscodor strobelii
  misc_feature: SGI cDNA ID NO. 569007
  misc_feature: Encodes the peptide sequence at SEQ ID NO 26346
atggctgcacctgccctagggaagcgaagtaggccttcggccgacgttgtcgacttcccggccaagcggacacgacgccagactcgctatgactcgctcctcctcaacgatgaaaatgcagacccggaggcagtcagcatccgagacgacgatgacgatgctaatcacgatgctgccaccccatccagcacacctactccctctaagcacaccaccggcgacatcagaaaggcaccttctgtcttcaaaccagtcacgccaagcacgccgcggttccgagatgctctttctcgtaccccttcgacacccagtgccattcagactgtctatcatctcgccagacagctcttctcgcggagtgccgacccgggccgtctgatcgggcgcgaggacgagcgcagcaccctcaatggcttccttgatcgatgccgcacttccaagcctaatggatgcatctacgtcagcgggtcgccgggcacgggcaaaagtgccatgatcaacgaagctgcgcaggcgattgccgacgacatgcccatcaagaaagcatacataaactgcatgagcatcaaatcatccaaagatctgtacgagtcgctgctagaccagctttcagagacgtcagacgtcgcccaagcggacgcggccgtagctcttcaaaagctattgatgccacgcaagaagtccacagaggtgtacctcgtcattctagatgagatcgaccacatcctcactctggacatggaaagcttatacaaagtgttcgagtggtccatgcagaaaacctcgcgcctcgtccttgtcggcatcgccaacgccttggacctcacagaccgctttctgccgcggctcaaagctcgaaacttgaaacctgaactacttccgttccttccctactcagcggcgcagatcaaaagcatcatcacgggccgattgaagagtctcgtgccggagggaagccctttacccttcatccaccctgcggccatcgagctctgctcgcgaaaagtctcgagccagaccggggatctgcggaaagctttcgagatctgtcgaagggccatcgacttgatcgaggctgaaacgaaacagaaacatgaagctgaagtgcaagaaaaaatcttgctgtctacgccctcgcggcgaccactgggagaaaaagccaatctctcgtcgccacccaaggaagcgccggagaagagcatctcatccatggtggcagagtcactcaagtcactaacaatagaaaatgcgccccgagcaagcatatcacatctcaacaagatcacggcagccgctttcagtcacggaacaaaccagcggctcaagacacttaatctccagcaaaaggcggcgctctgctccctcacggctctcgagaaacgaaaccgcgagtggcgaacgtcgtccttgactagttcaccctctaaggctcaagcggtggcgccgacggtgaaagcattatacgaaacttacaatctactctgtacgcgggactcggtgctccacccactgtcgggttccgagtttcgagaggtcgtgggcagcctggagacgctatcgctcatcactgaagtcaacgggaagacgggctcactggcgatgttgcagacgccaagccgccgaggcaagaagtctgggtttggcagcggcgcagggttggcagacgagaagaaggtggccagttgcgtgggagaaaaggaactggagcaggccgtggacggactaggagcaggtattctgcgaagcatcctgagcggcgaggggttggattga

SEQ ID NO: 26346 - protein, 590 aa, Muscodor strobelii
  misc_feature: SGI Peptide ID NO. 569007
  misc_feature (4)..(590): NCBI GI: 39951943 Blast Desc: MGG_01614 [Magnaporthe grisea 70-15] gi|145020539|gb|EDK04668.1| MGG_01614 [Magnaporthe grisea 70-15]
  misc_feature (1)..(590): NCBI GI: 256734446 Blast Desc: [Nectria haematococca mpVI 77-13-4]
  misc_feature (5)..(590): NCBI GI: 46108296 Blast Desc: FG01030.1 [Gibberella zeae PH-1]
  misc_feature (1)..(590): NCBI GI: 261356321 Blast Desc: cell division control protein [Verticillium albo-atrum VaMs.102]
  misc_feature (1)..(590): NCBI GI: 116181720 Blast Desc: CHGG_01488 [Chaetomium globosum CBS 148.51] gi|88185785|gb|EAQ93253.1| CHGG_01488 [Chaetomium globosum CBS 148.51]
  misc_feature (99)..(590): NCBI GI: 171696126 Blast Desc: protein product [Podospora anserina] gi|170948305|emb|CAP60469.1| protein product [Podospora anserina]
  misc_feature (1)..(590): NCBI GI: 85112100 Blast Desc: NCU02776 [Neurospora crassa OR74A] gi|28926046|gb|EAA35035.1| conserved [Neurospora crassa OR74A]
  misc_feature (5)..(589): NCBI GI: 156057569 Blast Desc: SS1G_04516 [Sclerotinia sclerotiorum 1980] gi|154702301|gb|EDO02040.1| SS1G_04516 [Sclerotinia sclerotiorum 1980]
  misc_feature (5)..(590): NCBI GI: 154323996 Blast Desc: BC1G_00397 [Botryotinia fuckeliana B05.10] gi|150842626|gb|EDN17819.1| BC1G_00397 [Botryotinia fuckeliana B05.10]
  misc_feature (1)..(586): NCBI GI: 189193535 Blast Desc: cell division control protein Cdc6 [Pyrenophora tritici-repentis Pt-1C-BFP] gi|187978670|gb|EDU45296.1| cell division control protein Cdc6 [Pyrenophora tritici-repentis
MAAPALGKRSRPSADVVDFPAKRTRRQTRYDSLLLNDENADPEAVSIRDDDDDANHDAATPSSTPTPSKHTTGDIRKAPSVFKPVTPSTPRFRDALSRTPSTPSAIQTVYHLARQLFSRSADPGRLIGREDERSTLNGFLDRCRTSKPNGCIYVSGSPGTGKSAMINEAAQAIADDMPIKKAYINCMSIKSSKDLYESLLDQLSETSDVAQADAAVALQKLLMPRKKSTEVYLVILDEIDHILTLDMESLYKVFEWSMQKTSRLVLVGIANALDLTDRFLPRLKARNLKPELLPFLPYSAAQIKSIITGRLKSLVPEGSPLPFIHPAAIELCSRKVSSQTGDLRKAFEICRRAIDLIEAETKQKHEAEVQEKILLSTPSRRPLGEKANLSSPPKEAPEKSISSMVAESLKSLTIENAPRASISHLNKITAAAFSHGTNQRLKTLNLQQKAALCSLTALEKRNREWRTSSLTSSPSKAQAVAPTVKALYETYNLLCTRDSVLHPLSGSEFREVVGSLETLSLITEVNGKTGSLAMLQTPSRRGKKSGFGSGAGLADEKKVASCVGEKELEQAVDGLGAGILRSILSGEGLD

SEQ ID NO: 26347 - DNA, 2520 bp, Muscodor strobelii
  misc_feature: SGI cDNA ID NO. 569008
  misc_feature: Encodes the peptide sequence at SEQ ID NO 26348
atggtccgcatttctcatgccggcttccatatcaacatcgctaccgacatggaggaggacaagctcatagcatatgacgcccgtatccatgctcttcgacgacaagaatttcctatgctgcaggatagcatatatctcgaccatgccggcactacgctgtatccaaaatcccttgtggattcatttgccttagatatgaccgccaacctattcggcaatccgcattcagcctcagcatgctcgcaagtgtccacgacgatgatcgaggacgcccgcctccgtgctttgcagttctttggcgcggatcctgctgactttgacctcgtcttcgtcgccaatgccactgcaggaataaagctagttacggaggcttttcgaggctttcctcgagggttcgaataccgataccacgaagccagccatacaagtcttgtaggtgtcagggaagaggccagtcatagcatctgtatgagcagcgacgatgttgagaaatggatttcaggagacattgccacctctgcagctattgaatccacacggcccgattccacgccaacgttatttgcatatccagcgcaatctaatatggacggacacaggtttcccatttcctggtgccgaaagctacatgattttaagaacaacaaaggatctcaggtccacacgttgctcgatgctgcctcacttgctggtacttctccactcgatcttagcgacgccgagtctgcacctgatttcattgtgctgagcttctataaaatttttggcttccccgatttaggcgggctgctagtgaagcgtcaagctgcctccgtttttcaacatcgccgttacttcggtggcggaaccgttgacatggtggtttgttctaaagaacaatggcatgctccaaaaacccagagcctacatgacgcacttgaagatggcacacttccggttcatagtatcattgcgctcaagtcagccttggacgtgcaccgtagactgtatggctctatggtagacatagcttcgcacaccacctaccttacgcacaggttataccaaagtctggaaggactccgacatggcaacggccaggctgtctgtacgatgtactcggcgccgtcactgtgtgcaacatacgggaacggtccaattgtggctttcaatatgcgaaatgctcatggagcttgggttagcttggccgaattcgagaaacttgctactctgaagaatttccacctgcgcaccggaggcgtatgcaacccgggtggtattgtagcggctttaggattagaggcgtgggaaatgcgacagaacttctccgccgggtttcgatgcggagagggcagagatatcatcaatggcaaaccaacgggggtcatccgagtgagcctcggcgcaatgagtactcgcgcagacgttgacacgttcctcgcttttatcgaagagttttatcaggaaataggcagcccagaagcaatgtttgaccaaaggccttgcgtcgtggatcccgcctcaagtttctttgttcagtccgtcatgatatatccaataaagagttgtggcgggtttcacgtgcctaataatatggcctggggagtcaaatcagaaggactggcttgggatcgagaatggtgtctggttcatcagggaactgggcaagccctcagtcaaaagcgacatcctgaaatggcacttattcaaccagagattgatcttccctctggcaggctcagaattacctaccgtggctcccacaattctaatattgggaacgagatttttgttcctctatctgagaatccgggcctttttcagtccaaaagcttagctcgttcaatgacttctcatgtctgtggtgaagaggtgtcgatcaaaacttatacatctgaagaaaccaattccttcttcactgctgttctcggtgtcccttgcgcgttagctcgcttccccccaggtgggacgggtaagagcatgcgatactcaaaagctcatttgcaattccatcaaaagaggcacatgttacggtctccggcatctccccgagctcccggaatccatacaccccctgactctgactcggagtcagaacggcggcgcatcttgttgtccaacgagagcccaattcttgcaatcaatctttctagtctctatgtactgaatcgggagatcatcaagaagagcgggactccggtgccaccagaagcattccgtgccaatattataatcggttcgtcatcgtcagacccggaggcgtttgcgtattcggaagatgattggagtcggctcagaatagccggtcatgagttccggatgttgggagcatgtcggaggtgtcacatggtctgtatcaaccaggaaactgctatcaaaagccaagaaccatttgtgacattggcgaaaacaagaagattcgatggcaaggtcttcttcggtacacacatgtgtcatgtacctacgcaaggtactgatacaagggagactcaatacccaacaattcgggtaggagacaaggtcgaggtcgatcctgaatga

SEQ ID NO: 26348 - protein, 839 aa, Muscodor strobelii
  misc_feature: SGI Peptide ID NO. 569008
  misc_feature (44)..(472): Pfam Id: PF00266 Pfam Desc: Aminotransferase class-V
  misc_feature (687)..(836): Pfam Id: PF03473 Pfam Desc: MOSC domain
  misc_feature (502)..(639): Pfam Id: PF03476 Pfam Desc: MOSC N-terminal beta barrel domain
  misc_feature (44)..(121): Pfam Id: PF00266 Pfam Desc: Aminotransferase class-V
  misc_feature (698)..(836): Pfam Id: PF03473 Pfam Desc: MOSC domain
  misc_feature (502)..(577): Pfam Id: PF03476 Pfam Desc: MOSC N-terminal beta barrel domain
  misc_feature (40)..(834): NCBI GI: 171696124 Blast Desc: protein product [Podospora anserina] gi|170948304|emb|CAP60468.1| protein product [Podospora anserina]
  misc_feature (25)..(788): NCBI GI: 116181722 Blast Desc: CHGG_01489 [Chaetomium globosum CBS 148.51] gi|121790639|sp|Q2HE65.1|MOCOS_CHAGB RecName: Full=Molybdenum cofactor sulfurase; Short=MoCo sulfurase; Short=MOS CHGG_01489
  misc_feature (25)..(836): NCBI GI: 154290722 Blast Desc: BC1G_15280 [Botryotinia fuckeliana B05.10] gi|226707517|sp|A6SRX6.1|MOCOS_BOTFB RecName: Full=Molybdenum cofactor sulfurase; Short=MoCo sulfurase; Short=MOS BC1G_15280
  misc_feature (39)..(835): NCBI GI: 261356320 Blast Desc: molybdenum cofactor sulfurase [Verticillium albo-atrum VaMs.102]
  misc_feature (17)..(834): NCBI GI: 189205547 Blast Desc: molybdenum cofactor sulfurase [Pyrenophora tritici-repentis Pt-1C-BFP] gi|187975201|gb|EDU41827.1| molybdenum cofactor sulfurase [Pyrenophora tritici-repentis
  misc_feature (17)..(831): NCBI GI: 145613473 Blast Desc: MGG_01613 [Magnaporthe grisea 70-15] gi|226707512|sp|A4RK48.1|MOCOS_MAGGR RecName: Full=Molybdenum cofactor sulfurase; Short=MoCo sulfurase; Short=MOS MGG_01613
  misc_feature (25)..(838): NCBI GI: 256735128 Blast Desc: NECHADRAFT_90012 [Nectria haematococca mpVI 77-13-4]
  misc_feature (25)..(836): NCBI GI: 46108450 Blast Desc: FG01107.1 [Gibberella zeae PH-1]
  misc_feature (24)..(834): NCBI GI: 121707296 Blast Desc: molybdenum cofactor sulfurase protein (HxB), [Aspergillus clavatus NRRL 1] gi|226707514|sp|A1CHL0.1|MOCOS_ASPCL RecName: Full=Molybdenum 1]
  misc_feature (24)..(835): NCBI GI: 226286146 Blast Desc: molybdenum cofactor sulfurase [Paracoccidioides brasiliensis Pb01]
MVRISHAGFHINIATDMEEDKLIAYDARIHALRRQEFPMLQDSIYLDHAGTTLYPKSLVDSFALDMTANLFGNPHSASACSQVSTTMIEDARLRALQFFGADPADFDLVFVANATAGIKLVTEAFRGFPRGFEYRYHEASHTSLVGVREEASHSICMSSDDVEKWISGDIATSAAIESTRPDSTPTLFAYPAQSNMDGHRFPISWCRKLHDFKNNKGSQVHTLLDAASLAGTSPLDLSDAESAPDFIVLSFYKIFGFPDLGGLLVKRQAASVFQHRRYFGGGTVDMVVCSKEQWHAPKTQSLHDALEDGTLPVHSIIALKSALDVHRRLYGSMVDIASHTTYLTHRLYQSLEGLRHGNGQAVCTMYSAPSLCATYGNGPIVAFNMRNAHGAWVSLAEFEKLATLKNFHLRTGGVCNPGGIVAALGLEAWEMRQNFSAGFRCGEGRDIINGKPTGVIRVSLGAMSTRADVDTFLAFIEEFYQEIGSPEAMFDQRPCVVDPASSFFVQSVMIYPIKSCGGFHVPNNMAWGVKSEGLAWDREWCLVHQGTGQALSQKRHPEMALIQPEIDLPSGRLRITYRGSHNSNIGNEIFVPLSENPGLFQSKSLARSMTSHVCGEEVSIKTYTSEETNSFFTAVLGVPCALARFPPGGTGKSMRYSKAHLQFHQKRHMLRSPASPRAPGIHTPPDSDSESERRRILLSNESPILAINLSSLYVLNREIIKKSGTPVPPEAFRANIIIGSSSSDPEAFAYSEDDWSRLRIAGHEFRMLGACRRCHMVCINQETAIKSQEPFVTLAKTRRFDGKVFFGTHMCHVPTQGTDTRETQYPTIRVGDKVEVDPE

SEQ ID NO: 26349 - DNA, 3387 bp, Muscodor strobelii
  misc_feature: SGI EST ID NO. CUFF.62109.0
  misc_feature: Variant of the nucleotide sequence at SEQ ID NO 26347
aactcatgtaggtacggtaatgttcttctatctggggttgatcagctccaacccaggtgccctgaactgaagataaatgcggcagctcgccacaccaagtctccatgtttgtatgcgacgaatgacacgggccctaactgatcctagataatctataaggttaacgtagcacaagacataaccacttccacctcatacttagacttgcccgtattcgatgtattcttcacttgaccatgacgttcgattatagctgaagcccaagtgttacccagtagcactcttctgtttctcaggtaatctaaagatacggtcatcagctgcaaccggcgatgtccgggctccgatcttcctcgtcccgccatgggtccgtgactatgcccgactctgtcgaccatgattatcgggcctccccttctgtagttgccaccgtttgctaggtgaaccattccccttcgtagctcagcttttggcgtaacctctgtgatacaatgccttcgtaataccttggaagtcttggtcttaggaaatacttcgcacaaacaccaattggacgtctcgtaagcacattcgtcactccgcatggtccgcatttctcatgccggcttccatatcaacatcgctaccgacatggaggaggacaagctcatagcatatgacgcccgtatccatgctcttcgacgacaagaatttcctatgctgcaggatagcatatatctcgaccatgccggcactacgctgtatccaaaatcccttgtggattcatttgccttagatatgaccgccaacctattcggcaatccgcattcagcctcagcatgctcgcaagtgtccacgacgatgatcgaggacgcccgcctccgtgctttgcagttctttggcgcggatcctgctgactttgacctcgtcttcgtcgccaatgccactgcaggaataaagctagttacggaggcttttcgaggctttcctcgagggttcgaataccgataccacgaagccagccatacaagtcttgtaggtgtcagggaagaggccagtcatagcatctgtatgagcagcgacgatgttgagaaatggatttcaggagacattgccacctctgcagctattgaatccacacggcccgattccacgccaacgttatttgcatatccagcgcaatctaatatggacggacacaggtttcccatttcctggtgccgaaagctacatgattttaagaacaacaaaggatctcaggtccacacgttgctcgatgctgcctcacttgctggtacttctccactcgatcttagcgacgccgagtctgcacctgatttcattgtgctgagcttctataaaatttttggcttccccgatttaggcgggctgctagtgaagcgtcaagctgcctccgtttttcaacatcgccgttacttcggtggcggaaccgttgacatggtggtttgttctaaagaacaatggcatgctccaaaaacccagagcctacatgacgcacttgaagatggcacacttccggttcatagtatcattgcgctcaagtcagccttggacgtgcaccgtagactgtatggctctatggtagacatagcttcgcacaccacctaccttacgcacaggttataccaaagtctggaaggactccgacatggcaacggccaggctgtctgtacgatgtactcggcgccgtcactgtgtgcaacatacgggaacggtccaattgtggctttcaatatgcgaaatgctcatggagcttgggttagcttggccgaattcgagaaacttgctactctgaagaatttccacctgcgcaccggaggcgtatgcaacccgggtggtattgtagcggctttaggattagaggcgtgggaaatgcgacagaacttctccgccgggtttcgatgcggagagggcagagatatcatcaatggcaaaccaacgggggtcatccgagtgagcctcggcgcaatgagtactcgcgcagacgttgacacgttcctcgcttttatcgaagagttttatcaggaaataggcagcccagaagcaatgtttgaccaaaggccttgcgtcgtggatcccgcctcaagtttctttgttcagtccgtcatgatatatccaataaagagttgtggcgggtttcacgtgcctaataatatggcctggggagtcaaatcagaaggactggcttgggatcgagaatggtgtctggttcatcagggaactgggcaagccctcagtcaaaagcgacatcctgaaatggcacttattcaaccagagattgatcttccctctggcaggctcagaattacctaccgtggctcccacaattctaatattgggaacgagatttttgttcctctatctgagaatccgggcctttttcagtccaaaagcttagctcgttcaatgacttctcatgtctgtggtgaagaggtgtcgatcaaaacttatacatctgaagaaaccaattccttcttcactgctgttctcggtgtcccttgcgcgttagctcgcttccccccaggtgggacgggtaagagcatgcgatactcaaaagctcatttgcaattccatcaaaagaggcacatgttacggtctccggcatctccccgagctcccggaatccatacaccccctgactctgactcggagtcagaacggcggcgcatcttgttgtccaacgagagcccaattcttgcaatcaatctttctagtctctatgtactgaatcgggagatcatcaagaagagcgggactccggtgccaccagaagcattccgtgccaatattataatcggttcgtcatcgtcagacccggaggcgtttgcgtattcggaagatgattggagtcggctcagaatagccggtcatgagttccggatgttgggagcatgtcggaggtgtcacatggtctgtatcaaccaggaaactgctatcaaaagccaagaaccatttgtgacattggcgaaaacaagaagattcgatggcaaggtcttcttcggtacacacatgtgtcatgtacctacgcaaggtactgatacaagggagactcaatacccaacaattcgggtaggagacaaggtcgaggtcgatcctgaatgacgcggatccgggtacttgccatttccgtgatgtgcataaatacaccatacatttggctcagagtatagatgcacaggtgtagctccatgtcccaaaaactcaggggaaataatattcctcgagcaaatcatcaatcgagtaaagagataaccacatggccctgcctacgtgccaacgcgactcttccttgatcatacccacgtaacgggtccggacttctaggtattgaatttgctaaacatgggttgatttcttaaatttgacgccacagtatttgttggtgag

SEQ ID NO: 26350 - DNA, 2823 bp, Muscodor strobelii
  misc_feature: SGI cDNA ID NO. 569009
  misc_feature: Reduced expression when VOC is produced
  misc_feature: Encodes the peptide sequence at SEQ ID NO 26351
atgttatcgaatccgcttcaacgattttctccgtatcactcgataccgtctaacgctctgctttccaacgctcatgtccagggtgctcatcttcatgcaactgggctggaggcatttggccacggatcccaatatgctctacaacacctccagcagcatgtgggtgttcatgctccccatctcacgagagcacctcaaccaaagcatcgccagcatccgtacggcggacccggcgcaaggactgccggaacttcaggaccaataaggagaaggataagcagggcttgcgatcagtgtaaccagcttagaaccaaatgtgacggacagcatccatgtgctcattgtatagagttcggccttggatgcgagtatatccgcgagcgaaaaaagagagggaaagcttcccgcaaagacttggctcaacaagctgctgcccaagctgccgctgctgcttcacaaaacggccagaaatcaccggaacacaatgatgacgcggagtcggccacagaaggacgagtggatgattctacttccaccaaacaggaacaacatcatagtacgcccgaaaatgccctcgtcgatattgccgaggatgctatgtcgagaagtcagcgaacaggcagccttgatagcctggcagaattgggagctcaccagacacatcttccaagccatgctatagttttggagcgagaccatatggataatccggctcctctggacctccacgggtatggcaatatcaatagccctttcgatagacagactatcagtcaattgatgggtgcatcatcacatgccgcctacggatcctcccaaggcggtctctccagctatccagatcttccgtacggtctccacactcacagtccaactggttacactgccaatccctcaacggcatttcgtcttgagacgagctcattgagcgcataccctcttgctggggaaccagcttcgccggaatggatctctatgtctccccctcctccacagtatcaatcacacattccacagaacaactaccatcaacaactcagatatccggtactgaacccgcttattccccatctcgctagcatcatacctgtttcgcttgcatgcgatctgatagatttgtactttgcaagctcctcgtcagctcatgcacacccaatgtctccgtatgtgctcggatttgtgtttaggaaacgatcattcctccatcctagcaagccgaggcagtgccagccggcgctattagcgagtatgctctgggtagccgctcagacgagtgatgcgcctttcctgacgcaggttccgtccgctcggggtaaaatctgccagaagttgctcgagctgacagtcaacttattaaaacccttgatacacacatcgtcaggcgacgtgtctccactctcaagcccagtaatcgacggtattgcgttgggcggtctcggagtaacgctccagaattcaatgaacatggaggacatcggtgcagagccaggagcttttggagctgcagggtccctggacgatgttgtcacatatatacacttagctactgtcgtctcagcaagtgagtacaaaggcgccagtatgcgttggtggaacgctgcttggtctcttgcacgagagttaaaattaggtcgtgagctgccggaacatgtgtctcctacgacccaagatgatcgtgagggacaacacggaaatgatatcagcgacgaccttggagacgaagatagttctggcggtgctaccgatgaagagcgcgaagagcgcaggcgtatatggtggcttgtgtatatcatggatcgccacttggcactctgttacaatcgcccactttctttactcgacatagagtgcgagggcttacttcagcctatggacgacaccgaatggcaaaacggaatatttgagccttacacaactgatcctgcactaactcaggactcaagtgaaggagaaattcggctccgtgggccacagtttgagtgcacaggccacagcatttttggctacttcctgccgttgatgacaattctaggcgaaattgttgacctccatcatgctcgaaaccatcctcgattcggggtcagcttccgatccgctcgggagtgggatgaccaacaggctgagatagttaggcatcttggcatgtacgaagcgagtttaaagagcttcgaacagcgccattttaatgcgagttttgaggataaaaacgagcagtctgccacgctggagatgcctacagaattggaccacctagattcgtcgtctgtaagatctttgcacagcaacacgtcgcggatgacagaatcggacatccagacgcggatagtcatgtcttatggtacccacgtaatgcatgtacttcacatactgcttacgggtaaatgggatccgatcaacctgctcgacgacaatgatctgtggatttcgtctcaagggttcatcactgcgactggccacgccgtctctgccgctgaggcaatcagcaaaatattagagtatgaccccggtctggaattcatgcccttcttctttggcatatacctcctgcaagggtcgtttctactccttctaattgccgataaacttcaattggaggcctctgctagcgttgttcgagcttgcgagaccatcattcgtgcacatgaggcctgtgttgtcacactgaacactgagtatcagcgtaattttagcaaggtaatgcgcagcgctcttgctcaagttcgtggccgtgtgcccgaagatcttggcgaacaacatcagcgacgccgggaacttctgtcgttgtatcgatggactggtgatggcagtggactggccctttga

SEQ ID NO: 26351 - protein, 940 aa, Muscodor strobelii
  misc_feature: SGI Peptide ID NO. 569009
  misc_feature (94)..(132): Pfam Id: PF00172 Pfam Desc: Fungal Zn(2)-Cys(6) binuclear cluster domain
  misc_feature (505)..(627): Pfam Id: PF04082 Pfam Desc: Fungal specific transcription factor domain
  misc_feature (581)..(627): Pfam Id: PF04082 Pfam Desc: Fungal specific transcription factor domain
  misc_feature (1)..(940): NCBI GI: 171683359 Blast Desc: protein product [Podospora anserina] gi|170941639|emb|CAP67293.1| protein product [Podospora anserina]
  misc_feature (1)..(940): NCBI GI: 85108643 Blast Desc: transcriptional activator xlnR [Neurospora crassa OR74A] gi|28924221|gb|EAA33375.1| transcriptional activator xlnR [Neurospora crassa OR74A]
  misc_feature (1)..(940): NCBI GI: 261352721 Blast Desc: transcriptional activator xlnR [Verticillium albo-atrum VaMs.102]
  misc_feature (15)..(940): NCBI GI: 145613718 Blast Desc: MGG_01414 [Magnaporthe grisea 70-15] gi|145020753|gb|EDK04882.1| MGG_01414 [Magnaporthe grisea 70-15]
  misc_feature (1)..(940): NCBI GI: 154317445 Blast Desc: BC1G_03074 [Botryotinia fuckeliana B05.10] gi|150844248|gb|EDN19441.1| BC1G_03074 [Botryotinia fuckeliana B05.10]
  misc_feature (1)..(940): NCBI GI: 125380513 Blast Desc: XlnR [Fusarium oxysporum]
  misc_feature (1)..(940): NCBI GI: 256720935 Blast Desc: NECHADRAFT_96746 [Nectria haematococca mpVI 77-13-4]
  misc_feature (202)..(940): NCBI GI: 116194766 Blast Desc: CHGG_03981 [Chaetomium globosum CBS 148.51] gi|88179894|gb|EAQ87362.1| CHGG_03981 [Chaetomium globosum CBS 148.51]
  misc_feature (1)..(940): NCBI GI: 28194501 Blast Desc: AF479644_1 xylanase regulator 1 [Hypocrea jecorina]
  misc_feature (1)..(900): NCBI GI: 73354930 Blast Desc: [Sclerotinia sclerotiorum]
  misc_feature: Useful for introducing or modulating the production of volatile compounds
MLSNPLQRFSPYHSIPSNALLSNAHVQGAHLHATGLEAFGHGSQYALQHLQQHVGVHAPHLTRAPQPKHRQHPYGGPGARTAGTSGPIRRRISRACDQCNQLRTKCDGQHPCAHCIEFGLGCEYIRERKKRGKASRKDLAQQAAAQAAAAASQNGQKSPEHNDDAESATEGRVDDSTSTKQEQHHSTPENALVDIAEDAMSRSQRTGSLDSLAELGAHQTHLPSHAIVLERDHMDNPAPLDLHGYGNINSPFDRQTISQLMGASSHAAYGSSQGGLSSYPDLPYGLHTHSPTGYTANPSTAFRLETSSLSAYPLAGEPASPEWISMSPPPPQYQSHIPQNNYHQQLRYPVLNPLIPHLASIIPVSLACDLIDLYFASSSSAHAHPMSPYVLGFVFRKRSFLHPSKPRQCQPALLASMLWVAAQTSDAPFLTQVPSARGKICQKLLELTVNLLKPLIHTSSGDVSPLSSPVIDGIALGGLGVTLQNSMNMEDIGAEPGAFGAAGSLDDVVTYIHLATVVSASEYKGASMRWWNAAWSLARELKLGRELPEHVSPTTQDDREGQHGNDISDDLGDEDSSGGATDEEREERRRIWWLVYIMDRHLALCYNRPLSLLDIECEGLLQPMDDTEWQNGIFEPYTTDPALTQDSSEGEIRLRGPQFECTGHSIFGYFLPLMTILGEIVDLHHARNHPRFGVSFRSAREWDDQQAEIVRHLGMYEASLKSFEQRHFNASFEDKNEQSATLEMPTELDHLDSSSVRSLHSNTSRMTESDIQTRIVMSYGTHVMHVLHILLTGKWDPINLLDDNDLWISSQGFITATGHAVSAAEAISKILEYDPGLEFMPFFFGIYLLQGSFLLLLIADKLQLEASASVVRACETIIRAHEACVVTLNTEYQRNFSKVMRSALAQVRGRVPEDLGEQHQRRRELLSLYRWTGDGSGLAL

SEQ ID NO: 26352 - DNA, 4662 bp, Muscodor strobelii
  misc_feature: SGI EST ID NO. CUFF.62184.0
  misc_feature: Variant of the nucleotide sequence at SEQ ID NO 26350
ccagaaccccaactagccagtcaatcactccactcgccacagcatcgtgccgtcgttgcatattaaacgacaatttatctagtcttgtcctatattgccttgacctgagagggaccctggctcgcgtgatttggagaaagcaggaacgtctttcttgaattgcatgccaaggctgcctaattgcctcgtgctctcgacaaggtgaatagtccagacctgaagcatcgtgttcgtcagattgggcagtcctgatcttcctttggtccatcttccctccgaacatgcttgttatccctggcgttaacccaaacattataattgcagcactggcagttcactgatttcatactcacagacgttttacggaacacggtagattgacgtgccaactctgactgagttttcagacccctgagtgtcgtctattgcctattcgttgggcctcatacacgcacattcgccgcccactttgtgtcctgcgtatcgtttattatcctgtgtggggagctgtgccgtctgcccatatcgtgttgatcatttgcctctgcccgctggcctgagcccgtcatgcaggccacattgagatcatgctcatgcttctaattaccataccagcgagagggtgccggtccgttgcgatacgaccatcctgagtggctcataagtgcagtcaaagcgtgggacaaattagtacacttcccgtagaacataatctgccaccgcgcaccatctagttcggcttggacatcaccttatctggacaaatccatacttcacccaactgctcgcactcgttcgaagtttgaagattcatgaaccggtcagccgacaggttattacgttcaagacatcgttgatcatacatacaacttgtctaaacaatacaccgattacgatctgaagacaatgttatcgaatccgcttcaacgattttctccgtatcactcgataccgtctaacgctctgctttccaacgctcatgtccagggtgctcatcttcatgcaactgggctggaggcatttggccacggatcccaatatgctctacaacacctccagcagcatgtgggtgttcatgctccccatctcacgagagcacctcaaccaaagcatcgccagcatccgtacggcggacccggcgcaaggactgccggaacttcaggaccaataaggagaaggataagcagggcttgcgatcagtgtaaccagcttagaaccaaatgtgacggacagcatccatgtgctcattgtatagagttcggccttggatgcgagtatatccgcgagcgaaaaaagagagggaaagcttcccgcaaagacttggctcaacaagctgctgcccaagctgccgctgctgcttcacaaaacggccagaaatcaccggaacacaatgatgacgcggagtcggccacagaaggacgagtggatgattctacttccaccaaacaggaacaacatcatagtacgcccgaaaatgccctcgtcgatattgccgaggatgctatgtcgagaagtcagcgaacaggcagccttgatagcctggcagaattgggagctcaccagacacatcttccaagccatgctatagttttggagcgagaccatatggataatccggctcctctggacctccacgggtatggcaatatcaatagccctttcgatagacagactatcagtcaattgatgggtgcatcatcacatgccgcctacggatcctcccaaggcggtctctccagctatccagatcttccgtacggtctccacactcacagtccaactggttacactgccaatccctcaacggcatttcgtcttgagacgagctcattgagcgcataccctcttgctggggaaccagcttcgccggaatggatctctatgtctccccctcctccacagtatcaatcacacattccacagaacaactaccatcaacaactcagatatccggtactgaacccgcttattccccatctcgctagcatcatacctgtttcgcttgcatgcgatctgatagatttgtactttgcaagctcctcgtcagctcatgcacacccaatgtctccgtatgtgctcggatttgtgtttaggaaacgatcattcctccatcctagcaagccgaggcagtgccagccggcgctattagcgagtatgctctgggtagccgctcagacgagtgatgcgcctttcctgacgcaggttccgtccgctcggggtaaaatctgccagaagttgctcgagctgacagtcaacttattaaaacccttgatacacacatcgtcaggcgacgtgtctccactctcaagcccagtaatcgacggtattgcgttgggcggtctcggagtaacgctccagaattcaatgaacatggaggacatcggtgcagagccaggagcttttggagctgcagggtccctggacgatgttgtcacatatatacacttagctactgtcgtctcagcaagtgagtacaaaggcgccagtatgcgttggtggaacgctgcttggtctcttgcacgagagttaaaattaggtcgtgagctgccggaacatgtgtctcctacgacccaagatgatcgtgagggacaacacggaaatgatatcagcgacgaccttggagacgaagatagttctggcggtgctaccgatgaagagcgcgaagagcgcaggcgtatatggtggcttgtgtatatcatggatcgccacttggcactctgttacaatcgcccactttctttactcgacatagagtgcgagggcttacttcagcctatggacgacaccgaatggcaaaacggaatatttgagccttacacaactgatcctgcactaactcaggactcaagtgaaggagaaattcggctccgtgggccacagtttgagtgcacaggccacagcatttttggctacttcctgccgttgatgacaattctaggcgaaattgttgacctccatcatgctcgaaaccatcctcgattcggggtcagcttccgatccgctcgggagtgggatgaccaacaggctgagatagttaggcatcttggcatgtacgaagcgagtttaaagagcttcgaacagcgccattttaatgcgagttttgaggataaaaacgagcagtctgccacgctggagatgcctacagaattggaccacctagattcgtcgtctgtaagatctttgcacagcaacacgtcgcggatgacagaatcggacatccagacgcggatagtcatgtcttatggtacccacgtaatgcatgtacttcacatactgcttacgggtaaatgggatccgatcaacctgctcgacgacaatgatctgtggatttcgtctcaagggttcatcactgcgactggccacgccgtctctgccgctgaggcaatcagcaaaatattagagtatgaccccggtctggaattcatgcccttcttctttggcatatacctcctgcaagggtcgtttctactccttctaattgccgataaacttcaattggaggcctctgctagcgttgttcgagcttgcgagaccatcattcgtgcacatgaggcctgtgttgtcacactgaacactgagtatcagcgtaattttagcaaggtaatgcgcagcgctcttgctcaagttcgtggccgtgtgcccgaagatcttggcgaacaacatcagcgacgccgggaacttctgtcgttgtatcgatggactggtgatggcagtggactggccctttgatttgctctgaacgcgttcaagtctttcctttcttgtcatttataccccatgaaacatttgttcgtattatcacgtattttttgcgctctagctatggcgtccaggtggtcgaggtttcgtggtccgtgaaaacaaaaatcagggagggcgaactggggatattgttcgtctaacatcttgttgccgacaaatgcacaagaatgaaattgcttattcatcgtgctaggggttggcctggcctatacctcgcaatatgttaagaggtttttgctgggctttgattgcttcgtcagaccaaacgtctctcactcaacgggagatgaacgatattgagaagaacaaagtttaaataaatataagaaacttgtagccaagataaacactggctctgctgtttaaaacgtctcgactcgcagaatgtgatgacattcgctaaagcaggattcaggctctttagaagtggttgctatctagataatgtgagtttccaaaagcaagggaaaactacgtgtagccaataatagtaactgtgatatcctagttctttgttgacgttgtagcaagcaatgcgcgatgattggcggagcaaatttccaccaacgagatgtgaagtctcccacgaccgactttccaggttcgcacgattaccaatccttgttcagcgagtattcggcgcattatgtcggacgccacgcaagcttccggggaaatattctcattcgggtggcttctagatgcacagagatgcatggtggacgccgttgtgcaacgatagccaggtttcttctattttggagggtctaccagatacctcatggcggcaggactcgcgccgagaagatagcgatcctgaatttactctataatcgctggtcctgcacttgacttctcgcagatggatgtcacgcaacaatcaatgcgctgctgggcgta

SEQ ID NO: 26353 - DNA, 567 bp, Muscodor strobelii
  misc_feature: SGI cDNA ID NO. 569010
  misc_feature: Encodes the peptide sequence at SEQ ID NO 26354
atggctacaggcacaccctcatcagcgccggacttcaccgcccacaaaatcaagaacacgcaaatcaatgaaggctcgggagtctcactctcaggacagcaaaagctgctcgtaggcagcgttctcgacctcttcgaaggaaacccaaccctaaagcacctatccctgtggtcccaaaacgccacattcaccgaccctctaacagtagcagaggggtaccacaagttcgcagcgcaatggtacggattaccggcaatcttcaacccgatccagatccagtcgcaccaagtcacatctgccggcaatcccattgagttaaatctgaagaatatgtacactgtcaagggtattaagaaagagcagactattgagtctcaggttaagatctgggttggtgctgatggcaagattgaacggttggaggataggtggaatgggaaactgcctgagggggctgttagtgaggctttccggaaattgaacgctgttactgtgccgacgatcgttaaggtacccaagactgaggaggaggatgataagatgagggcggaaaggaatagtgcttga

SEQ ID NO: 26354 - protein, 188 aa, Muscodor strobelii
  misc_feature: SGI Peptide ID NO. 569010
  misc_feature (1)..(187): NCBI GI: 261353619 Blast Desc: conserved [Verticillium albo-atrum VaMs.102]
  misc_feature (12)..(186): NCBI GI: 145610492 Blast Desc: MGG_10931 [Magnaporthe grisea 70-15] gi|145017776|gb|EDK02139.1| MGG_10931 [Magnaporthe grisea 70-15]
  misc_feature (12)..(186): NCBI GI: 149209339 Blast Desc: MGCH7_ch7g161 [Magnaporthe grisea 70-15] gi|86196116|gb|EAQ70754.1| MGCH7_ch7g161 [Magnaporthe grisea 70-15]
  misc_feature (9)..(178): NCBI GI: 189190778 Blast Desc: conserved [Pyrenophora tritici-repentis Pt-1C-BFP] gi|187973334|gb|EDU40833.1| conserved [Pyrenophora tritici-repentis Pt-1C-BFP]
  misc_feature (1)..(156): NCBI GI: 256721941 Blast Desc: NECHADRAFT_36951 [Nectria haematococca mpVI 77-13-4]
  misc_feature (17)..(157): NCBI GI: 85117094 Blast Desc: NCU00986 [Neurospora crassa OR74A] gi|28926983|gb|EAA35943.1| [Neurospora crassa OR74A] gi|38567057|emb|CAE76355.1| conserved [Neurospora crassa]
  misc_feature (12)..(149): NCBI GI: 156062934 Blast Desc: SS1G_01583 [Sclerotinia sclerotiorum 1980] gi|154696919|gb|EDN96657.1| SS1G_01583 [Sclerotinia sclerotiorum 1980]
  misc_feature (12)..(161): NCBI GI: 154314758 Blast Desc: BC1G_04088 [Botryotinia fuckeliana B05.10] gi|150848710|gb|EDN23903.1| BC1G_04088 [Botryotinia fuckeliana B05.10]
  misc_feature (22)..(83): NCBI GI: 169607062 Blast Desc: SNOG_06584 [Phaeosphaeria nodorum SN15] gi|160707146|gb|EAT86415.2| SNOG_06584 [Phaeosphaeria nodorum SN15]
  misc_feature (23)..(147): NCBI GI: 169623610 Blast Desc: SNOG_15049 [Phaeosphaeria nodorum SN15] gi|111056472|gb|EAT77592.1| SNOG_15049 [Phaeosphaeria nodorum SN15]
MATGTPSSAPDFTAHKIKNTQINEGSGVSLSGQQKLLVGSVLDLFEGNPTLKHLSLWSQNATFTDPLTVAEGYHKFAAQWYGLPAIFNPIQIQSHQVTSAGNPIELNLKNMYTVKGIKKEQTIESQVKIWVGADGKIERLEDRWNGKLPEGAVSEAFRKLNAVTVPTIVKVPKTEEEDDKMRAERNSA

SEQ ID NO: 26355 - DNA, 3125 bp, Muscodor strobelii
  misc_feature: SGI EST ID NO. CUFF.62149.0
  misc_feature: Variant of the nucleotide sequence at SEQ ID NO 26353
ctaaatcataaaatcaaagcttgtataaatgacatcccggaaattgaaatttattaagatgatctactttctactttacttattttacgaacgattttgcaatcctgcgacaaaagaaaggctgccaaaggagattcttctccggcaactctcatgacgtcaagaactcaaacccacggatcgaagtcaatgacgacctcatccttagcattatgcaacagcgcctcataattacgatacaagcaaaacaattgatcaatttgaaacattgaatattattaccattgcagacatcttcattagacactcaagaacactgtcatcccatctctgtattgtaaaaggcatgtcccttcgaccagtagtcatccgcactacccgattcgcaacatcagcaacgagactcacacgctcaacaccaccaacaaaatattacaacctcataagtagaacaatggctacaggcacaccctcatcagcgccggacttcaccgcccacaaaatcaagaacacgcaaatcaatgaaggctcgggagtctcactctcaggacagcaaaagctgctcgtaggcagcgttctcgacctcttcgaaggaaacccaaccctaaagcacctatccctgtggtcccaaaacgccacattcaccgaccctctaacagtagcagaggggtaccacaagttcgcagcgcaatggtacggattaccggcaatcttcaacccgatccagatccagtcgcaccaagtcacatctgccggcaatcccattgagttaaatctgaagaatatgtacactgtcaagggtattaagaaagagcagactattgagtctcaggttaagatctgggttggtgctgatggcaagattgaacggttggaggataggtggaatgggaaactgcctgagggggctgttagtgaggtacgtggttcttttctattcgtgaggttgggaagggagatggtagagatgggcgttcagggtgtttggggtatatttgtgacggcgagttggtggtggcccttttgggtgaggcggtcgttgtggtgaaattgggagaaactggcaaatgctgactttggatctaggctttccggaaattgaacgctgttactgtgccgacgatcgttaaggtacccaagactgaggaggaggatgataagatgagggcggaaaggaatagtgcttgatccagtgaacaaccatagtagttgtcatgacacgcgctggttgaagatagacggtcgggattcagtgcatattgatgtattactgcctgtagtcttctgtgtactatatcatggctatgccttcataatgagcactattttatttttctgctggcctaactctcatacggatattctatgaaagcgacacgctgtttgaaggcatcgcgacggcctatcaaatactaggttcctgttgcataatcagcaccatgtcttagtgtgtgcgcaaatgtaggtaatatcttacccgtgatcacttgtcaaaagttacctgcactacgcgcataggctcatcgtcgtaggtgagcacgagagcttagtcaggagagctcatctgccctagtgctcggccacctatcttcttgaaaaggtgaccacaactgtagtcggtgggagacgacatggcatcgttgttatcgcggcctgttcgcaaagctgtaacatcgcgaaccacaagaccaagtcctccttgacgatatgatacgtagtaatcgacaccatgagaaacgccaagagcgctgttgtatgcacaccaggcacgagcaagaaagtgaggtggtcatcgtgttcgcccttccaaatccgttgccattctcatcacaagcccgacttcattgtcgaaatctgcgctcgacgtccgatctgcaagcccgggggtgtagaaccgaacactactgcagagcactttgcttgaaagcgtcttttcggacgatctcatcctcttccccaagtacggcgatacctccaggtactttggccgcgtcgcgttggcccatcatagtacgagctggtatctgtaaattttaagttaatatctgtacaacaaaagagtcatctcgcagttcatacctctcctccggctaatgccgagttggtccgcaacattgacgtagccatctctgcctacgacgcccgtgttctttatccctatcttcgtatcttcgtcttcctgccacggtgtccgacacattggacaagtaacgggatcacgcacggtcttgcgtttggtggctgcccacatgtcaaagcattctttatgtatattctggccacaagttgcacggcagtagacggtatcttccgcgtcttcaaagggcgtgaaacagatcgggcagtcgccttcgatgggcttgcgcttcccgtctttatccgaatcgtcggcgcttgggagaggatcgatgggaggtgcgttcgcaaaaatctcttgcagttctgtcgaaaggagggcgagttggtagactaattcaaagcgtgcgcgcaggacgcgcgacatgacgtagatgatgtgcttgcactggttgcccttctgataatgcggacagtcgcatgtggggatccgggcaatgacgatgttgtagatgtttcccgttgacccggtcatctcgacggattcttctgggcattgcgctgagcctcgtcgtgttcgtttgagcacgtaaaatcgttgggacgtcgctcgttcgtagatgacgctaaaggcctgaggagcagaggctcggaatcttcgcatgcgcttttcctcgtccttgttggatgccttcttgggcttcttcttctcgggagatggtgcggtttcatcggccccggaggccggctccttcctcttcggcatggtcgcgatgccttcttttgagttgacggcagaggtaaacgaagaccgttccgaaacgagacagcagggttgcgttggaatgcgtagtggcctgatgacgtcgccgctagctttcaaagtgctgtgctcacttcaatctaaatcttcagtctggtgagattgaatacctaggtagtatatcatccaatggaaaggaaacatgagttccaacaattaaaattgttgggcagaattggcgcgaaaggttggtatttgctgcaatgttgaggtaggtaggtttcgt

SEQ ID NO: 26356 - DNA, 795 bp, Muscodor strobelii
  misc_feature: SGI cDNA ID NO. 569011
  misc_feature: Encodes the peptide sequence at SEQ ID NO 26357
atgccgaagaggaaggagccggcctccggggccgatgaaaccgcaccatctcccgagaagaagaagcccaagaaggcatccaacaaggacgaggaaaagcgcatgcgaagattccgagcctctgctcctcaggcctttagcgtcatctacgaacgagcgacgtcccaacgattttacgtgctcaaacgaacacgacgaggctcagcgcaatgcccagaagaatccgtcgagatgaccgggtcaacgggaaacatctacaacatcgtcattgcccggatccccacatgcgactgtccgcattatcagaagggcaaccagtgcaagcacatcatctacgtcatgtcgcgcgtcctgcgcgcacgctttgaattagtctaccaactcgccctcctttcgacagaactgcaagagatttttgcgaacgcacctcccatcgatcctctcccaagcgccgacgattcggataaagacgggaagcgcaagcccatcgaaggcgactgcccgatctgtttcacgccctttgaagacgcggaagataccgtctactgccgtgcaacttgtggccagaatatacataaagaatgctttgacatgtgggcagccaccaaacgcaagaccgcagagatggctacgtcaatgttgcggaccaactcggcattagccggaggagagataccagctcgtactatgatgggccaacgcgacgcggccaaagtacctggaggtatcgccgtacttggggaagaggatgagatcgtccgaaaagacgctttcaagcaaagtgctctgcagtag

SEQ ID NO: 26357 - protein, 264 aa, Muscodor strobelii
  misc_feature: SGI Peptide ID NO. 569011
  misc_feature (86)..(118): Pfam Id: PF04434 Pfam Desc: SWIM zinc finger
  misc_feature (2)..(206): NCBI GI: 261353617 Blast Desc: Znf1p [Verticillium albo-atrum VaMs.102]
  misc_feature (34)..(254): NCBI GI: 256735538 Blast Desc: NECHADRAFT_75479 [Nectria haematococca mpVI 77-13-4]
  misc_feature (8)..(207): NCBI GI: 85113622 Blast Desc: NCU00723 [Neurospora crassa OR74A] gi|28926343|gb|EAA35321.1| NCU00723 [Neurospora crassa OR74A]
  misc_feature (21)..(204): NCBI GI: 39943424 Blast Desc: MGG_10932 [Magnaporthe grisea 70-15] gi|149209341|ref|XP_001522045.1| MGCH7_ch7g162 [Magnaporthe grisea 70-15] gi|86196117|gb|EAQ70755.1| MGCH7_ch7g162 grisea
  misc_feature (31)..(254): NCBI GI: 170280413 Blast Desc: Znf1 [Fusarium oxysporum]
  misc_feature (3)..(204): NCBI GI: 171684201 Blast Desc: protein product [Podospora anserina] gi|170942061|emb|CAP67713.1| protein product [Podospora anserina]
  misc_feature (19)..(222): NCBI GI: 25294132 Blast Desc: Znf1p [Gibberella moniliformis]
  misc_feature (15)..(250): NCBI GI: 189196274 Blast Desc: RING finger domain containing protein (Znf1) [Pyrenophora tritici-repentis Pt-1C-BFP] gi|187980354|gb|EDU46980.1| RING finger domain containing protein
  misc_feature (11)..(203): NCBI GI: 238838742 Blast Desc: Znf1p [Microsporum canis CBS 113480]
  misc_feature (6)..(202): NCBI GI: 67528322 Blast Desc: AN4359.2 [Aspergillus nidulans FGSC A4] gi|40741330|gb|EAA60520.1| AN4359.2 [Aspergillus nidulans FGSC A4] gi|259482831|tpe|CBF77686.1| TPA: RING finger domain protein
MPKRKEPASGADETAPSPEKKKPKKASNKDEEKRMRRFRASAPQAFSVIYERATSQRFYVLKRTRRGSAQCPEESVEMTGSTGNIYNIVIARIPTCDCPHYQKGNQCKHIIYVMSRVLRARFELVYQLALLSTELQEIFANAPPIDPLPSADDSDKDGKRKPIEGDCPICFTPFEDAEDTVYCRATCGQNIHKECFDMWAATKRKTAEMATSMLRTNSALAGGEIPARTMMGQRDAAKVPGGIAVLGEEDEIVRKDAFKQSALQ

SEQ ID NO: 26358 - DNA, 3085 bp, Muscodor strobelii
  misc_feature: SGI EST ID NO. CUFF.62150.1
  misc_feature: Variant of the nucleotide sequence at SEQ ID NO 26356
acgaaacctacctacctcaacattgcagcaaataccaacctttcgcgccaattctgcccaacaattttaattgttggaactcatgtttcctttccattggatgatatactacctaggtattcaatctcaccagactgaagatttagattgaagtgagcacagcactttgaaagctagcggcgacgtcatcaggccactacgcattccaacgcaaccctgctgtctcgtttcggaacggtcttcgtttacctctgccgtcaactcaaaagaaggcatcgcgaccatgccgaagaggaaggagccggcctccggggccgatgaaaccgcaccatctcccgagaagaagaagcccaagaaggcatccaacaaggacgaggaaaagcgcatgcgaagattccgagcctctgctcctcaggcctttagcgtcatctacgaacgagcgacgtcccaacgattttacgtgctcaaacgaacacgacgaggctcagcgcaatgcccagaagaatccgtcgagatgaccgggtcaacgggaaacatctacaacatcgtcattgcccggatccccacatgcgactgtccgcattatcagaagggcaaccagtgcaagcacatcatctacgtcatgtcgcgcgtcctgcgcgcacgctttgaattagtctaccaactcgccctcctttcgacagaactgcaagagatttttgcgaacgcacctcccatcgatcctctcccaagcgccgacgattcggataaagacgggaagcgcaagcccatcgaaggcgactgcccgatctgtttcacgccctttgaagacgcggaagataccgtctactgccgtgcaacttgtggccagaatatacataaagaatgctttgacatgtgggcagccaccaaacgcaagaccgtgcgtgatcccgttacttgtccaatgtgtcggacaccgtggcaggaagacgaagatacgaagatagggataaagaacacgggcgtcgtaggcagagatggctacgtcaatgttgcggaccaactcggcattagccggaggagagataccagctcgtactatgatgggccaacgcgacgcggccaaagtacctggaggtatcgccgtacttggggaagaggatgagatcgtccgaaaagacgctttcaagcaaagtgctctgcagtagtgttcggttctacacccccgggcttgcagatcggacgtcgagcgcagatttcgacaatgaagtcgggcttgtgatgagaatggcaacggatttggaagggcgaacacgatgaccacctcactttcttgctcgtgcctggtgtgcatacaacagcgctcttggcgtttctcatggtgtcgattactacgtatcatatcgtcaaggaggacttggtcttgtggttcgcgatgttacagctttgcgaacaggccgcgataacaacgatgccatgtcgtctcccaccgactacagttgtggtcaccttttcaagaagataggtggccgagcactagggcagatgagctctcctgactaagctctcgtgctcacctacgacgatgagcctatgcgcgtagtgcaggtaacttttgacaagtgatcacgggaacctagtatttgataggccgtcgcgatgccttcaaacagcgtgtcgctttcatagaatatccgtatgagagttaggccagcagaaaaataaaatagtgctcattatgaaggcatagccatgatatagtacacagaagactacaggcagtaatacatcaatatgcactgaatcccgaccgtctatcttcaaccagcgcgtgtcatgacaactactatggttgttcactggatcaagcactattcctttccgccctcatcttatcatcctcctcctcagtcttgggtaccttaacgatcgtcggcacagtaacagcgttcaatttccggaaagcctagatccaaagtcagcatttgccagtttctcccaatttcaccacaacgaccgcctcacccaaaagggccaccaccaactcgccgtcacaaatataccccaaacaccctgaacgcccatctctaccatctcccttcccaacctcacgaatagaaaagaaccacgtacctcactaacagccccctcaggcagtttcccattccacctatcctccaaccgttcaatcttgccatcagcaccaacccagatcttaacctgagactcaatagtctgctctttcttaatacccttgacagtgtacatattcttcagatttaactcaatgggattgccggcagatgtgacttggtgcgactggatctggatcgggttgaagattgccggtaatccgtaccattgcgctgcgaacttgtggtacccctctgctactgttagagggtcggtgaatgtggcgttttgggaccacagggataggtgctttagggttgggtttccttcgaagagctgcaaatagtgtttagtaatatgaatttgattttgggagggttcggaaaggggaagggcagggagacgtacgtcgagaacgctgcctacgagcagcttttgctgtcctgagagtgagactcccgagccttcattgatttgcgtgttcttgattttgtgggcggtgaagtccggcgctgatgagggtgtgcctgtagccattgttctacttatgaggttgtaatattttgttggtggtgttgagcgtgtgagtctcgttgctgatgttgcgaatcgggtagtgcggatgactactggtcgaagggacatgccttttacaatacagagatgggatgacagtgttcttgagtgtctaatgaagatgtctgcaatggtaataatattcaatgtttcaaattgatcaattgttttgcttgtatcgtaattatgaggcgctgttgcataatgctaaggatgaggtcgtcattgacttcgatccgtgggtttgagttcttgacgtcatgagagttgccggagaagaatctcctttggcagcctttcttttgtcgcaggattgcaaaatcgttcgtaaaataagtaaagtagaaagtagatcatcttaataaatttcaatttccgggatgtcatttatacaagctttgattttatgatttag

SEQ ID NO: 26359 - DNA, 2379 bp, Muscodor strobelii
  misc_feature: SGI cDNA ID NO. 569012
  misc_feature: Encodes the peptide sequence at SEQ ID NO 26360
atgcgaaccatctctcgctctcgctggtgtatacctcttctctctgttctatcgtttcatgcccatgtagcactttgcgccgatcccgacatcctccaattcgtcaatccgctcatcggcagtacaaacggcggaaatgtcttcgcaggcgcaacccggccttatggcctagcgaaagcggtcccagatgtcgacgggcagaacacaggcggtttcgcgacagacggatcgaatatccgagggttctcggcggtccatgattcgggtactggcggtaacccgagcttgggcaactttccgcttttcccgcaattgtgcgacgatgatgtcgtggataattgcaaattcttgatcgctgatcgcgcgacaccatatttgagcgaatcagtcgacgcgactcccggacgtttcgccgtcgagctcgaatctggcgtcaaggcgacgatgaccacgagcgatcacgccgctgtgttccagttccagtatccttccagtaacagctcacagtaccctctcgtgcttcttgatttgacggatttatggcaatctcgccaaaatgctagtatcagcatcgacgccgatacgggacgtatgaaaggcaatggcactttcttacctagttttggagctgggtcttatgtgatgcacttctgtgttgatttcttcggcggcgaagtccatgataatggagtttgggtgaataatcgtgctggcactgaaccgaagggtttatacgttacgcgaggattcaataacttcttcctggaagctggaggttgggcgagattctccgggctcaaggataatacactgaccagtcgcgttggtatcagcttcataagtgccgatcaagcttgccaaaacgccgagacggagatacccgacccgatcggttattttgataaattggtcgaggatacaaaggatgaatggagggagaagctgagccctatttctatcaatgctggtggcgcaagtgagagtctccagacgagcttttggagtggaatatatcgtggaatgatctcacctcaaaactacacaggcgagaacccgaaatgggacagcggcatcccgtacttcgactcatactactgcatctgggactcgcatcgtgtacagcatcccttgctcaccatagtcgacccgcatgctcaagtccagatggtcaactcgttaattgatatatacgaaaacgaaggctggctccccgactgccacatgtcgctatgcaatggatggactcaaggcggttccaacgcagatgtcgtccttgtcgatgcatacgtcaagaatctcactgggatcaactgggaaacagcattgaaggccattgtccaagatgctgaggtcgaacctctcgaatgggcgttccatgggagaggtggcctaaatagctggcgtaacctggactacataccgtaccttgatttcgaccccgtcggcttcggtacgaactctcgcagtatcgcacgaacactagaatattcatacaacgactactgcttggctaccttagcacaaagtctcgggcaagacgacctctacactaaatacgtctcgcgaagtggcaactggcagaatatctggagggcggatcaaaattcctcaatcaatggtgccgacacgggcttcacgggcttcttccaaccgaagtatctgaacggtacatggggctaccaagaccccattgcatgctcggtactcgcagacttctgctccttgactaccaatccaagcgagaccttcgaggcaagtatctggcaataccaatttctagttccgcagtctcaagctgcgctgattgatcttatgggcggtgaggagagctacatcgaccgcctagacttctttcatacctcgggacttgccgatatctcaaacgaacccgtcttcaccaccgtgtatctctaccattatgctgggcaccccggcctgtcaaccaagagactacacacttatatcccgggctcgttcaacgatacaaatggtggcttgcccgggaatgacgactctggagcgatgggcgctttcactgttttcggcatgcttggcttattcccaatagcgggacaggacgtttacctgatctcggcgccattcttcgaggcaatcaacatcacgagtcccgtgacagggaagacggcgcaaatcaacacaatcaatttcgatgcggcatatcaaaacatctacatacaaaatgttaccgtaaatggagagacctggaccaaatcctggatcggccactcgctattcaatgacggactggtaatggagatcactctaggaagcagcgagtctaaatggggaactgcgctggaggatcggccgcctagctttactccggtgaagcaaatggatgcaatgtttcgtttgtga

SEQ ID NO: 26360 - protein, 792 aa, Muscodor strobelii
  misc_feature: SGI Peptide ID NO. 569012
  misc_feature (252)..(766): Pfam Id: PF07971 Pfam Desc: Glycosyl hydrolase family 92
  misc_feature (257)..(558): Pfam Id: PF07971 Pfam Desc: Glycosyl hydrolase family 92
  misc_feature (588)..(766): Pfam Id: PF07971 Pfam Desc: Glycosyl hydrolase family 92
  misc_feature (1)..(781): NCBI GI: 238482175 Blast Desc: alpha-1,2-mannosidase, [Aspergillus flavus NRRL3357] gi|220700376|gb|EED56714.1| alpha-1,2-mannosidase, [Aspergillus flavus NRRL3357]
  misc_feature (1)..(781): NCBI GI: 169765610 Blast Desc: [Aspergillus oryzae RIB40] gi|83765131|dbj|BAE55274.1| protein product [Aspergillus oryzae]
  misc_feature (1)..(780): NCBI GI: 119482726 Blast Desc: glycosyl hydrolase, family 92 protein [Neosartorya fischeri NRRL 181] gi|119409546|gb|EAW19494.1| glycosyl hydrolase, family 92 protein [Neosartorya fischeri NRRL 181]
  misc_feature (1)..(780): NCBI GI: 70987115 Blast Desc: alpha-1,2-mannosidase [Aspergillus fumigatus Af293] gi|66846668|gb|EAL87000.1| alpha-1,2-mannosidase, [Aspergillus fumigatus Af293]
  misc_feature (1)..(780): NCBI GI: 159123191 Blast Desc: alpha-1,2-mannosidase, [Aspergillus fumigatus A1163]
  misc_feature (23)..(786): NCBI GI: 242796813 Blast Desc: alpha-1,2-mannosidase, [Talaromyces stipitatus ATCC 10500] gi|218719467|gb|EED18887.1| alpha-1,2-mannosidase, [Talaromyces stipitatus ATCC 10500]
  misc_feature (23)..(785): NCBI GI: 212536770 Blast Desc: alpha-1,2-mannosidase, [Penicillium marneffei ATCC 18224] gi|210070940|gb|EEA25030.1| alpha-1,2-mannosidase, [Penicillium marneffei ATCC 18224]
  misc_feature (13)..(781): NCBI GI: 255954407 Blast Desc: Pc21g09170 [Penicillium chrysogenum Wisconsin 54-1255] gi|211589667|emb|CAP95814.1| Pc21g09170 [Penicillium chrysogenum Wisconsin 54-1255]
  misc_feature (9)..(781): NCBI GI: 189196230 Blast Desc: conserved [Pyrenophora tritici-repentis Pt-1C-BFP] gi|187980332|gb|EDU46958.1| conserved [Pyrenophora tritici-repentis Pt-1C-BFP]
  misc_feature (57)..(780): NCBI GI: 115395796 Blast Desc: conserved [Aspergillus terreus NIH2624] gi|114193106|gb|EAU34806.1| conserved [Aspergillus terreus NIH2624]
MRTISRSRWCIPLLSVLSFHAHVALCADPDILQFVNPLIGSTNGGNVFAGATRPYGLAKAVPDVDGQNTGGFATDGSNIRGFSAVHDSGTGGNPSLGNFPLFPQLCDDDVVDNCKFLIADRATPYLSESVDATPGRFAVELESGVKATMTTSDHAAVFQFQYPSSNSSQYPLVLLDLTDLWQSRQNASISIDADTGRMKGNGTFLPSFGAGSYVMHFCVDFFGGEVHDNGVWVNNRAGTEPKGLYVTRGFNNFFLEAGGWARFSGLKDNTLTSRVGISFISADQACQNAETEIPDPIGYFDKLVEDTKDEWREKLSPISINAGGASESLQTSFWSGIYRGMISPQNYTGENPKWDSGIPYFDSYYCIWDSHRVQHPLLTIVDPHAQVQMVNSLIDIYENEGWLPDCHMSLCNGWTQGGSNADVVLVDAYVKNLTGINWETALKAIVQDAEVEPLEWAFHGRGGLNSWRNLDYIPYLDFDPVGFGTNSRSIARTLEYSYNDYCLATLAQSLGQDDLYTKYVSRSGNWQNIWRADQNSSINGADTGFTGFFQPKYLNGTWGYQDPIACSVLADFCSLTTNPSETFEASIWQYQFLVPQSQAALIDLMGGEESYIDRLDFFHTSGLADISNEPVFTTVYLYHYAGHPGLSTKRLHTYIPGSFNDTNGGLPGNDDSGAMGAFTVFGMLGLFPIAGQDVYLISAPFFEAINITSPVTGKTAQINTINFDAAYQNIYIQNVTVNGETWTKSWIGHSLFNDGLVMEITLGSSESKWGTALEDRPPSFTPVKQMDAMFRL

SEQ ID NO: 26361 - DNA, 3732 bp, Muscodor strobelii
  misc_feature: SGI cDNA ID NO. 569013
  misc_feature: Encodes the peptide sequence at SEQ ID NO 26362
atgtgtgtgatactatattgtatctgcaaggactgcttgtgcgggtatgctcaagactaccacccgtgtcacgagaactccgagagcgaagtgccaaatggcaagtgcccgagtcgtacacgtctcaagtttctccttgtggacccagacgcatgtcacgtatgcctgcgccaagacgatttgaaagaacatggtgttctggatcagaatggacagtttacttctatcagcggcctgagaacaaatctccgccagccaatgccctggatcattccatttggtggtccaaacggattcgttcccgtgaacggacagatcccagccttggcaggaatcatggcaggatatgtaccccccacaagccaagaagacatgcaacaggcccagcaagaggaacgtctgccattcgatggaccggagccaaggtctatatcaaatatgtggtattacagatcagagggcctttcgttggtggctaatccatggcagccatcagattatcaactaccatcccatcaaaatacgcagactcaccaccacgcgtcaggccatgcttatgcataccccagcttcggtagtcagggacaaaagacatctgtcgatcagacgcgtgagcaaccaacacagaccgatcggaaatgttacccgtcgacccccaagaagtccgaattcagaggactgaacccgaacgcaagtgacttcagccttgctccatctctcagaagcctcgattcaggagaacaatatgaggggatcaatggtacacctcagatcacggaagccatcgagacgcgtatggtaaaaggaaaagcgaggctaattgaagaagatataccaaagacccgcgtcctaccatcggatagcctgctctcacctacccctgttacgcgcctcggtggtgaaggttctaatcatcagtatcgcatgctgtccgatgatcctagtgacgctgaagcgaagaaaaaacatgcaaattttgagaattcgccaatgtatgacgataaacttgggcaatataagaaaccgcgatcggacaatagtagccacagcaatgagaagattgaagatattgcttcaccgagtgtgaaagcacccccacccgtccctgaggagtcccagcggcgtatacaaaattcccgagataaacaagagagccatactactggtgcggttgcaaataggaagcaaaccgcttcgacactgagccgagtcgatggatctggcttatcgccagaatccctgaaagccgcccctgaagcaaagatacttatgtcaaagagaaagttcgctccagtaccaagtcttatccctgcttcctggctgagggaaccagcaatttcgcctgagcccctctcaccaactcaatttcaccccaagaaatcatatgccagcctgctacagggttcgccaaatgagaacaaagacgacacccaagcgccaccatcgccttccccactatctcggacttcaaacatagccttctctactccaagctcgaggctgggtgccaattcacgttctaagcctgacagtattactaacactccaaaacccagtttgccaccccgtaatacggctcgactcaggttgactggcaaggttcctacaattcaggcaactacgaagactgacaacattggcgcatctcccacagccaaaaagtccgacgacactgtcgtaacttccgcagctaaaaccgctgacagcaatcacgcaagtcgcacaaacaagaagacccaaggccttgatcgcaagccgcaccattctatttccgggcattcgtctcccaagcttgctgaatctcttcctgccgtggtccctcgatcccaaactgcgtacatttccaacagcatcactacagcaactgagcgccctgagtatctacaaggcgtagagcggcaatgggaactcaagaaaagtgagacaagtgcacgaaaggagagccaaaaccgcaaagctctttttctctccgactacagcgcttcaatcgaggcagaagcatccagtattccttctattgatcctgcagcagagcctactcaccctgactctgacatccgatctcaatcgcctgacgcgtctttgctcgagaccggtcgcagcacagttcaatcgccatctacagtcgacactgcatcacaggttgtcgacaaaagtgtatcacactgttcatctgaagaacccgtcagcactgatccggctgctctagtcaacaaaagcacctcagcaacgacaccttgcccggagccaccaagtgccatagacaaagatcgtgagcttacatctaaggaagcgacgatttttgacccgacttctcagcctgacaagtcccccgtggaaactgtagatatttcaaccaagaagaatcttgaactggatacagctgagccaactggtgttaaaatggataataccagtagaagtgctcgaaaaaagccaacggctcaatcttctggaaccatggacacgcccgctgaagctgtcggttctaagacttctgctcattgggatccaatgagcctcttggatgtgtttgaaggcaaagatacgcccactgaaggtcccgcttacaacaccgccaccattcaacaagaatcaactgctggcccctctggaaccaagaatgcacccacttcagctgctgcctccaagactactactccctggaacccaaacatgatatggaatccagttgaaaagaaatgggttcctaagaagtgcgaagagaagcctgctccactcaaactcggcgagagacagaaggagattgctcagatgctctttggagaagaggttaagcagatcaaagccgatgcggccggatacggaagtactaaatacagcttccacggccctcctaccaaaaacactgtcaccgatatgtggcagacctcactcgaggaggtctcgcgtaaaggataccctcctaattatcgtggaccaatcaaaccggacaaggaacttaccaagcttgcagaagatcgcaagaagcttgcacccacagttgaacagagaatggcgaagaacttgggcaagctgtcggagctcggctcggatgccaagacgccgtctaaggctacaggctctaaagatgacaagaatgcgaccgcgtttgcgaacaatctctcgaagaacttcgcaaagtttgctgagacagataagcccaaggttgcagctagccatggaaataagtctgcaacaacttctaagaagaacagcgagaacgtcacctacactcccatgaaagatgcattcaatcgacgagcaatcttggagcagcgagccacggctgctcgacaccaggctgaacgcaatcgtgaggagtttctcaaactcaaggccagtatgcaggcggccgaaaatatcgagaccaagaattccgacgaaaagaatctcaagtccgatgaagagaagaatgctgtgaatgagatcaaatcagacgaaaaggaggatcttaagaccaacgagaaggttggcaatgacaaggccaaggacaaagccaaggaccttggtcccgaggatgcatacgacaaggagactggcaaagtcgacgagtcgcttttgccctacaagaacttcacgatgaacgacgtcagcgacgtagtccacggccgagcgaacatggaccacttcaaccgccgaatgatagaggcggctaccgctgtcgttgccgttcgcacgaagagagcagctgccaagaaagctgccgaggaggagtctaagagagagtga

SEQ ID NO: 26362 - protein, 1243 aa, Muscodor strobelii
  misc_feature: SGI Peptide ID NO. 569013
MCVILYCICKDCLCGYAQDYHPCHENSESEVPNGKCPSRTRLKFLLVDPDACHVCLRQDDLKEHGVLDQNGQFTSISGLRTNLRQPMPWIIPFGGPNGFVPVNGQIPALAGIMAGYVPPTSQEDMQQAQQEERLPFDGPEPRSISNMWYYRSEGLSLVANPWQPSDYQLPSHQNTQTHHHASGHAYAYPSFGSQGQKTSVDQTREQPTQTDRKCYPSTPKKSEFRGLNPNASDFSLAPSLRSLDSGEQYEGINGTPQITEAIETRMVKGKARLIEEDIPKTRVLPSDSLLSPTPVTRLGGEGSNHQYRMLSDDPSDAEAKKKHANFENSPMYDDKLGQYKKPRSDNSSHSNEKIEDIASPSVKAPPPVPEESQRRIQNSRDKQESHTTGAVANRKQTASTLSRVDGSGLSPESLKAAPEAKILMSKRKFAPVPSLIPASWLREPAISPEPLSPTQFHPKKSYASLLQGSPNENKDDTQAPPSPSPLSRTSNIAFSTPSSRLGANSRSKPDSITNTPKPSLPPRNTARLRLTGKVPTIQATTKTDNIGASPTAKKSDDTVVTSAAKTADSNHASRTNKKTQGLDRKPHHSISGHSSPKLAESLPAVVPRSQTAYISNSITTATERPEYLQGVERQWELKKSETSARKESQNRKALFLSDYSASIEAEASSIPSIDPAAEPTHPDSDIRSQSPDASLLETGRSTVQSPSTVDTASQVVDKSVSHCSSEEPVSTDPAALVNKSTSATTPCPEPPSAIDKDRELTSKEATIFDPTSQPDKSPVETVDISTKKNLELDTAEPTGVKMDNTSRSARKKPTAQSSGTMDTPAEAVGSKTSAHWDPMSLLDVFEGKDTPTEGPAYNTATIQQESTAGPSGTKNAPTSAAASKTTTPWNPNMIWNPVEKKWVPKKCEEKPAPLKLGERQKEIAQMLFGEEVKQIKADAAGYGSTKYSFHGPPTKNTVTDMWQTSLEEVSRKGYPPNYRGPIKPDKELTKLAEDRKKLAPTVEQRMAKNLGKLSELGSDAKTPSKATGSKDDKNATAFANNLSKNFAKFAETDKPKVAASHGNKSATTSKKNSENVTYTPMKDAFNRRAILEQRATAARHQAERNREEFLKLKASMQAAENIETKNSDEKNLKSDEEKNAVNEIKSDEKEDLKTNEKVGNDKAKDKAKDLGPEDAYDKETGKVDESLLPYKNFTMNDVSDVVHGRANMDHFNRRMIEAATAVVAVRTKRAAAKKAAEEESKRE

SEQ ID NO: 26363 - DNA, 1284 bp, Muscodor strobelii
  misc_feature: SGI cDNA ID NO. 569014
  misc_feature: Encodes the peptide sequence at SEQ ID NO 26364
atgggacataacacgtttatcgagagcgatgctcaagccgacgaggctgcatcgcagccagctggaccaagtccgtcgcacatagctgtgaacgaggaaaaccctgccctctactgggatacaccttgccagtcaccccaagctggcaccaacaatactgcgagtaatacgacgaagttgtcgtatatttgggatcgcggaacccatagaatcaatgaccctaaatccttcggaaaaccaggcctttggactggttcgatatacccgacacgggttccaggcgcattcaatgggatgcaacctagttttacgcagcagatccctatgacaattgggcaaggaataggcggcgcaagcctatttcctggcggtacgaacattttcccaccctcaactcagccatttgtaggcacccaagtgggaaatgctcctggcctctacgtcaaccaaccaatcgatcgtgctcaccctcgtcctcctgatcggtatcctattgacgatctcctgcgcgggtcacttatcaaaatggcgtcaactgtatcgccaaactatcaaggcgatccttaccttagagccaaccagtcggccaacattcctgatcatctcaacaccgcggtgtggattaccaacttgcctccccacttggatcacaagatgctacttgacaacattcgaaattgcggcaagatttgggcagctgtcgttaatgaacccgaagctggacacattacctcagctgcaaaggtcgtcttctgggatgtcactggtgctgaaacccttctgcgacagtctgtcgaaggcaagttcatcgtcggcgattacattccacgcgtgcgacgcaaccgtattaagagtgaaacgaagccatctggcgtccacagccgagtactacacatcgagggtcccagttatgttgtaaaccaggcttatctcgcggccttttttcgccacaacgacatcaaatggcaggacgaaacaatcatcacgctgatgaacaatggcaatcgtactcggctagagtggcgctttggtagctatcgctgccaggccgagtcggctcgtcatgccattgaccgtgtcaaaaggccatacaatcctattgatcaaatctcatttcaactgtggcaggacgtctctgtccactttggtgtcgatccttgtgcaccacgaccagacatgctttacaagttgcttcccagtgcccccgttcccactattcctgctccgctcgaacccgagaacagagaccttagccactacctgccgaatgtcggagagcattga

SEQ ID NO: 26364 - protein, 427 aa, Muscodor strobelii
  misc_feature: SGI Peptide ID NO. 569014
  misc_feature (181)..(387): NCBI GI: 256723100 Blast Desc: NECHADRAFT_81265 [Nectria haematococca mpVI 77-13-4]
  misc_feature (181)..(396): NCBI GI: 39977813 Blast Desc: MGG_06791 [Magnaporthe grisea 70-15] gi|145013671|gb|EDJ98312.1| MGG_06791 [Magnaporthe grisea 70-15]
  misc_feature (143)..(328): NCBI GI: 171690952 Blast Desc: protein product [Podospora anserina] gi|170945424|emb|CAP71536.1| protein product [Podospora anserina]
  misc_feature (181)..(362): NCBI GI: 116195748 Blast Desc: CHGG_04472 [Chaetomium globosum CBS 148.51] gi|88180385|gb|EAQ87853.1| CHGG_04472 [Chaetomium globosum CBS 148.51]
  misc_feature (181)..(391): NCBI GI: 171683223 Blast Desc: protein product [Podospora anserina] gi|170941571|emb|CAP67223.1| protein product [Podospora anserina]
  misc_feature (161)..(330): NCBI GI: 85085374 Blast Desc: NCU04417 [Neurospora crassa OR74A] gi|28918586|gb|EAA28258.1| [Neurospora crassa OR74A]
  misc_feature (161)..(316): NCBI GI: 40882203 Blast Desc: conserved [Neurospora crassa]
  misc_feature (180)..(387): NCBI GI: 116195516 Blast Desc: CHGG_04356 [Chaetomium globosum CBS 148.51] gi|88180269|gb|EAQ87737.1| CHGG_04356 [Chaetomium globosum CBS 148.51]
  misc_feature (175)..(415): NCBI GI: 85104224 Blast Desc: NCU01087 [Neurospora crassa OR74A] gi|18376188|emb|CAD21304.1| [Neurospora crassa] gi|28923247|gb|EAA32463.1| [Neurospora crassa OR74A]
  misc_feature (164)..(386): NCBI GI: 156034721 Blast Desc: [Sclerotinia sclerotiorum 1980] gi|154698699|gb|EDN98437.1| [Sclerotinia sclerotiorum 1980]
MGHNTFIESDAQADEAASQPAGPSPSHIAVNEENPALYWDTPCQSPQAGTNNTASNTTKLSYIWDRGTHRINDPKSFGKPGLWTGSIYPTRVPGAFNGMQPSFTQQIPMTIGQGIGGASLFPGGTNIFPPSTQPFVGTQVGNAPGLYVNQPIDRAHPRPPDRYPIDDLLRGSLIKMASTVSPNYQGDPYLRANQSANIPDHLNTAVWITNLPPHLDHKMLLDNIRNCGKIWAAVVNEPEAGHITSAAKVVFWDVTGAETLLRQSVEGKFIVGDYIPRVRRNRIKSETKPSGVHSRVLHIEGPSYVVNQAYLAAFFRHNDIKWQDETIITLMNNGNRTRLEWRFGSYRCQAESARHAIDRVKRPYNPIDQISFQLWQDVSVHFGVDPCAPRPDMLYKLLPSAPVPTIPAPLEPENRDLSHYLPNVGEH

SEQ ID NO: 26365 - DNA, 1494 bp, Muscodor strobelii
  misc_feature: SGI cDNA ID NO. 569015
  misc_feature: Encodes the peptide sequence at SEQ ID NO 26366
atgaccgatgcggcgttcaagcccgagaaggacttctccaaagaggccgacactttgatcccagaggcagagaagctcgccaagaatgacatacaggccgccatcgagaagctcaccgtctttgagaaacagactcgacaggcttcagatcttgcatccacatccagaaccctgattgccatatgtaccatctgcaaagatgccggtaactggagtctcctcaacgaccaggtcctggtcctgtccaagaagcatggccagctcaaacaggccatcaccaagatggtccagaccgtcatgaccttcctcgacagcacacccaacatggagaccaagctctccgttatcgagaccctgcgcaccgttaccgaaggcaagatcttcgtcgaagtcgagcgcgcccgcgttaccaagatcctctccgacatcaagaagcagcagggcgacctcaagtctgccatggagacgttatgtgagctacaagtcgagacgttcggctctatggatagacgggaaaagaccgagtttattctcgcccaggttgctctctgcatcgagaacaaggactggacacaggccggcattctcagccgcaagatcagcacacgatacctctcgcgcaagcccaagaagaccccggagcagatagagaaagagaagaaggcacgggaggaaaaggagaagagaggcgaggaggtaccgccggagcaggacgacgacacaaccgacttgaagctggcatactacggacagcagatcaccctggcgaagcacgatggcaaatacctggatgtgtgcaagcactacagacaagtcttggacacggaggctgtcgaagaagaccctgacaagctccaacccacactccaacgcatcatctactttgtcattctcgcccctcacgataacgaacaacacgacctcctgcacagaatcttccgcgacacccgaacgtctcaagtatccgacgacgccgatctattgaagctctttacagtacatgagctgatgcgatggcccgaggttgccaagacgtatggccgccatctttgcgaatccgatatttttgacgcccagccgaaccaatccggagacgagctggcgcaccagcgatggcaagatctgcgtaagcgtgtcatcgagcacaatgtgcgagtcatcgccaaatactacactcgcattggcatgaagcggttgacccagcttctcgacttgacggaagacgagactgagaagtacattagtgaattggtctgttccaagacggtgtacgctcgcatcgaccgtccagctcggatcgtgaatttcgccaagcccagggacgtagacgatgtgttgaatgagtggagccacaacatgaagagcttgttgggattactggagcgtgtcgaccacctcatcaccaaggaggagatgatggctcgtattcaacccggcgccaccacgaagagcggaaaaggcaaagagaaaaagagcaagaagagcaaagcatag

SEQ ID NO: 26366 - protein, 497 aa, Muscodor strobelii
  misc_feature: SGI Peptide ID NO. 569015
  misc_feature (322)..(438): Pfam Id: PF01399 Pfam Desc: PCI domain
  misc_feature (326)..(438): Pfam Id: PF01399 Pfam Desc: PCI domain
  misc_feature (1)..(479): NCBI GI: 85118357 Blast Desc: NCU02650 [Neurospora crassa OR74A] gi|28927232|gb|EAA36187.1| NCU02650 [Neurospora crassa OR74A]
  misc_feature (1)..(488): NCBI GI: 261353728 Blast Desc: 26S proteasome regulatory subunit RPN5 [Verticillium albo-atrum VaMs.102]
  misc_feature (1)..(479): NCBI GI: 46135833 Blast Desc: FG09432.1 [Gibberella zeae PH-1]
  misc_feature (1)..(496): NCBI GI: 171684419 Blast Desc: protein product [Podospora anserina] gi|170942170|emb|CAP67822.1| protein product [Podospora anserina]
  misc_feature (1)..(479): NCBI GI: 256727655 Blast Desc: [Nectria haematococca mpVI 77-13-4]
  misc_feature (1)..(497): NCBI GI: 156046755 Blast Desc: SS1G_09461 [Sclerotinia sclerotiorum 1980] gi|154693856|gb|EDN93594.1| SS1G_09461 [Sclerotinia sclerotiorum 1980]
  misc_feature (1)..(496): NCBI GI: 39970283 Blast Desc: MGG_02608 [Magnaporthe grisea 70-15] gi|149209689|ref|XP_001522219.1| MGCH7_ch7g327 [Magnaporthe grisea 70-15] gi|86196282|gb|EAQ70920.1| MGCH7_ch7g327 grisea
  misc_feature (1)..(486): NCBI GI: 116193225 Blast Desc: CHGG_06330 [Chaetomium globosum CBS 148.51] gi|88182243|gb|EAQ89711.1| CHGG_06330 [Chaetomium globosum CBS 148.51]
  misc_feature (1)..(490): NCBI GI: 154322300 Blast Desc: BC1G_01297 [Botryotinia fuckeliana B05.10] gi|150850544|gb|EDN25737.1| BC1G_01297 [Botryotinia fuckeliana B05.10]
  misc_feature (5)..(477): NCBI GI: 189202016 Blast Desc: 26S proteasome non-ATPase regulatory subunit 12 [Pyrenophora tritici-repentis Pt-1C-BFP] gi|187984443|gb|EDU49931.1| 26S proteasome non-ATPase regulatory
MTDAAFKPEKDFSKEADTLIPEAEKLAKNDIQAAIEKLTVFEKQTRQASDLASTSRTLIAICTICKDAGNWSLLNDQVLVLSKKHGQLKQAITKMVQTVMTFLDSTPNMETKLSVIETLRTVTEGKIFVEVERARVTKILSDIKKQQGDLKSAMETLCELQVETFGSMDRREKTEFILAQVALCIENKDWTQAGILSRKISTRYLSRKPKKTPEQIEKEKKAREEKEKRGEEVPPEQDDDTTDLKLAYYGQQITLAKHDGKYLDVCKHYRQVLDTEAVEEDPDKLQPTLQRIIYFVILAPHDNEQHDLLHRIFRDTRTSQVSDDADLLKLFTVHELMRWPEVAKTYGRHLCESDIFDAQPNQSGDELAHQRWQDLRKRVIEHNVRVIAKYYTRIGMKRLTQLLDLTEDETEKYISELVCSKTVYARIDRPARIVNFAKPRDVDDVLNEWSHNMKSLLGLLERVDHLITKEEMMARIQPGATTKSGKGKEKKSKKSKA

SEQ ID NO: 26367 - DNA, 2011 bp, Muscodor strobelii
  misc_feature: SGI EST ID NO. CUFF.62180.0
  misc_feature: Variant of the nucleotide sequence at SEQ ID NO 26365
cgcaactgtgccagcatcatcatccatcggtggcagtcacaacacacaacacacaaacacgctcaaatcctacccacctctgcataacaacaccattagccgctcctcgacacgcaccgtaccactggctgtcaaatcataatcatcccacattctgtcatccctcacactccctccacctcccctgcgaaccgcccaccatgaccgatgcggcgttcaagcccgagaaggacttctccaaagaggccgacactttgatcccagaggcagagaagctcgccaagaatgacatacaggccgccatcgagaagctcaccgtctttgagaaacagactcgacaggcttcagatcttgcatccacatccagaaccctgattgccatatgtaccatctgcaaagatgccggtaactggagtctcctcaacgaccaggtcctggtcctgtccaagaagcatggccagctcaaacaggccatcaccaagatggtccagaccgtcatgaccttcctcgacagcacacccaacatggagaccaagctctccgttatcgagaccctgcgcaccgttaccgaaggcaagatcttcgtcgaagtcgagcgcgcccgcgttaccaagatcctctccgacatcaagaagcagcagggcgacctcaagtctgccatggagacgttatgtgagctacaagtcgagacgttcggctctatggatagacgggaaaagaccgagtttattctcgcccaggttgctctctgcatcgagaacaaggactggacacaggccggcattctcagccgcaagatcagcacacgatacctctcgcgcaagcccaagaagaccccggagcagatagagaaagagaagaaggcacgggaggaaaaggagaagagaggcgaggaggtaccgccggagcaggacgacgacacaaccgacttgaagctggcatactacggacagcagatcaccctggcgaagcacgatggcaaatacctggatgtgtgcaagcactacagacaagtcttggacacggaggctgtcgaagaagaccctgacaagctccaacccacactccaacgcatcatctactttgtcattctcgcccctcacgataacgaacaacacgacctcctgcacagaatcttccgcgacacccgaacgtctcaagtatccgacgacgccgatctattgaagctctttacagtacatgagctgatgcgatggcccgaggttgccaagacgtatggccgccatctttgcgaatccgatatttttgacgcccagccgaaccaatccggagacgagctggcgcaccagcgatggcaagatctgcgtaagcgtgtcatcgagcacaatgtgcgagtcatcgccaaatactacactcgcattggcatgaagcggttgacccagcttctcgacttgacggaagacgagactgagaagtacattagtgaattggtctgttccaagacggtgtacgctcgcatcgaccgtccagctcggatcgtgaatttcgccaagcccagggacgtagacgatgtgttgaatgagtggagccacaacatgaagagcttgttgggattactggagcgtgtcgaccacctcatcaccaaggaggagatgatggctcgtattcaacccggcgccaccacgaagagcggaaaaggcaaagagaaaaagagcaagaagagcaaagcatagatcgggtaacttggtcttgatgagacggcatacagggagccttactagagcggcaatgagcggttggtttcgatatgaaacgattgccgtagaactgcatatgtaacgattgatatgctattgtacactacctgcttagattaggaggcaaaagagtcggcgacttcaattgacaaagtcgctcccacatgatgacgaaccgagatatctgcttgggttgcgtgacatttatcaaaacgaaaatgaatgatcttgcctatactcatgtcatctaaactcaatcatatccgaaagcgttatgtagtgcaatacagatg

SEQ ID NO: 26368 - DNA, 903 bp, Muscodor strobelii
  misc_feature: SGI cDNA ID NO. 569016
  misc_feature: Encodes the peptide sequence at SEQ ID NO 26369
atggggtcaactcagccaaaccccgcggatgcgacaacgcgcgatgcgaaggcgaaagcgagtatacctaagggcaaaaaggaggtcaagattcttatgcttcacggttacacacaatccgggcccttattctcagcgaagacaaaaggcatgacgaaactccttatcaaggcgttggcaccggcgaatttacacccaacgctcattttcccctcgggtccgcatagacttaggccgagtgatataccggggtatgtcccgcctgatgagccgagtgcgcttgaggaagatgagttggataattggtcttggtttcgtaaagacgaagcaacgggccaataccgcggtctggacgccggcatgcaagtgatcgcgtccacaatctcggaagcaggcggaatagacggtgtaataggtttcagccaaggaggatgtatggcctcgcttctcgcatccgcgttagagccttctcacaatcctccatcgtctaccgttcctcctccttccctaccatcctcctccccatccaacccctcttccccttcatcgactctagaaggctgggattggctttccgccctccgcgaagcaaaccataacaaacccctaaaattcgtagtctgctactcagcgttcttcgcaccgccagagaacctgcagtggttgtacgaggggaagattcaaacgcctactttacatttcttgggcgggctggatacggttgttgaggagagtaggagtatgggacttgtggagcggtgtaaggaccccgttgtgcttacgcatcctggtggtcattatgtgcctgttgctagggactgggttatgcctttggttgcttggttgagggatagagttgtcgaggggagtggcaagggcgagaacggcgaggagaagctttag

SEQ ID NO: 26369 - protein, 300 aa, Muscodor strobelii
  misc_feature: SGI Peptide ID NO. 569016
  misc_feature (26)..(291): Pfam Id: PF03959 Pfam Desc: Serine hydrolase (FSH1)
  misc_feature (26)..(156): Pfam Id: PF03959 Pfam Desc: Serine hydrolase (FSH1)
  misc_feature (223)..(269): Pfam Id: PF03959 Pfam Desc: Serine hydrolase (FSH1)
  misc_feature (26)..(288): NCBI GI: 170940361 Blast Desc: protein product [Podospora anserina]
  misc_feature (11)..(288): NCBI GI: 256727074 Blast Desc: [Nectria haematococca mpVI 77-13-4]
  misc_feature (19)..(294): NCBI GI: 46135831 Blast Desc: FG09431.1 [Gibberella zeae PH-1]
  misc_feature (15)..(287): NCBI GI: 39970281 Blast Desc: MGG_02607 [Magnaporthe grisea 70-15] gi|145017614|gb|EDK01977.1| MGG_02607 [Magnaporthe grisea 70-15]
  misc_feature (15)..(284): NCBI GI: 149209687 Blast Desc: MGCH7_ch7g326 [Magnaporthe grisea 70-15] gi|86196281|gb|EAQ70919.1| MGCH7_ch7g326 [Magnaporthe grisea 70-15]
  misc_feature (25)..(274): NCBI GI: 156046757 Blast Desc: SS1G_09462 [Sclerotinia sclerotiorum 1980] gi|154693857|gb|EDN93595.1| SS1G_09462 [Sclerotinia sclerotiorum 1980]
  misc_feature (26)..(300): NCBI GI: 159127957 Blast Desc: dihydrofolate reductase [Aspergillus fumigatus A1163]
  misc_feature (26)..(300): NCBI GI: 169780410 Blast Desc: [Aspergillus oryzae RIB40] gi|238505451|ref|XP_002383952.1| dihydrofolate reductase [Aspergillus flavus NRRL3357] gi|83773409|dbj|BAE63536.1| protein
  misc_feature (24)..(300): NCBI GI: 261193755 Blast Desc: dihydrofolate reductase [Ajellomyces dermatitidis SLH14081] gi|239588888|gb|EEQ71531.1| dihydrofolate reductase [Ajellomyces dermatitidis SLH14081]
  misc_feature (26)..(300): NCBI GI: 71000521 Blast Desc: dihydrofolate reductase [Aspergillus fumigatus Af293] gi|66852581|gb|EAL92906.1| dihydrofolate reductase [Aspergillus fumigatus Af293]
  misc_feature (27)..(269): SWISSPROT Homolog: EC 1.5.1.3 Dihydrofolate reductase
MGSTQPNPADATTRDAKAKASIPKGKKEVKILMLHGYTQSGPLFSAKTKGMTKLLIKALAPANLHPTLIFPSGPHRLRPSDIPGYVPPDEPSALEEDELDNWSWFRKDEATGQYRGLDAGMQVIASTISEAGGIDGVIGFSQGGCMASLLASALEPSHNPPSSTVPPPSLPSSSPSNPSSPSSTLEGWDWLSALREANHNKPLKFVVCYSAFFAPPENLQWLYEGKIQTPTLHFLGGLDTVVEESRSMGLVERCKDPVVLTHPGGHYVPVARDWVMPLVAWLRDRVVEGSGKGENGEEKL

SEQ ID NO: 26370 - DNA, 1219 bp, Muscodor strobelii
  misc_feature: SGI EST ID NO. CUFF.62189.0
  misc_feature: Variant of the nucleotide sequence at SEQ ID NO 26368
atcaaagccgtacaacttcacctctcaccaactctcagcgatacatatagatctagagttgcttcaaattgcgttttgatgatatcttcaatctttttacttcgatcaagacaattacattggtatacacctcttgctcaaaattgccgacggttcaccttcgccatggggtcaactcagccaaaccccgcggatgcgacaacgcgcgatgcgaaggcgaaagcgagtatacctaagggcaaaaaggaggtcaagattcttatgcttcacggttacacacaatccgggcccttattctcagcgaagacaaaaggcatgacgaaactccttatcaaggcgttggcaccggcgaatttacacccaacgctcattttcccctcgggtccgcatagacttaggccgagtgatataccggggtatgtcccgcctgatgagccgagtgcgcttgaggaagatgagttggataattggtcttggtttcgtaaagacgaagcaacgggccaataccgcggtctggacgccggcatgcaagtgatcgcgtccacaatctcggaagcaggcggaatagacggtgtaataggtttcagccaaggaggatgtatggcctcgcttctcgcatccgcgttagagccttctcacaatcctccatcgtctaccgttcctcctccttccctaccatcctcctccccatccaacccctcttccccttcatcgactctagaaggctgggattggctttccgccctccgcgaagcaaaccataacaaacccctaaaattcgtagtctgctactcagcgttcttcgcaccgccagagaacctgcagtggttgtacgaggggaagattcaaacgcctactttacatttcttgggcgggctggatacggttgttgaggagagtaggagtatgggacttgtggagcggtgtaaggaccccgttgtgcttacgcatcctggtggtcattatgtgcctgttgctagggactgggttatgcctttggttgcttggttgagggatagagttgtcgaggggagtggcaagggcgagaacggcgaggagaagctttaggaaggcgataatgattttgtgatgtttcgcttgtggagggattttatagatgagagggatagactatgagatatctgcatagactagatctgagcgagattctagaaacttacagttggttcctgctcatatgtcaaaaatatcagtttcg

SEQ ID NO: 26371 - DNA, 975 bp, Muscodor strobelii
  misc_feature: SGI cDNA ID NO. 569017
  misc_feature: Encodes the peptide sequence at SEQ ID NO 26372
atgttgacccgatccctcgctcgtgccgcggtgccggcctcgcgctccctccgcgccttctcgtccactgccatgcagatgcgcaccccgtccatagctgatgtcacacctgcgggcgtcgagtccttcaatgccaagcagaaagagttccgcgagagcttggtccgggcccagcaggagaaggaagccaaattacgagcagaggtttccaagtccgagcaggagcacggcgatggtctgttgtcccgcgtcatatacggcaccaaggagggccgtgagatggacgctcagctcgaggccagcttctctgccgtccttgcccgcggcaaatacatgcactctattgtcttccacgaagtccagcctgacaaggtagacgagtacgtcaagctagtcggcgactggtatcccaaagtagcttccaaggaagagaataaggttcatctggttggaagctggcggaccgaggttggcgactgcgatacattcgtccacatttgggagtatcagcgctaccaaggttaccacgactctctccacaccatctcacaacatcccgaattccacgaattcgacaagaagctcaagacactcatcaaggctaagaagtcctcgctgatgcaagagttttctttctggccgacgacctcgccccgcaagctcggcggcgtcttcgagttgcgatcctacacacttcacccaggcaatcttctcgagtgggagacccactggcgtaggggcctgaaggctcggcgtgaagtcatggaaggcgtcggtgcttggttcgtccagattggcgatctgaacacggttcaccatctctggcagtttgccaacctggaggagcgcaaggtgcgacgcgaggagagctggaagcaggagggctgggccgagactgtgcataaaacggtgccactcatccagtctatgaagtctaggatactggtcccactgccatggtctcctgtggcttaa

SEQ ID NO: 26372 - protein, 324 aa, Muscodor strobelii
  misc_feature: SGI Peptide ID NO. 569017
  misc_feature (225)..(322): Pfam Id: PF07978 Pfam Desc: NIPSNAP
  misc_feature (1)..(324): NCBI GI: 156046685 Blast Desc: SS1G_09443 [Sclerotinia sclerotiorum 1980] gi|154693838|gb|EDN93576.1| SS1G_09443 [Sclerotinia sclerotiorum 1980]
  misc_feature (1)..(324): NCBI GI: 256727654 Blast Desc: [Nectria haematococca mpVI 77-13-4]
  misc_feature (1)..(324): NCBI GI: 154322346 Blast Desc: BC1G_01320 [Botryotinia fuckeliana B05.10] gi|150850567|gb|EDN25760.1| BC1G_01320 [Botryotinia fuckeliana B05.10]
  misc_feature (10)..(324): NCBI GI: 242813077 Blast Desc: NIPSNAP family protein [Talaromyces stipitatus ATCC 10500] gi|218714432|gb|EED13855.1| NIPSNAP family protein [Talaromyces stipitatus ATCC 10500]
  misc_feature (10)..(324): NCBI GI: 212544656 Blast Desc: NIPSNAP family protein [Penicillium marneffei ATCC 18224] gi|210065451|gb|EEA19545.1| NIPSNAP family protein [Penicillium marneffei ATCC 18224]
  misc_feature (1)..(324): NCBI GI: 145245311 Blast Desc: An11g09650 [Aspergillus niger] gi|134079622|emb|CAK40838.1| protein product [Aspergillus niger]
  misc_feature (5)..(324): NCBI GI: 169595266 Blast Desc: SNOG_00370 [Phaeosphaeria nodorum SN15] gi|111070745|gb|EAT91865.1| SNOG_00370 [Phaeosphaeria nodorum SN15]
  misc_feature (1)..(323): NCBI GI: 46135827 Blast Desc: FG09429.1 [Gibberella zeae PH-1]
  misc_feature (14)..(324): NCBI GI: 189202674 Blast Desc: NIPSNAP family protein [Pyrenophora tritici-repentis Pt-1C-BFP] gi|187984772|gb|EDU50260.1| NIPSNAP family protein [Pyrenophora tritici-repentis Pt-1C-BFP]
  misc_feature (16)..(324): NCBI GI: 170940363 Blast Desc: protein product [Podospora anserina]
MLTRSLARAAVPASRSLRAFSSTAMQMRTPSIADVTPAGVESFNAKQKEFRESLVRAQQEKEAKLRAEVSKSEQEHGDGLLSRVIYGTKEGREMDAQLEASFSAVLARGKYMHSIVFHEVQPDKVDEYVKLVGDWYPKVASKEENKVHLVGSWRTEVGDCDTFVHIWEYQRYQGYHDSLHTISQHPEFHEFDKKLKTLIKAKKSSLMQEFSFWPTTSPRKLGGVFELRSYTLHPGNLLEWETHWRRGLKARREVMEGVGAWFVQIGDLNTVHHLWQFANLEERKVRREESWKQEGWAETVHKTVPLIQSMKSRILVPLPWSPVA

SEQ ID NO: 26373 - DNA, 2080 bp, Muscodor strobelii
  misc_feature: SGI EST ID NO. CUFF.62388.0
  misc_feature: Variant of the nucleotide sequence at SEQ ID NO 26371
tggtgctgcaacattatgagctaagcctgttacagacaggtcctcttcgaagtctgtgctaagcctagcgagggaagaggtcctggaggattgatgtcatccggcggttctgggtcgccgtcggcgcagctccccccagcttcagcgcatcagctctccacccgagatacgcagcaagagcatccatccaaaacctggggaacctgaatgtgcaccaattgattcatcacttctattgtaccgtacctctccaactcacctccaactgcgaccgtctcttcaccttcctaccttccacactctgaatgcgggggatcctcacgtccagccaattatcaatcgcctgatttgactcttcccgcaatcgttcctgcctctgcaattgtttcacgttggtcacttcagaccacttcggattcacgtcgtggtttgacttgagtcgtcccttcctctcggccatcatatttactttgatcatctttggacttgacatctgcgtttcctttcttctgtgtttatatccgcggtcttgctccgcacctcacctcccttgccaactccttttcttgggcagctccatcatcccctgtcttctctaaatccttactacccgccaacaaacaccgacctcgcccgtcatgttgacccgatccctcgctcgtgccgcggtgccggcctcgcgctccctccgcgccttctcgtccactgccatgcagatgcgcaccccgtccatagctgatgtcacacctgcgggcgtcgagtccttcaatgccaagcagaaagagttccgcgagagcttggtccgggcccagcaggagaaggaagccagtgagtgcccctctcaatattttattagcttggaacactcggccggagaagatccctggagttggatccaggctaagagcccctaacctagaattacgagcagaggtttccaagtccgagcaggagcacggcgatggtctgttgtcccgcgtcatatacggcaccaaggagggccgtgagatggacgctcagctcgaggccagcttctctgccgtccttgcccgcggcaaatacatgcactctattgtcttccacgaagtccagcctgacaaggtagacgagtacgtcaagctagtcggcgactggtatcccaaagtagcttccaaggaagagaataaggttcatctggttggaagctggcggaccgaggttggcgactgcgatacattcgtccacatttgggagtatcagcgctaccaaggttaccacgactctctccacaccatctcacaacatcccgaattccacgaattcgacaagaagctcaagacactcatcaaggctaagaagtcctcgctgatgcaagagttttctttctggccgacgacctcgccccgcaagctcggcggcgtcttcgagttgcgatcctacacacttcacccaggcaatcttctcgagtgggagacccactggcgtaggggcctgaaggctcggcgtgaagtcatggaaggcgtcggtgcttggttcgtccagattggcgatctgaacacggttcaccatctctggcagtttgccaacctggaggagcgcaaggtgcgacgcgaggagagctggaagcaggagggctgggccgagactgtgcataaaacggtgccactcatccagtctatgaagtctaggatactggtcccactgccatggtctcctgtggcttaagtcgacaggatcatgtcgtcatccgaaagggcctttgcgataattaatgtccctccgtcagtctcgctggagattccgtgctatattttaacatgagcagcttggtctcttttgcttgatcgcgagaatgagtttggcaacagtccatatggcacgattgtgcaaggacagccaaagtgtataatattgggagcagggtagttggcatctgattactggtcttgcgttggctgtgctcttgccgcgcttttgtgtctgagagaaaacggataccaggttcaggtagcaacatatgcgaaaaggcattttcacaactggtttagcaagatctcgtcacgtgtcgattgcgatgccctcaattactttatatcatcat

SEQ ID NO: 26374 - DNA, 1047 bp, Muscodor strobelii
  misc_feature: SGI cDNA ID NO. 569018
  misc_feature: Encodes the peptide sequence at SEQ ID NO 26375
atggcatccgctgcaacagaggttcctacgcagcccaaggcgttgacttggagattgaccgaaattcctaaaggaaccacggaacaaagcctcgttcactattttgaatatgaagaccgtaatagagttactgtctgctccctctgccctgatgcggaaggcagtgatgacctgactgccaccgtattgtaccgaccacaccctgaccgtccgaatgaaccgccgcgattcacctatggcataccaggtgatgtgggcatcgataaggattttgagctgtggacgactctctattgccctccagaaggaacaaccattgcggcagatatcatcgccgtgacaggcctcgcggggcatgcatttggctcttgggcgcattccgatgagaaaatgtggcttcgagattatctgccgccctttgcacctaacgcgcgaatcctgacatacggctacgatagtcgtatctcagggcccaacacgtctgcatctcgactgtcagacttcagcaacagtttctcagagaatttaatcgatatgcgcgacgcttcaaacacaatgacgcgcatgctgcgatccaacccaaatatgaacagctcccgtctacctgtaagagcaatcatcttctttgcggcgcctcatcgaggaatggatacaagagctctacatgccatagcaaaggacagtcccgctcaagagttggttgcagagctccagcccgattccgaggctctgaagcagttgaacgaagatttctatggagttgcgcacgacattgatattttgacgtgctatgaaacacggctcacaagaactatggtttttgatgattccaggcagaagtgggctcgcacgggcgacccgatcatgatattgaacgccgcttctgccatgttgtattggccaaaagagaaacgtacgggcactgctgccaacagcgcagatatcaagagaaaggcctcgagactcacacggagaaacgtcgagaccaaggctacgacatacgtgaagaagaatatagaggcgcgagtcttcaacgcaatcttttag

SEQ ID NO: 26375 - protein, 348 aa, Muscodor strobelii
  misc_feature: SGI Peptide ID NO. 569018
  misc_feature (8)..(301): NCBI GI: 255934897 Blast Desc: Pc13g00220 [Penicillium chrysogenum Wisconsin 54-1255] gi|211583095|emb|CAP91091.1| Pc13g00220 [Penicillium chrysogenum Wisconsin 54-1255]
  misc_feature (84)..(301): NCBI GI: 255934973 Blast Desc: Pc13g00660 [Penicillium chrysogenum Wisconsin 54-1255] gi|211583133|emb|CAP91135.1| Pc13g00660 [Penicillium chrysogenum Wisconsin 54-1255]
  misc_feature (84)..(301): NCBI GI: 255934967 Blast Desc: Pc13g00620 [Penicillium chrysogenum Wisconsin 54-1255] gi|211583130|emb|CAP91131.1| Pc13g00620 [Penicillium chrysogenum Wisconsin 54-1255]
  misc_feature (84)..(301): NCBI GI: 255934893 Blast Desc: Pc13g00190 [Penicillium chrysogenum Wisconsin 54-1255] gi|211583093|emb|CAP91088.1| Pc13g00190 [Penicillium chrysogenum Wisconsin 54-1255]
  misc_feature (84)..(301): NCBI GI: 255934965 Blast Desc: Pc13g00600 [Penicillium chrysogenum Wisconsin 54-1255] gi|211583129|emb|CAP91129.1| Pc13g00600 [Penicillium chrysogenum Wisconsin 54-1255]
  misc_feature (95)..(320): NCBI GI: 240107044 Blast Desc: CPC735_018350 [Coccidioides posadasii C735 delta SOWgp]
  misc_feature (84)..(220): NCBI GI: 115443454 Blast Desc: [Aspergillus terreus NIH2624] gi|114188403|gb|EAU30103.1| [Aspergillus terreus NIH2624]
  misc_feature (83)..(317): NCBI GI: 238846162 Blast Desc: LipA and NB-ARC domain-containing protein [Microsporum canis CBS 113480]
  misc_feature (95)..(320): NCBI GI: 119175127 Blast Desc: CIMG_09465 [Coccidioides immitis RS]
  misc_feature (17)..(180): NCBI GI: 154320526 Blast Desc: BC1G_01735 [Botryotinia fuckeliana B05.10] gi|150853424|gb|EDN28616.1| BC1G_01735 [Botryotinia fuckeliana B05.10]
MASAATEVPTQPKALTWRLTEIPKGTTEQSLVHYFEYEDRNRVTVCSLCPDAEGSDDLTATVLYRPHPDRPNEPPRFTYGIPGDVGIDKDFELWTTLYCPPEGTTIAADIIAVTGLAGHAFGSWAHSDEKMWLRDYLPPFAPNARILTYGYDSRISGPNTSASRLSDFSNSFSENLIDMRDASNTMTRMLRSNPNMNSSRLPVRAIIFFAAPHRGMDTRALHAIAKDSPAQELVAELQPDSEALKQLNEDFYGVAHDIDILTCYETRLTRTMVFDDSRQKWARTGDPIMILNAASAMLYWPKEKRTGTAANSADIKRKASRLTRRNVETKATTYVKKNIEARVFNAIF

SEQ ID NO: 26376 - DNA, 3475 bp, Muscodor strobelii
  misc_feature: SGI EST ID NO. CUFF.62195.0
  misc_feature: Variant of the nucleotide sequence at SEQ ID NO 26374
tggagattgaccgaaattcctaaaggaaccacggaacaaagcctcgttcactattttgaatatgaagaccgtaatagagttactgtctgctccctctgccctgatgcggaaggcagtgatgacctgactgccaccgtattgtaccgaccacaccctgaccgtccgaatgaaccgccgcgattcacctatggcataccaggtgatgtgggcatcgataaggattttgagctgtggacgactctctattgccctccagaaggaacaaccattgcggcagatatcatcgccgtgacaggcctcgcggggcatgcatttggctcttgggcgcattccgatgagaaaatgtggcttcgagattatctgccgccctttgcacctaacgcgcgaatcctgacatacggctacgatagtcgtatctcagggcccaacacgtctgcatctcgactgtcagacttcagcaacagtttctcagagaatttaatcgatatgcgcgacgcttcaaactgcgaacaacggtaatccaacctgtccagaagcgaagataacgtactgaagtgatatcagtccgataattttcatagggcacagccttgggtgtatgataatcaagaagacaatgacgcgcatgctgcgatccaacccaaatatgaacagctcccgtctacctgtaagagcaatcatcttctttgcggcgcctcatcgaggaatggatacaagagctctacatgccatagcaaaggacagtcccgctcaagagttggttgcagagctccagcccgattccgaggctctgaagcagttgaacgaagatttctatggagttgcgcacgacattgatattttgacgtgctatgaaacacggctcacaagaactatggtttttgatgattccaggcagaagtgggctcgcacgggcgacccgatcatgatattgaacgccgcttctgccatgttgtattggccaaaagagaaacgtgtttccaccattgctgatcactccagcatcgcgaaattgaggaaaaacaagtcccatttctcaaatgtgcgtgctgcaatcagacgggcactgctgccaacagcgcagatatcaagagaaaggcctcgagactcacacggagaaacgtcggttagaccatctcagagagagttctcgtctaacacaataagagaccaaggctacgacatacgtgaagaagaatatagaggcgcgagtcttcaacgcaatcttttagggcaatccatcgagagccaagctcaccaatatgcgatcaccatacctcagaactcacagcatatgtattcccttcgaatgccacacgtgagccagggagaggctatgaaatctggatctgcgctatttgatggtcagcagccacgttctgaaccagaggatacgttcgaatccacgtctggtagtctgaatcagggttcgataggtcacaatgtgtcttcgccgagccattcacccccagaaactccattcacaggcagtactagtcttcctctgcgtgtcttacttgggtctccctcaaaaaacaacagtcgagcagagtctttgcagctagtaacggcggatgactctgagaatacatcgaaggatgctcgcccgtcttccgtgagcttgtcaaccaagccaaaaagaactacttcacatcagtcagctatgatttgtggtagctgtggcaaaatgatgactaggcagagctatcggtctcccgagcaagccaagctggatttatgttcagattgcatccaaacccacgacatgcccaatcaacaaaaagaggtcaatttgggctcagcagaagagctcatgcgctccgaaacggaacccacgagtgaaggagttactgatcttgataatttcagctcagtcaattgctctaagtgtgatggaaccatcatgtcatctgatatcttctatcaatgttccctttgcgttggtagcaagcccccgtatcgagcttgccaagactgtcagagagattcaaagttgtcgtgtctggagcacgcgaagttggtttgtaagcgccagttcgtgtattacggagagcgtctctcgtctcgttcttggatcgaccccaaagtcgtagctgaagattccctgattgtgaaagctttaaaagaacaggatctggcgaaaataaacatactggctcgaaatcagagtctcctaaacgcccaaaacgtcgagggttacaatcccctccatgttgcagctcatctaaacctcgtcgccggcgcgaaagctctcttacgacatggcgcagacccagaaagtagagatgcccatggttacacacctctctgcgaatctataagttccaaaaacgaggaactggcccttgagcttctcgatcgaggtgccgtgtggtcggacgcgaagcgtggagctgatactgcattgcatattgcctgtagggcaggatgtgagaaaattgtccgagagctgttaaaacttgcttcaagcggagaacaagcggatgtcacatttgttgatgccaccaatgaggcacaccaaacatcgctttaccatgcctgcgaggcaaagaacttcaacattgctaagcttcttcttactgctggcgcgaacctcgatgcgggttcgggcgatggtgatattacccaactaggaggactggcagcggataacaacatagacgccgttaggtttctcctggaccgtggtgccactgtagacaatcaagacagttcaggtcggacacctctataccgggcagctgatgctaaccactatgagatgtgtcagctcctcatggaacgaggcgcgaatcccaatttagcaacaaaggacaacgcccaaacaatactaggccaagccgcagcgaacggggaccttcgcacagtcgagcttcttataacgggaggtgccgagatcgagtccaaggatgaagagaaaagaacaccgttgtttcgggcggccgcgatgcgaaaatcgggaatctgcctttacctgttgaagcagggagcagaccccaaccccgagctagcgaatcacacaagccagacagacggcgaagtagacaaattcaacccattgcatgttgcaagctatatcggagatttgcctactacaaaggtcctccacgagcatggcgcaaatctggagacccgggacagcgagcaccggactgcagtttatctcgcagcgaggcaggggcattcaaaactctgtgaataccttgtaacatccggtgcagacattcatgggaaacacaggaacgcacacacttgtttgtctgctgccgcttccggcggacatataaaagtatgtgaatacctcatcacatctggtgccaacttggaaaatcacgaagcgcaggacagaaagcctttgatttgggctgcacagaatggacatcgagaagtttgcgagtgtcttattgacgccggtgcagatatagccgcccgagatgaatggggtcacactagtctgagtcttgccgctcacaag

SEQ ID NO: 26377 - DNA, 552 bp, Muscodor strobelii
  misc_feature: SGI cDNA ID NO. 569019
  misc_feature: Encodes the peptide sequence at SEQ ID NO 26378
atgttcaagaagaaggtgagatacacgataatcacgcccatccctagcttcgtcccagggcggctggccgttgaggtactccatagtcacgaggagatcatctctctaaaccctcttgtcctcgaatatgaaaaagtcaaagcacctcgttatgcggccaccgacgagtacttttctacgtggtacgaaatcaaacagagagttcaatatgttcccgggctgggaaagttaggatcaggagacgtcgtttttcaaggatgcttccacgatctctcctggggactgcagacccatatctacgcgccgttcaacgtcgaacttcgaaataggtattgcattgccggaaaccagtccggcattagaccctctgaacggcaggagatcggactcgcggcgctcggcgcgcccaaggagggtctttacctccgggaggatatcgagatacaatgcaacctcgccatgaccggtcatatcaaggcacaaatgaagacggcaagtaagaaaatggtggagagaatcatcgaaaaggcggagctcatgaaacaactttga

SEQ ID NO: 26378 - protein, 183 aa, Muscodor strobelii
  misc_feature: SGI Peptide ID NO. 569019
  misc_feature (1)..(180): NCBI GI: 171691386 Blast Desc: protein product [Podospora anserina] gi|170945641|emb|CAP71754.1| protein product [Podospora anserina]
  misc_feature (1)..(180): NCBI GI: 39942710 Blast Desc: MGG_03435 [Magnaporthe grisea 70-15] gi|145010021|gb|EDJ94677.1| MGG_03435 [Magnaporthe grisea 70-15]
  misc_feature (1)..(180): NCBI GI: 256726757 Blast Desc: NECHADRAFT_57875 [Nectria haematococca mpVI 77-13-4]
  misc_feature (1)..(180): NCBI GI: 46122727 Blast Desc: FG05741.1 [Gibberella zeae PH-1]
  misc_feature (1)..(180): NCBI GI: 164429382 Blast Desc: NCU04506 [Neurospora crassa OR74A] gi|157073459|gb|EAA27681.2| conserved [Neurospora crassa OR74A]
  misc_feature (1)..(180): NCBI GI: 169609863 Blast Desc: SNOG_08023 [Phaeosphaeria nodorum SN15] gi|160701932|gb|EAT84299.2| SNOG_08023 [Phaeosphaeria nodorum SN15]
  misc_feature (1)..(182): NCBI GI: 189205194 Blast Desc: conserved [Pyrenophora tritici-repentis Pt-1C-BFP] gi|187986031|gb|EDU51519.1| conserved [Pyrenophora tritici-repentis Pt-1C-BFP]
  misc_feature (2)..(180): NCBI GI: 255942253 Blast Desc: Pc18g00480 [Penicillium chrysogenum Wisconsin 54-1255] gi|211586628|emb|CAP94272.1| Pc18g00480 [Penicillium chrysogenum Wisconsin 54-1255]
  misc_feature (1)..(180): NCBI GI: 212544486 Blast Desc: conserved [Penicillium marneffei ATCC 18224] gi|210065366|gb|EEA19460.1| conserved [Penicillium marneffei ATCC 18224]
  misc_feature (1)..(180): NCBI GI: 67538458 Blast Desc: AN5399.2 [Aspergillus nidulans FGSC A4] gi|40743369|gb|EAA62559.1| AN5399.2 [Aspergillus nidulans FGSC A4] gi|259485156|tpe|CBF81973.1| TPA: conserved [Aspergillus FGSC
MFKKKVRYTIITPIPSFVPGRLAVEVLHSHEEIISLNPLVLEYEKVKAPRYAATDEYFSTWYEIKQRVQYVPGLGKLGSGDVVFQGCFHDLSWGLQTHIYAPFNVELRNRYCIAGNQSGIRPSERQEIGLAALGAPKEGLYLREDIEIQCNLAMTGHIKAQMKTASKKMVERIIEKAELMKQL

SEQ ID NO: 26379 - DNA, 902 bp, Muscodor strobelii
  misc_feature: SGI EST ID NO. CUFF.62231.0
  misc_feature: Variant of the nucleotide sequence at SEQ ID NO 26377
cgccaacctatagtaagtaaatcctgccaagacctggctcttctactactgtatgaaccatatatatacagtagcatatgtacatacacatgctgtgcatacctcatatgttcatattgctagcgtgggatagtaatatgcggtcatgttcaagaagaaggtgagatacacgataatcacgcccatccctagcttcgtcccagggcggctggccgttgaggtactccatagtcacgaggagatcatctctctaaaccctcttgtcctcgaatatgaaaaagtcaaagcacctcgttatgcggccaccgacgagtacttttctacgtggtacgaaatcaaacagagagttcaatatgttcccgggctgggaaagttaggatcaggagacgtcgtttttcaaggatgcttccacgatctctcctggggactgcagacccatatctacgcgccgttcaacgtcgaacttcgaaataggtattgcattgccggaaaccagtccggcattagaccctctgaacggcaggagatcggactcgcggcgctcggcgcgcccaaggagggtctttacctccgggaggatatcgagatacaatgcaacctcgccatgaccggtcatatcaaggcacaaatgaagacggcaagtaagaaaatggtggagagaatcatcgaaaaggcggagctcatgaaacaactttgattgcgtttgcctggtcggtacctctcgattacacaggacattttccagcctgagaatcgttgcagatctccaatgcctgtaacagggctagagatatataaatgcgaatctctctccttgccccctatcatctttgatcgcctcatcggtcttttttttgtgtagtttactgcacatgtcatcgaaatcttatctgacatcgtcc

SEQ ID NO: 26380 - DNA, 1845 bp, Muscodor strobelii
  misc_feature: SGI cDNA ID NO. 569020
  misc_feature: Elevated expression when VOC is produced
  misc_feature: Encodes the peptide sequence at SEQ ID NO 26381
atggctcttttgatcgaagacgcgacctccaccgactccattctaatatgccaagatccgcctgctttctctctgctcagtcttgattcgctcaagtcggcgaaagaagacctaaaacgaagcttgccctatcatgtagtaatcgaggacatttattccgtcactccactgcaggaaatggccattgttgctaaccaaaggtggcatcatgcctactacgcgtggttccttctcgatctgacgggcactctcgatccttccaggctccgaattgcttgcgataagcttgttcaaatacatcctcttcttcggaccatgttcttccagagtgggtctatcttttatcaggctccgctccaagatgtcacgattgactaccaagaaattccatggagcggtaaaagatcatgcgtgcccgacctaatcgagcgaagctctgtagaaggagggcaacctagatgcagcccgactcgtttccgcttgttacagcacaatccgatccataatttgttggctgttggattgagccatgctcaatacgatggattctgtctttcaaatgtcttcgacaacctgatatctatctacaatggagtaacagtatcgcaaccaccgagtttctctcgtttagttcagcttttgactttgcccaccctggttgccgaagctcaagccttctggcgtaaaaggcttcgccgcagccaaatgacaaagctcgtgcgagacctaaacaccaaccgtccgctgttagacagtagtgtgactaaacacgtcgacttgcccactatgtcgacgagggagacgccattccacgccgcgctctgtcttgcgtgggcaatcaccctgggtgccgcaactaatgtctctgatgtggtgtttgggaccctttcgtccggccgcaacacctcaatcaaaggtatctcgtcactcgtcggaccatgcatcaccacgagtccagttcgtgtaaaactagatgggcctcgggctttcaattctagcgcagataccttgacgctcgggcaggcactcaagcaggtgcatagcgatcatatcgaagcactctcttatgagcatctgggactccgaaagatagttaaggcctgtacagactggccgtcgacaacgcggttctcgagtatggtccaacatcagaacatccatatttggcatccaaattcaagcgagtcggcctctcctttagagcctgcagcagatgggggtctgcaatggagaaaccgaggctctatagcgtgtaagggcgcatgtgatgaggtggacctgtggattacgagcgtaccaattggcgagaatgtgaaaaagttaaagatgcttttcagcgaggagatattacccagagaagtagctgaggccctgctttccaccctaggcgcgaacctcggttctatactacagaataccgatgaaagcgttacaaccctgatcgcagagtcgagaaaacggctaggtggtaccagacttccagtcaatctctcccaagacgcacaaggatcgacgcaagatgagactaccccggctgtgtctgacgccatgttgagaacatctgacatacttcaggccttatggtgccgagtgcttgaatcagcacctgaaaagcagttcgcatcgtcggattcgttctacgcgcagggcggtgattcgatggatgcggcgatggttgctggacttgcgcgtgtagaaggtttgcccttaagtgtgcaggacatggctgaatgcgaggagttcggagcacaggttcgaagaatagagaatggcggtcagggtgcgcgaaggacgaatgggttggaatgggatatcagtgacagcatgtgggaagatgacgattag

SEQ ID NO: 26381 - protein, 614 aa, Muscodor strobelii
  misc_feature: SGI Peptide ID NO. 569020
  misc_feature (48)..(325): Pfam Id: PF00668 Pfam Desc: Condensation domain
  misc_feature (277)..(325): Pfam Id: PF00668 Pfam Desc: Condensation domain
  misc_feature (48)..(107): Pfam Id: PF00668 Pfam Desc: Condensation domain
  misc_feature (11)..(589): NCBI GI: 121704124 Blast Desc: nonribosomal peptide synthase, [Aspergillus clavatus NRRL 1] gi|119398470|gb|EAW08900.1| nonribosomal peptide synthase, [Aspergillus clavatus NRRL 1]
  misc_feature (48)..(569): NCBI GI: 171682906 Blast Desc: protein product [Podospora anserina] gi|170941412|emb|CAP67063.1| protein product [Podospora anserina]
  misc_feature (48)..(612): NCBI GI: 59876617 Blast Desc: nonribosomal peptide synthetase 4 [Cochliobolus heterostrophus]
  misc_feature (48)..(498): NCBI GI: 116201311 Blast Desc: CHGG_08540 [Chaetomium globosum CBS 148.51] gi|88177058|gb|EAQ84526.1| CHGG_08540 [Chaetomium globosum CBS 148.51]
  misc_feature (48)..(575): NCBI GI: 256730168 Blast Desc: NECHADRAFT_82887 [Nectria haematococca mpVI 77-13-4]
  misc_feature (48)..(585): NCBI GI: 189191588 Blast Desc: HC-toxin synthetase [Pyrenophora tritici-repentis Pt-1C-BFP] gi|187973739|gb|EDU41238.1| HC-toxin synthetase [Pyrenophora tritici-repentis Pt-1C-BFP]
  misc_feature (48)..(585): NCBI GI: 32264582 Blast Desc: nonribosomal peptide synthase [Alternaria brassicae]
  misc_feature (20)..(585): NCBI GI: 119495915 Blast Desc: nonribosomal peptide synthase Pes1 [Neosartorya fischeri NRRL 181] gi|119412895|gb|EAW22836.1| nonribosomal peptide synthase Pes1 [Neosartorya fischeri NRRL 181]
  misc_feature (48)..(585): NCBI GI: 169623203 Blast Desc: SNOG_14834 [Phaeosphaeria nodorum SN15] gi|160704933|gb|EAT77686.2| SNOG_14834 [Phaeosphaeria nodorum SN15]
  misc_feature (48)..(577): NCBI GI: 238840446 Blast Desc: nonribosomal peptide synthase [Microsporum canis CBS 113480]
  misc_feature (48)..(364): SWISSPROT Homolog: EC 5.1.1.13 Aspartate racemase
  misc_feature (48)..(364): SWISSPROT Homolog: EC 5.1.1.11 Phenylalanine racemase (ATP-hydrolyzing)
  misc_feature: Useful for introducing or modulating the production of volatile compounds
MALLIEDATSTDSILICQDPPAFSLLSLDSLKSAKEDLKRSLPYHVVIEDIYSVTPLQEMAIVANQRWHHAYYAWFLLDLTGTLDPSRLRIACDKLVQIHPLLRTMFFQSGSIFYQAPLQDVTIDYQEIPWSGKRSCVPDLIERSSVEGGQPRCSPTRFRLLQHNPIHNLLAVGLSHAQYDGFCLSNVFDNLISIYNGVTVSQPPSFSRLVQLLTLPTLVAEAQAFWRKRLRRSQMTKLVRDLNTNRPLLDSSVTKHVDLPTMSTRETPFHAALCLAWAITLGAATNVSDVVFGTLSSGRNTSIKGISSLVGPCITTSPVRVKLDGPRAFNSSADTLTLGQALKQVHSDHIEALSYEHLGLRKIVKACTDWPSTTRFSSMVQHQNIHIWHPNSSESASPLEPAADGGLQWRNRGSIACKGACDEVDLWITSVPIGENVKKLKMLFSEEILPREVAEALLSTLGANLGSILQNTDESVTTLIAESRKRLGGTRLPVNLSQDAQGSTQDETTPAVSDAMLRTSDILQALWCRVLESAPEKQFASSDSFYAQGGDSMDAAMVAGLARVEGLPLSVQDMAECEEFGAQVRRIENGGQGARRTNGLEWDISDSMWEDDD

SEQ ID NO: 26382 - DNA, 3820 bp, Muscodor strobelii
  misc_feature: SGI EST ID NO. CUFF.62234.0
  misc_feature: Variant of the nucleotide sequence at SEQ ID NO 26380
taccagcagacgtggggatcaactcaactaatgtgaagccaggagcgaacagtgttgcgtatattacttacacttctggcagcactggtcgggccaagggctgcatcgttgatcacgggtccctagcaaccaccatctccaaacttgctgagtggaagcagatagatcccagtgtcaatacgctatgggcatccacatggagcttcgatgtgcacctatcacagatatgggagccgctgaccactggtgggatgatctgtgtaccctcccaagcggagatgcacgagaatgccgaggtcacactcatgaaatacaacgtcaaccatgcattcttcactccaactcaagcaaagatgaccaacttcagcagcgccccctgcgtccgatctatagcgatgggtggagaatccatcaatttcaacctaacaccgctcttagaggcaggaatccgcatcttcaacgaatacggaccgtcagaagcgaccggttgcgtcactggccaggagctaactctggacgatcaggaaaataataaaatcggtcgagcactctttggcaattgctgggttgtcgagcctgataggccgtgtcgtctggcacctattggaagcataggagaactcgtgactggaggaacattagcccgaggatatctaaatcaaccagccctaacgcgtgaggcgttcttcgacagcccatattgggcccagagagtatgtccacggctgtatcgtacaggcgatttggtctgtcaaaatgtggacggctcattccggtatctgggtcgcgcagatactcaggtgaagatcaacggggtacgaatcgaggttgcagaaattgagagtcgcattgttgagatagattcaaatatcactgcagtcgtcgcagcccttgattctggtgacaaagagggatcgaaaatcctagtaggatttatcggtggtgatgacttccaaaacctctctgttcagttggctactggcggtttccaagagaaatctgagagcatacgtagaaagctagcgcgggtcctcccaagaatcatgattcctcgtgtgtggatgccactgtcgaacgtcagaaggacatcgactggcaaggttgatcgaaaaactctacaagaagtttttgaagcatacaaggagatgtgttcaagcgaggagccgtcggacatgaacgaggtacttacggatactgagcaggtaatgcgaagcctctgggcttctgtggtgaaatgcgatcaatccaagcttcacaaatccagcaattttttcgatctcggcgactccatcacggcaataggcctcgttgctgcagcaggtagatttggatatcatttgtctgtgtcttctctattcaagaatccaagcctatcggagatggctcttttgatcgaagacgcgacctccaccgactccattctaatatgccaagatccgcctgctttctctctgctcagtcttgattcgctcaagtcggcgaaagaagacctaaaacgaagcttgccctatcatgtagtaatcgaggacatttattccgtcactccactgcaggaaatggccattgttgctaaccaaaggtggcatcatgcctactacgcgtggttccttctcgatctgacgggcactctcgatccttccaggctccgaattgcttgcgataagcttgttcaaatacatcctcttcttcggaccatgttcttccagagtgggtctatcttttatcaggctccgctccaagatgtcacgattgactaccaagaaattccatggagcggtaaaagatcatgcgtgcccgacctaatcgagcgaagctctgtagaaggagggcaacctagatgcagcccgactcgtttccgcttgttacagcacaatccgatccataatttgttggctgttggattgagccatgctcaatacgatggattctgtctttcaaatgtcttcgacaacctgatatctatctacaatggagtaacagtatcgcaaccaccgagtttctctcgtttagttcagcttttgactttgcccaccctggttgccgaagctcaagccttctggcgtaaaaggcttcgccgcagccaaatgacaaagctcgtgcgagacctaaacaccaaccgtccgctgttagacagtagtgtgactaaacacgtcgacttgcccactatgtcgacgagggagacgccattccacgccgcgctctgtcttgcgtgggcaatcaccctgggtgccgcaactaatgtctctgatgtggtgtttgggaccctttcgtccggccgcaacacctcaatcaaaggtatctcgtcactcgtcggaccatgcatcaccacgagtccagttcgtgtaaaactagatgggcctcgggctttcaattctagcgcagataccttgacgctcgggcaggcactcaagcaggtgcatagcgatcatatcgaagcactctcttatgagcatctgggactccgaaagatagttaaggcctgtacagactggccgtcgacaacgcggttctcgagtatggtccaacatcagaacatccatatttggcatccaaattcaagcgagtcggcctctcctttagagcctgcagcagatgggggtctgcaatggagaaaccgaggctctatagcgtgtaagggcgcatgtgatgaggtggacctgtggattacgagcgtaccaattggcgagaatgtgaaaaagttaaagatgcttttcagcgaggagatattacccagagaagtagctgaggccctgctttccaccctaggcgcgaacctcggttctatactacagaataccgatgaaagcgttacaaccctgatcgcagagtcgagaaaacggctaggtggtaccagacttccagtcaatctctcccaagacgcacaaggatcgacgcaagatgagactaccccggctgtgtctgacgccatgttgagaacatctgacatacttcaggccttatggtgccgagtgcttgaatcagcacctgaaaagcagttcgcatcgtcggattcgttctacgcgcagggcggtgattcgatggatgcggcgatggttgctggacttgcgcgtgtagaaggtttgcccttaagtgtgcaggacatggctgaatgcgaggagttcggagcacaggttcgaagaatagagaatggcggtcagggtgcgcgaaggacgaatgggttggaatgggatatcagtgacagcatgtgggaagatgacgattaggtgtcagcagcgatcccagaacgtaggccgataatactctagtaacgcggacctgagagatcatcgaacggagatagggatgaatgacgacatcgactggtacgcgtgagagccctattttgggcctgacgcgtatgaacgtccgttggtgattgaatgccaagagctccgatggtcccatttatgtcatcgagctgcaatacccattggttcgccttgccactcgattaacattaatcatattaaatggtacaatcgagggtcttggcatttgtttccgggatactccgacggcctttacaacccagcttgctagatttgtcgccaatggtcccatctttgagatctagtcgagtctcatcaagggaggggcaatgaccatgaacattccaagagaggtgcgtgatagacaagtgagggttgccactgactgacagataggagagattggggtacacgagcgtgtcaaagccacaacatcttatctaccactgatcaccatcagctgcgataaatcggttgctacaccacgctcgtcacggtggataagtcaaacgagatctaagttacatcagaaatctcacattacaagtaca

SEQ ID NO: 26383 - DNA, 1059 bp, Muscodor strobelii
  misc_feature: SGI cDNA ID NO. 569021
  misc_feature: Elevated expression when VOC is produced
  misc_feature: Encodes the peptide sequence at SEQ ID NO 26384
atgtcgacgagggagacgccattccacgccgcgctctgtcttgcgtgggcaatcaccctgggtgccgcaactaatgtctctgatgtggtgtttgggaccctttcgtccggccgcaacacctcaatcaaaggtatctcgtcactcgtcggaccatgcatcaccacgagtccagttcgtgtaaaactagatgggcctcgggctttcaattctagcgcagataccttgacgctcgggcaggcactcaagcaggtgcatagcgatcatatcgaagcactctcttatgagcatctgggactccgaaagatagttaaggcctgtacagactggccgtcgacaacgcggttctcgagtatggtccaacatcagaacatccatatttggcatccaaattcaagcgagtcggcctctcctttagagcctgcagcagatgggggtctgcaatggagaaaccgaggctctatagcgtgtaagggcgcatgtgatgaggtggacctgtggattacgagcgtaccaattggcgagaatgtgaaaaagttaaagatgcttttcagcgaggagatattacccagagaagtagctgaggccctgctttccaccctaggcgcgaacctcggttctatactacagaataccgatgaaagcgttacaaccctgatcgcagagtcgagaaaacggctaggtggtaccagacttccagtcaatctctcccaagacgcacaaggatcgacgcaagatgagactaccccggctgtgtctgacgccatgttgagaacatctgacatacttcaggccttatggtgccgagtgcttgaatcagcacctgaaaagcagttcgcatcgtcggattcgttctacgcgcagggcggtgattcgatggatgcggcgatggttgctggacttgcgcgtgtagaaggtttgcccttaagtgtgcaggacatggctgaatgcgaggagttcggagcacaggttcgaagaatagagaatggcggtcagggtgcgcgaaggacgaatgggttggaatgggatatcagtgacagcatgtgggaagatgacgattag

SEQ ID NO: 26384 - protein, 352 aa, Muscodor strobelii
  misc_feature: SGI Peptide ID NO. 569021
  misc_feature (15)..(63): Pfam Id: PF00668 Pfam Desc: Condensation domain
  misc_feature (8)..(327): NCBI GI: 121704124 Blast Desc: nonribosomal peptide synthase, [Aspergillus clavatus NRRL 1] gi|119398470|gb|EAW08900.1| nonribosomal peptide synthase, [Aspergillus clavatus NRRL 1]
  misc_feature (15)..(307): NCBI GI: 171682906 Blast Desc: protein product [Podospora anserina] gi|170941412|emb|CAP67063.1| protein product [Podospora anserina]
  misc_feature (8)..(315): NCBI GI: 258572366 Blast Desc: [Uncinocarpus reesii 1704] gi|237905215|gb|EEP79616.1| [Uncinocarpus reesii 1704]
  misc_feature (15)..(323): NCBI GI: 159131159 Blast Desc: nonribosomal peptide synthase Pes1 [Aspergillus fumigatus A1163]
  misc_feature (15)..(323): NCBI GI: 119495915 Blast Desc: nonribosomal peptide synthase Pes1 [Neosartorya fischeri NRRL 181] gi|119412895|gb|EAW22836.1| nonribosomal peptide synthase Pes1 [Neosartorya fischeri NRRL 181]
  misc_feature (15)..(323): NCBI GI: 70995289 Blast Desc: nonribosomal peptide synthase Pes1 [Aspergillus fumigatus Af293] gi|66850039|gb|EAL90366.1| nonribosomal peptide synthase Pes1 [Aspergillus fumigatus Af293]
  misc_feature (15)..(323): NCBI GI: 121701921 Blast Desc: nonribosomal peptide synthase Pes1 [Aspergillus clavatus NRRL 1] gi|119397368|gb|EAW07799.1| nonribosomal peptide synthase Pes1 [Aspergillus clavatus NRRL 1]
  misc_feature (15)..(319): NCBI GI: 169781710 Blast Desc: [Aspergillus oryzae RIB40] gi|83774060|dbj|BAE64185.1| protein product [Aspergillus oryzae]
  misc_feature (15)..(323): NCBI GI: 59876617 Blast Desc: nonribosomal peptide synthetase 4 [Cochliobolus heterostrophus]
  misc_feature (15)..(319): NCBI GI: 238498514 Blast Desc: nonribosomal peptide synthase Pes1 [Aspergillus flavus NRRL3357] gi|220693766|gb|EED50111.1| nonribosomal peptide synthase Pes1 [Aspergillus flavus NRRL3357]
  misc_feature: Useful for introducing or modulating the production of volatile compounds
MSTRETPFHAALCLAWAITLGAATNVSDVVFGTLSSGRNTSIKGISSLVGPCITTSPVRVKLDGPRAFNSSADTLTLGQALKQVHSDHIEALSYEHLGLRKIVKACTDWPSTTRFSSMVQHQNIHIWHPNSSESASPLEPAADGGLQWRNRGSIACKGACDEVDLWITSVPIGENVKKLKMLFSEEILPREVAEALLSTLGANLGSILQNTDESVTTLIAESRKRLGGTRLPVNLSQDAQGSTQDETTPAVSDAMLRTSDILQALWCRVLESAPEKQFASSDSFYAQGGDSMDAAMVAGLARVEGLPLSVQDMAECEEFGAQVRRIENGGQGARRTNGLEWDISDSMWEDDD

SEQ ID NO: 26385 - DNA, 3820 bp, Muscodor strobelii; identical to SEQ ID NO: 26382
  misc_feature: SGI EST ID NO. CUFF.62234.0
  misc_feature: Variant of the nucleotide sequence at SEQ ID NO 26383

SEQ ID NO: 26386 - DNA, 2181 bp, Muscodor strobelii
  misc_feature: SGI cDNA ID NO. 569022
  misc_feature: Encodes the peptide sequence at SEQ ID NO 26387
atgattcctcgtgtgtggatgccactgtcgaacgtcagaaggacatcgactggcaaggttgatcgaaaaactctacaagaagtttttgaagcatacaaggagatgtgttcaagcgaggagccgtcggacatgaacgaggtacttacggatactgagcaggtaatgcgaagcctctgggcttctgtggtgaaatgcgatcaatccaagcttcacaaatccagcaattttttcgatctcggcgactccatcacggcaataggcctcgttgctgcagcaggtagatttggatatcatttgtctgtgtcttctctattcaagaatccaagcctatcggagatggctcttttgatcgaagacgcgacctccaccgactccattctaatatgccaagatccgcctgctttctctctgctcagtcttgattcgctcaagtcggcgaaagaagacctaaaacgaagcttgccctatcatgtagtaatcgaggacatttattccgtcactccactgcaggaaatggccattgttgctaaccaaaggtggcatcatgcctactacgcgtggttccttctcgatctgacgggcactctcgatccttccaggctccgaattgcttgcgataagcttgttcaaatacatcctcttcttcggaccatgttcttccagagtgggtctatcttttatcaggctccgctccaagatgtcacgattgactaccaagaaattccatggagcggtaaaagatcatgcgtgcccgacctaatcgagcgaagctctgtagaaggagggcaacctagatgcagcccgactcgtttccgcttgttacagcacaatccgatccataatttgttggctgttggattgagccatgctcaatacgatggattctgtctttcaaatgtcttcgacaacctgatatctatctacaatggagtaacagtatcgcaaccaccgagtttctctcgtttagttcagcttttgactttgcccaccctggttgccgaagctcaagccttctggcgtaaaaggcttcgccgcagccaaatgacaaagctcgtgcgagacctaaacaccaaccgtccgctgttagacagtagtgtgactaaacacgtcgacttgcccactatgtcgacgagggagacgccattccacgccgcgctctgtcttgcgtgggcaatcaccctgggtgccgcaactaatgtctctgatgtggtgtttgggaccctttcgtccggccgcaacacctcaatcaaaggtatctcgtcactcgtcggaccatgcatcaccacgagtccagttcgtgtaaaactagatgggcctcgggctttcaattctagcgcagataccttgacgctcgggcaggcactcaagcaggtgcatagcgatcatatcgaagcactctcttatgagcatctgggactccgaaagatagttaaggcctgtacagactggccgtcgacaacgcggttctcgagtatggtccaacatcagaacatccatatttggcatccaaattcaagcgagtcggcctctcctttagagcctgcagcagatgggggtctgcaatggagaaaccgaggctctatagcgtgtaagggcgcatgtgatgaggtggacctgtggattacgagcgtaccaattggcgagaatgtgaaaaagttaaagatgcttttcagcgaggagatattacccagagaagtagctgaggccctgctttccaccctaggcgcgaacctcggttctatactacagaataccgatgaaagcgttacaaccctgatcgcagagtcgagaaaacggctaggtggtaccagacttccagtcaatctctcccaagacgcacaaggatcgacgcaagatgagactaccccggctgtgtctgacgccatgttgagaacatctgacatacttcaggccttatggtgccgagtgcttgaatcagcacctgaaaagcagttcgcatcgtcggattcgttctacgcgcagggcggtgattcgatggatgcggcgatggttgctggacttgcgcgtgtagaaggtttgcccttaagtgtgcaggacatggctgaatgcgaggagttcggagcacaggttcgaagaatagagaatggcggtcagggtgcgcgaaggacgaatgggttggaatgggatatcagtgacagcatgtgggaagatgacgattag

SEQ ID NO: 26387 - protein, 726 aa, Muscodor strobelii
  misc_feature: SGI Peptide ID NO. 569022
  misc_feature (160)..(437): Pfam Id: PF00668 Pfam Desc: Condensation domain
  misc_feature (53)..(117): Pfam Id: PF00550 Pfam Desc: Phosphopantetheine attachment site
  misc_feature (389)..(437): Pfam Id: PF00668 Pfam Desc: Condensation domain
  misc_feature (160)..(219): Pfam Id: PF00668 Pfam Desc: Condensation domain
  misc_feature (634)..(690): Pfam Id: PF00550 Pfam Desc: Phosphopantetheine attachment site
  misc_feature (1)..(701): NCBI GI: 121704124 Blast Desc: nonribosomal peptide synthase, [Aspergillus clavatus NRRL 1] gi|119398470|gb|EAW08900.1| nonribosomal peptide synthase, [Aspergillus clavatus NRRL 1]
  misc_feature (49)..(681): NCBI GI: 171682906 Blast Desc: protein product [Podospora anserina] gi|170941412|emb|CAP67063.1| protein product [Podospora anserina]
  misc_feature (1)..(689): NCBI GI: 258572366 Blast Desc: [Uncinocarpus reesii 1704] gi|237905215|gb|EEP79616.1| [Uncinocarpus reesii 1704]
  misc_feature (20)..(610): NCBI GI: 116201311 Blast Desc: CHGG_08540 [Chaetomium globosum CBS 148.51] gi|88177058|gb|EAQ84526.1| CHGG_08540 [Chaetomium globosum CBS 148.51]
  misc_feature (1)..(592): NCBI GI: 115436950 Blast Desc: [Aspergillus terreus NIH2624] gi|114188501|gb|EAU30201.1| [Aspergillus terreus NIH2624]
  misc_feature (1)..(687): NCBI GI: 256730168 Blast Desc: NECHADRAFT_82887 [Nectria haematococca mpVI 77-13-4]
  misc_feature (1)..(689): NCBI GI: 121710978 Blast Desc: nonribosomal peptide synthase, [Aspergillus clavatus NRRL 1] gi|119401255|gb|EAW11679.1| nonribosomal peptide synthase, [Aspergillus clavatus NRRL 1]
  misc_feature (1)..(498): NCBI GI: 115395350 Blast Desc: [Aspergillus terreus NIH2624] gi|114193069|gb|EAU34769.1| [Aspergillus terreus NIH2624]
  misc_feature (48)..(697): NCBI GI: 121701921 Blast Desc: nonribosomal peptide synthase Pes1 [Aspergillus clavatus NRRL 1] gi|119397368|gb|EAW07799.1| nonribosomal peptide synthase Pes1 [Aspergillus clavatus NRRL 1]
  misc_feature (1)..(617): NCBI GI: 70997258 Blast Desc: nonribosomal peptide synthase [Aspergillus fumigatus Af293] gi|66851016|gb|EAL91342.1| nonribosomal peptide synthase, [Aspergillus fumigatus Af293]
MIPRVWMPLSNVRRTSTGKVDRKTLQEVFEAYKEMCSSEEPSDMNEVLTDTEQVMRSLWASVVKCDQSKLHKSSNFFDLGDSITAIGLVAAAGRFGYHLSVSSLFKNPSLSEMALLIEDATSTDSILICQDPPAFSLLSLDSLKSAKEDLKRSLPYHVVIEDIYSVTPLQEMAIVANQRWHHAYYAWFLLDLTGTLDPSRLRIACDKLVQIHPLLRTMFFQSGSIFYQAPLQDVTIDYQEIPWSGKRSCVPDLIERSSVEGGQPRCSPTRFRLLQHNPIHNLLAVGLSHAQYDGFCLSNVFDNLISIYNGVTVSQPPSFSRLVQLLTLPTLVAEAQAFWRKRLRRSQMTKLVRDLNTNRPLLDSSVTKHVDLPTMSTRETPFHAALCLAWAITLGAATNVSDVVFGTLSSGRNTSIKGISSLVGPCITTSPVRVKLDGPRAFNSSADTLTLGQALKQVHSDHIEALSYEHLGLRKIVKACTDWPSTTRFSSMVQHQNIHIWHPNSSESASPLEPAADGGLQWRNRGSIACKGACDEVDLWITSVPIGENVKKLKMLFSEEILPREVAEALLSTLGANLGSILQNTDESVTTLIAESRKRLGGTRLPVNLSQDAQGSTQDETTPAVSDAMLRTSDILQALWCRVLESAPEKQFASSDSFYAQGGDSMDAAMVAGLARVEGLPLSVQDMAECEEFGAQVRRIENGGQGARRTNGLEWDISDSMWEDDD

SEQ ID NO: 26388 - DNA, 3820 bp, Muscodor strobelii; identical to SEQ ID NO: 26382
  misc_feature: SGI EST ID NO. CUFF.62234.0
  misc_feature: Variant of the nucleotide sequence at SEQ ID NO 26386

SEQ ID NO: 26389 - DNA, 1362 bp, Muscodor strobelii
  misc_feature: SGI cDNA ID NO. 569023
  misc_feature: Encodes the peptide sequence at SEQ ID NO 26390
atggttgttttaagctgcaatgaatcatctactaaagcgtgggagtccttgagacctctgctgccatctcgcagacctgactttgactactggtggaattatacaggctcgcaccttgcttatctccttgatgctgctggatattcgacagagaggcagtatgaagctcttctgtttcattaccaccgagtcgttccttacttcggtcaggcacctgctagtgatggcacgttccaatgggagaccgtcatgacggtccaaggtccaccagtcgaatactcgtggaagtggaatacagctacaggaggaccggagatccgctatacccttgaagccgtggatggtttcagcggctcgtctaaggatcctttgaatcgagacccgtcctgggaactattgagtcatttagcaggcgcgtatcccaatattgacctagcttggacgagccacttcctcgccactctattcgatcacgatcgacatcgttatacacaagagcaaggagaagaccatatcacgacgaccgtcatggttgctgcggagttcatcgatcgtggtttaaatatcaaagtgtacttcaagtcccgtcgtctaggcatgccagatgtctcggttgagatatacaaagacgcgatctctcaagtgtgtccctcaagtacggccgcttctgcattgtataattttttgcataatgatcttgaaggccaatttctcacgcccgcaatcctcggaattgactgcgttcccgcccctcactcgcgcatcaagctctattttcgaaccccacgggtccatttctccgccattcgtaccatcatgacgctgaacaactgcaaatttatctcctccactggagtggaatccttacgtactctcctagccgccgtcacgggtctgtcattggattacccggacgatcttgattggcccatcaatccccgctttgaaaaactcgtaagcaaaagctcagctaaagtgccccttttatatcccgcttgtggtttctatttcgacatcgcgccagggagagagtatcccaacgtcaagattcagctgccgctgtatgtatacggacgggaggaagaagagttggcaaacggccttgtacaatggatgagagataatggaagagggaaatttacggatcaatatcttcatgcgttgccgcggttgggtgacagaggcactgcccatggtgccgacggcacgaatggacaaaacgagccgtgtgcgaacagaacgcaccaaaacttgccgcaaggtattcagtcgtacttgagtgtcatgttcacggacgatggtcaactggacatcacatcgtaccttgtgccggtgttgagtgagactccttgggtcgtctga

SEQ ID NO: 26390 - protein, 453 aa, Muscodor strobelii
  misc_feature: SGI Peptide ID NO. 569023
  misc_feature (12)..(444): NCBI GI: 67541228 Blast Desc: AN6784.2 [Aspergillus nidulans FGSC A4] gi|40739412|gb|EAA58602.1| AN6784.2 [Aspergillus nidulans FGSC A4] gi|259480377|tpe|CBF71451.1| TPA: DMATS type aromatic (JCVI)
  misc_feature (12)..(442): NCBI GI: 212538935 Blast Desc: dimethylallyl tryptophan synthase GliD1 [Penicillium marneffei ATCC 18224] gi|210069365|gb|EEA23456.1| dimethylallyl tryptophan synthase GliD1 [Penicillium marneffei ATCC 18224]
  misc_feature (5)..(442): NCBI GI: 55823913 Blast Desc: dimethylallylpyrophosphate transferase [Fusarium heterosporum]
  misc_feature (8)..(444): NCBI GI: 259485336 Blast Desc: TPA: DMATS type aromatic prenyltransferase, (JCVI) [Aspergillus nidulans FGSC A4]
  misc_feature (8)..(415): NCBI GI: 67904484 Blast Desc: AN9229.2 [Aspergillus nidulans FGSC A4] gi|40742330|gb|EAA61520.1| AN9229.2 [Aspergillus nidulans FGSC A4]
  misc_feature (12)..(444): NCBI GI: 238502795 Blast Desc: prenyltransferase, [Aspergillus flavus NRRL3357] gi|220691441|gb|EED47789.1| prenyltransferase, [Aspergillus flavus NRRL3357]
  misc_feature (30)..(446): NCBI GI: 171678275 Blast Desc: protein product [Podospora anserina] gi|170937207|emb|CAP61864.1| protein product [Podospora anserina]
  misc_feature (12)..(444): NCBI GI: 169776107 Blast Desc: [Aspergillus oryzae RIB40] gi|83771255|dbj|BAE61387.1| protein product [Aspergillus oryzae]
  misc_feature (21)..(446): NCBI GI: 156044840 Blast Desc: SS1G_10524 [Sclerotinia sclerotiorum 1980] gi|154694912|gb|EDN94650.1| SS1G_10524 [Sclerotinia sclerotiorum 1980]
  misc_feature (44)..(446): NCBI GI: 240274982 Blast Desc: dimethylallyl tryptophan synthase GliD1 [Ajellomyces capsulatus H143]
  misc_feature (31)..(384): SWISSPROT Homolog: EC 2.5.1.34 Tryptophan dimethylallyltransferase
MVVLSCNESSTKAWESLRPLLPSRRPDFDYWWNYTGSHLAYLLDAAGYSTERQYEALLFHYHRVVPYFGQAPASDGTFQWETVMTVQGPPVEYSWKWNTATGGPEIRYTLEAVDGFSGSSKDPLNRDPSWELLSHLAGAYPNIDLAWTSHFLATLFDHDRHRYTQEQGEDHITTTVMVAAEFIDRGLNIKVYFKSRRLGMPDVSVEIYKDAISQVCPSSTAASALYNFLHNDLEGQFLTPAILGIDCVPAPHSRIKLYFRTPRVHFSAIRTIMTLNNCKFISSTGVESLRTLLAAVTGLSLDYPDDLDWPINPRFEKLVSKSSAKVPLLYPACGFYFDIAPGREYPNVKIQLPLYVYGREEEELANGLVQWMRDNGRGKFTDQYLHALPRLGDRGTAHGADGTNGQNEPCANRTHQNLPQGIQSYLSVMFTDDGQLDITSYLVPVLSETPWVV

SEQ ID NO: 26391 - DNA, 1212 bp, Muscodor strobelii
  misc_feature: SGI cDNA ID NO. 569024
  misc_feature: Encodes the peptide sequence at SEQ ID NO 26392
atgctccccgaaatctacaacatgaaggccaacaaatcagacttttacaactctgccctgaatgaagcctcgcagactgtattttcagaaaagcataacattgctcacattgcagcgcgccgctccctgggccacgcctacagcatggccaatgtgaagcgcatggagccacaaattcaggaggtgatcgacaagtgggtgacacggctctgcacgaacgaagagaagccattcgctttatatgatcgtgtgctttggctcacgtttgatgttatcgggatcatggtttttggggagccctttggctttgttgaggaatggactgatatccgaggaatgcttgagcgagcaagcaagtctactacttctggcgtgtctctggagataatcaaccacattccggttctgtctcagttggcgactaagacgcgcgtagggagatggctgctgcttcctttccctgcagataaggtcgggactggtgtgctgaaagcagagcgcgacagggcctgggccaagtatctcaaaaggaaaccagccagatcagcacaatgtcttcttagccagctccttaacaagaggacgaactttggacaagacgctctgttaagcgatgataggatcaaggcagaacttctcattgctatattggccgggacaaccacgaccgccacaattatcacctcagtgttgttgagcgtcgcagagcgggagcagtgtcgcgcgcagctttcaagcgagattgctgcagcacagaagattggctgcaaggtcaattacgaactcaggcgaagcttgagctaccttggggcatgcgtacaggaggcgttccgcctctcggccgccccaacacaatttccgcgtttggtagattcctcgagagaggtggatctaaatggtgtccgactgccggcgggtaccatattatctagctcaagctatatcattgcgagaagtgaagcactttacggtagccagcttgacgagtttttacccgaacgatggatcaacacatcagaagagactaggaaagctcgaagaaagtatgactttcgtttcggttacggtgcacgcacatgtctgggaaagaacttggcagaagtggagatccacaacgtggtgttcgaagtcttccgtcgagtagatccaagagtacactgcaaagtagagggtttagtttctatgcagctacgccaatccagttgtatgtag

SEQ ID NO: 26392 - protein, 403 aa, Muscodor strobelii
  misc_feature: SGI Peptide ID NO. 569024
  misc_feature (1)..(403): Pfam Id: PF00067 Pfam Desc: Cytochrome P450
  misc_feature (186)..(371): Pfam Id: PF00067 Pfam Desc: Cytochrome P450
  misc_feature (2)..(385): NCBI GI: 169598752 Blast Desc: SNOG_02184 [Phaeosphaeria nodorum SN15] gi|111069276|gb|EAT90396.1| SNOG_02184 [Phaeosphaeria nodorum SN15]
  misc_feature (2)..(395): NCBI GI: 145241982 Blast Desc: An09g03210 [Aspergillus niger] gi|134078180|emb|CAK40260.1| protein product [Aspergillus niger]
  misc_feature (2)..(382): NCBI GI: 119483172 Blast Desc: cytochrome P450 monooxygenase, [Neosartorya fischeri NRRL 181] gi|119409769|gb|EAW19717.1| cytochrome P450 monooxygenase, [Neosartorya fischeri NRRL 181]
  misc_feature (2)..(385): NCBI GI: 39940050 Blast Desc: MGG_05215 [Magnaporthe grisea 70-15] gi|145010514|gb|EDJ95170.1| MGG_05215 [Magnaporthe grisea 70-15]
  misc_feature (2)..(385): NCBI GI: 115383674 Blast Desc: conserved [Aspergillus terreus NIH2624] gi|114196076|gb|EAU37776.1| conserved [Aspergillus terreus NIH2624]
  misc_feature (2)..(385): NCBI GI: 261358791 Blast Desc: flavonoid 3',5'-hydroxylase [Verticillium albo-atrum VaMs.102]
  misc_feature (2)..(383): NCBI GI: 255941494 Blast Desc: Pc16g12170 [Penicillium chrysogenum Wisconsin 54-1255] gi|211586139|emb|CAP93887.1| Pc16g12170 [Penicillium chrysogenum Wisconsin 54-1255]
  misc_feature (2)..(370): NCBI GI: 169772331 Blast Desc: [Aspergillus oryzae RIB40] gi|83768495|dbj|BAE58632.1| protein product [Aspergillus oryzae]
  misc_feature (2)..(383): NCBI GI: 67901572 Blast Desc: AN7773.2 [Aspergillus nidulans FGSC A4] gi|40742371|gb|EAA61561.1| AN7773.2 [Aspergillus nidulans FGSC A4] gi|259484125|tpe|CBF80078.1| TPA: cytochrome P450, (Eurofung)
  misc_feature (2)..(382): NCBI GI: 121711773 Blast Desc: cytochrome P450 monooxygenase, [Aspergillus clavatus NRRL 1] gi|119401653|gb|EAW12076.1| cytochrome P450 monooxygenase, [Aspergillus clavatus NRRL 1]
  misc_feature (12)..(379): SWISSPROT Homolog: EC 1.14.13.12 Benzoate 4-monooxygenase
MLPEIYNMKANKSDFYNSALNEASQTVFSEKHNIAHIAARRSLGHAYSMANVKRMEPQIQEVIDKWVTRLCTNEEKPFALYDRVLWLTFDVIGIMVFGEPFGFVEEWTDIRGMLERASKSTTSGVSLEIINHIPVLSQLATKTRVGRWLLLPFPADKVGTGVLKAERDRAWAKYLKRKPARSAQCLLSQLLNKRTNFGQDALLSDDRIKAELLIAILAGTTTTATIITSVLLSVAEREQCRAQLSSEIAAAQKIGCKVNYELRRSLSYLGACVQEAFRLSAAPTQFPRLVDSSREVDLNGVRLPAGTILSSSSYIIARSEALYGSQLDEFLPERWINTSEETRKARRKYDFRFGYGARTCLGKNLAEVEIHNVVFEVFRRVDPRVHCKVEGLVSMQLRQSSCM

SEQ ID NO: 26393 - DNA, 199 bp, Muscodor strobelii
  misc_feature: SGI EST ID NO. CUFF.62291.0
  misc_feature: Variant of the nucleotide sequence at SEQ ID NO 26391
cacgaccgccacaattatcacctcagtgttgttgagcgtcgcagagcgggagcagtgtcgcgcgcagctttcaagcgagattgctgcagcacagaagattggctgcaaggtcaattacgaactcaggcgaagcttgagctaccttggggcatgcgtacaggaggcgttccgcctctcggccgccccaacacaatttccg

SEQ ID NO: 26394 - DNA, 324 bp, Muscodor strobelii
  misc_feature: SGI cDNA ID NO. 569026
  misc_feature: Elevated expression when VOC is produced
  misc_feature: Encodes the peptide sequence at SEQ ID NO 26395
atggaagccatcccagatatcaacaagtatatcgtccttactaacgacattttatctttctacaaagaagagcgtgcgggagagaaagacaactatatgcatagcagggcacgctatgaagataaagatttaggcagtgtatttgaagctgttgttcgagagagcgtggatgcattcagacgtacacaaactgtcttgcaaggaaaggggccggcagcagaggcttggcttaaccatgctatggggttcgtcacgatgcataaggtatcggcgcgttaccgtcttgctgagttgggcctaagcgaactcttgcccaggacttag

SEQ ID NO: 26395 - protein, 107 aa, Muscodor strobelii
  misc_feature: SGI Peptide ID NO. 569026
  misc_feature (1)..(102): NCBI GI: 46124133 Blast Desc: FG06444.1 [Gibberella zeae PH-1]
  misc_feature (1)..(102): NCBI GI: 46137763 Blast Desc: FG10397.1 [Gibberella zeae PH-1]
  misc_feature (1)..(102): NCBI GI: 263199514 Blast Desc: longiborneol synthase [Gibberella zeae]
  misc_feature (1)..(98): NCBI GI: 242218396 Blast Desc: [Postia placenta Mad-698-R] gi|220725857|gb|EED79827.1| [Postia placenta Mad-698-R]
  misc_feature (1)..(98): NCBI GI: 242216337 Blast Desc: [Postia placenta Mad-698-R] gi|220726921|gb|EED80856.1| [Postia placenta Mad-698-R]
  misc_feature (6)..(98): NCBI GI: 242218378 Blast Desc: [Postia placenta Mad-698-R] gi|220725848|gb|EED79818.1| [Postia placenta Mad-698-R]
  misc_feature (1)..(98): NCBI GI: 242207489 Blast Desc: [Postia placenta Mad-698-R] gi|220731402|gb|EED85247.1| [Postia placenta Mad-698-R]
  misc_feature (1)..(98): NCBI GI: 238603080 Blast Desc: MPER_04018 [Moniliophthora perniciosa FA553] gi|215467296|gb|EEB96786.1| MPER_04018 [Moniliophthora perniciosa FA553]
  misc_feature (5)..(98): NCBI GI: 242216337 Blast Desc: [Postia placenta Mad-698-R] gi|220726921|gb|EED80856.1| [Postia placenta Mad-698-R]
  misc_feature (1)..(98): NCBI GI: 242216687 Blast Desc: [Postia placenta Mad-698-R] gi|220726694|gb|EED80635.1| [Postia placenta Mad-698-R]
  misc_feature: Useful for introducing or modulating the production of volatile compounds
MEAIPDINKYIVLTNDILSFYKEERAGEKDNYMHSRARYEDKDLGSVFEAVVRESVDAFRRTQTVLQGKGPAAEAWLNHAMGFVTMHKVSARYRLAELGLSELLPRT

SEQ ID NO: 26396 - DNA, 443 bp, Muscodor strobelii
  misc_feature: SGI EST ID NO. CUFF.62344.0
  misc_feature: Variant of the nucleotide sequence at SEQ ID NO 26394
ctcttcttatatggaagccatcccagatatcaacaagtatatcgtccttactaacgacattttatctttctacaaagaagagcgtgcgggagagaaagacaactatatgcatagcagggcacgctatgaagataaagatttaggcagtgtatttgaagctgttgttcgagagagcgtggatgcattcagacgtacacaaactgtcttgcaaggaaaggggccggcagcagaggcttggcttaaccatgctatggggttcgtcacgatgcataaggtatcggcgcgttaccgtcttgctgagttgggcctaagcgaactcttgcccaggacttagacacactactgcgacaatgatatagctaaaggacaatcatgttatgattttaagcgaaagggtcttttctttacttacttcgcgtaagtaggtaacgtgttaacaagga

SEQ ID NO: 26397 - DNA, 3927 bp, Muscodor strobelii
  misc_feature: SGI cDNA ID NO. 569027
  misc_feature: Encodes the peptide sequence at SEQ ID NO 26398
atgtctaagatcgagaagctcagcatcaagggcatccgttccttcgaccatctcaacacccagaccatcaagttcttcgcccccttgaccctcatcgtcggccagaatggctgcggcaaaaccaccatcatcgagtgtctcaaatatgccaccaccggagaccagccgcccaactccaagggtggcgctttcgtgcacgatcccaagctctcgggagacagcgtcgtcaaggcgcaggttaagctcctcttctcagagccccccgacacaacccataccgtcacccgctccatggaggtcacgatgaagaagacggcccggaatctgaagacaatcgactccaccctacattccatcaaccccgacgagcctaacggcaagcctctcagaggttcggatatcaatgaagccgtccccgcccacctcggtgccagccgcgccgtcatcgacgctgtgatcttctgccatcaggaggaatccctgtggcccatgagtgagcctgccgcgcttaagacccgcttcgacaagatcttcgaggtctccaaatacaccgatgcaatcaccaacatcaagaaggtccggaagaccaagggtgacgagcaccagaagcttgtcatcgtggaagcgagcctcaaaaaggacaaggcacatgcagagaagttgaatagagagagccatcagctgcaagtagatatcgatgggctaaaagagcaactcgaagagattcagcaaaagatggcactgcaggaggaacagaaagtcgaccggcaaaagaaggcgaatgacgctttaaccatcgtcaaccgactgaaacaaaagcaggatgaactcgggtaccgccaaacgcaactccgagaatatcagcagcgaatggtgagacagctgagtgcttcggatgactcactcagacacgatctcaatcaatatgaggaacgggtggctcagttcagtcgagatctcgaggaatgccaacgacaacatggggaatccaaggatgacctagaagacagccgtgcacatttgaacgagaagctgagcgaacacggcaggctcgagtccgataagaagaagtacgaacggcaggtccaagtgcgccttgagcacgtacatcaagctgcacatgagcataccattcgcggattcgatggcgacttggatgataggaagatacaggtgttttacgaacgtctacaaaagctgcatgtcgacaaagtacgcgagttcgccaacctcaaagacgaaaatgctagcgagtataatgagcaaacgaccgccatcactgacctgaatggccgcaaatctacatataatagtgatcgaagttatgctgcccagaaaattacttcatcggagcagcttgttgccagtcgacgaaaagagctcgggtcgattgatgtcgacgatggtgccaaggcgcttctcgactccgacgctcaggacatcgaaactcagctccagcaggcaatgaatagtgtgcaggcggccgattttgacaataaactacagcaagaacacgagcagttgcagcaacttgaaactgagaactcgcgactcggtgacgagctagctgaatctacccaaatcgtctctgatcgtgaggcattgaagcaccagcagaacgacctcactcgcaaacagcagaagttcaatactctcaaaagtcattgcaatgacaagctatcagccctagttggtcgggactgggacccaaagactgttgagcgtagattcgaagaaagacttggtgtgaaaagacaagcatatgaagtagcgttgcgagaagtcgatgagcagaatcgcgtgcgccttgataaagaaggtcagctcaaggtgatgtccacaaaagctcaacaacgcgatgcagagataacgagatgcaagaacgctatagccggtgtgctcaggcaggtggctccagaaagcacattcagcctcgatgctctggctcaagagatttcacgcgtggaagaagaaatcaaagttctggacagtgatgccaagacggccagtgaacttcgggactattttctgggctgtcaaaaagctctagatgagaagaacaaatgcggcctttgcgaacgatcgttctccactccacatgagaaatcgactctggccaacaagctgaagaaggctctcggagaattcgataatgcccagctggaggttgacttgcgcgagctgcgccaagatctcgcacagctgcaaaacgttcaaggcgagaacgaaatttatgctaggcttatcaaggaaaagccaattgcagaggacgaaaaacgtcaacttggagagcaaatagccggcctgatccgggacttggaagagaaggatgatcaagctcggagcaaacgagaggacaaagaagaattcgagtcattaagcaccacagttcgcgaaatcgcccatgcccatagggatctcgaggacacccaaactttagttgatcagactctgtccaaacagcaacaatccggcccagtcgtcagaagtacttctgagatcagtgagctgatgagacaatgcggagagcagcttaaggtagtgaaggcaaagatcgccaaactcaccaaggaccagcaacgtctccgagacacaatcagcagacttgagttagcccgaagtgagctcaaaaacaaaatcagtcatgcgatcagacaactggagagacgtcgtggcattcaaaatcaaatccagactgagaaagaggagattctcaagtcgaaagaagtcatacaaagggcagacaaggatttgggggccgttgatatagaaatcgccaaagctagggagattcgtgaagatgcacagcagagggcaaggaccaaggaagataatgtggccaaggagcgagatgacctagcggactccatgaagcggctcaaaacactggatcacgatatacgcgagtacttagatcatggcggcctatcaatactcaaggacaatgagaacacgattcagacaatccagaccacaattcgacgcatcggacagactttagatgacatcaaagtccggtcagaaaagatgcagaaagagctggccaataccgatagcgaaaagagaaatatccaagacaacctcgagtatcgcaacgcggctcgtgaagtggattcgctcaaagagatcattgacgatctggaatcgcaaagtgcacaggacgactacgatcaattcgccaaggaagcacaaagttttgagaagcaatataacaatctgagtgctgaaaacaggtcgatttatgaaatcatcaagttaaaagacaacgatttgggcgaaaaaacaaaagagtgggacgaaaacttcaaggacgcaccagagaagtaccgcgagacacacatcaaaactcaaactctcaaggcggctatcgaggatctcggtcgatacgctgcggcgctaaatcatgccgtaatcaagtatcacggcgtcaagttgcgtgaagtgaacgacatgattgacgagttgtggacgaaaacgtatcaaggcacagatatcgacaggattatgatcacgtcggatgcagaccccactggaaatagaagcgcatacaactatcgcgtggtgatgaccaagaacgccgtcgagatggacatgcgaggtcgttgctctgctggtcaaaaggtgctcgcctctatcattattcgcctcgcgctcgctgagtcttttggcattggctgtggcatcattgcactcgatgagccaactaccaaccttgatcgtgacaatatcaaggcgttggctcagagtctgaaaggcatcgttgaacatagacgagcgcagagaaacttccagttggttgtcattacacacgatgcagacttcctacgagagatgcagtgctcggacttcactgatgattactggtatgtcgaacgcgactcggaccagaacagccggatcgtgaaaaagaacatcggcacgctttga

SEQ ID NO: 26398 - protein, 1308 aa, Muscodor strobelii
  misc_feature: SGI Peptide ID NO. 569027
  misc_feature (3)..(1307): Pfam Id: PF02463 Pfam Desc: RecF/RecN/SMC N terminal domain
  misc_feature (1)..(1300): NCBI GI: 46107656 Blast Desc: FG00711.1 [Gibberella zeae PH-1]
  misc_feature (1)..(1305): NCBI GI: 171694914 Blast Desc: protein product [Podospora anserina] gi|170947699|emb|CAP59861.1| protein product [Podospora anserina]
  misc_feature (1)..(1305): NCBI GI: 116182584 Blast Desc: CHGG_01920 [Chaetomium globosum CBS 148.51] gi|88186217|gb|EAQ93685.1| CHGG_01920 [Chaetomium globosum CBS 148.51]
  misc_feature (1)..(1305): NCBI GI: 85111188 Blast Desc: NCU00901 [Neurospora crassa OR74A] gi|28925556|gb|EAA34582.1| conserved [Neurospora crassa OR74A] gi|38636462|emb|CAE81997.1| RAD50 homolog uvs-6 [Neurospora
  misc_feature (1)..(1305): NCBI GI: 12597247 Blast Desc: UVS6 [Neurospora crassa]
  misc_feature (1)..(1306): NCBI GI: 119500032 Blast Desc: DNA repair protein Rad50 [Neosartorya fischeri NRRL 181] gi|119414938|gb|EAW24876.1| DNA repair protein Rad50 [Neosartorya fischeri NRRL 181]
  misc_feature (2)..(1306): NCBI GI: 212542011 Blast Desc: DNA repair protein Rad50 [Penicillium marneffei ATCC 18224] gi|210066067|gb|EEA20160.1| DNA repair protein Rad50 [Penicillium marneffei ATCC 18224]
  misc_feature (2)..(1308): NCBI GI: 145614600 Blast Desc: MGG_11387 [Magnaporthe grisea 70-15] gi|145021504|gb|EDK05633.1| MGG_11387 [Magnaporthe grisea 70-15]
  misc_feature (2)..(1306): NCBI GI: 242769947 Blast Desc: DNA repair protein Rad50 [Talaromyces stipitatus ATCC 10500] gi|218725073|gb|EED24490.1| DNA repair protein Rad50 [Talaromyces stipitatus ATCC 10500]
  misc_feature (1)..(1308): NCBI GI: 225558965 Blast Desc: DNA repair protein rad50 [Ajellomyces capsulatus G186AR]
MSKIEKLSIKGIRSFDHLNTQTIKFFAPLTLIVGQNGCGKTTIIECLKYATTGDQPPNSKGGAFVHDPKLSGDSVVKAQVKLLFSEPPDTTHTVTRSMEVTMKKTARNLKTIDSTLHSINPDEPNGKPLRGSDINEAVPAHLGASRAVIDAVIFCHQEESLWPMSEPAALKTRFDKIFEVSKYTDAITNIKKVRKTKGDEHQKLVIVEASLKKDKAHAEKLNRESHQLQVDIDGLKEQLEEIQQKMALQEEQKVDRQKKANDALTIVNRLKQKQDELGYRQTQLREYQQRMVRQLSASDDSLRHDLNQYEERVAQFSRDLEECQRQHGESKDDLEDSRAHLNEKLSEHGRLESDKKKYERQVQVRLEHVHQAAHEHTIRGFDGDLDDRKIQVFYERLQKLHVDKVREFANLKDENASEYNEQTTAITDLNGRKSTYNSDRSYAAQKITSSEQLVASRRKELGSIDVDDGAKALLDSDAQDIETQLQQAMNSVQAADFDNKLQQEHEQLQQLETENSRLGDELAESTQIVSDREALKHQQNDLTRKQQKFNTLKSHCNDKLSALVGRDWDPKTVERRFEERLGVKRQAYEVALREVDEQNRVRLDKEGQLKVMSTKAQQRDAEITRCKNAIAGVLRQVAPESTFSLDALAQEISRVEEEIKVLDSDAKTASELRDYFLGCQKALDEKNKCGLCERSFSTPHEKSTLANKLKKALGEFDNAQLEVDLRELRQDLAQLQNVQGENEIYARLIKEKPIAEDEKRQLGEQIAGLIRDLEEKDDQARSKREDKEEFESLSTTVREIAHAHRDLEDTQTLVDQTLSKQQQSGPVVRSTSEISELMRQCGEQLKVVKAKIAKLTKDQQRLRDTISRLELARSELKNKISHAIRQLERRRGIQNQIQTEKEEILKSKEVIQRADKDLGAVDIEIAKAREIREDAQQRARTKEDNVAKERDDLADSMKRLKTLDHDIREYLDHGGLSILKDNENTIQTIQTTIRRIGQTLDDIKVRSEKMQKELANTDSEKRNIQDNLEYRNAAREVDSLKEIIDDLESQSAQDDYDQFAKEAQSFEKQYNNLSAENRSIYEIIKLKDNDLGEKTKEWDENFKDAPEKYRETHIKTQTLKAAIEDLGRYAAALNHAVIKYHGVKLREVNDMIDELWTKTYQGTDIDRIMITSDADPTGNRSAYNYRVVMTKNAVEMDMRGRCSAGQKVLASIIIRLALAESFGIGCGIIALDEPTTNLDRDNIKALAQSLKGIVEHRRAQRNFQLVVITHDADFLREMQCSDFTDDYWYVERDSDQNSRIVKKNIGTL

SEQ ID NO: 26399 - DNA, 4492 bp, Muscodor strobelii
  misc_feature: SGI EST ID NO. CUFF.62349.0
  misc_feature: Variant of the nucleotide sequence at SEQ ID NO 26397
ctcgccaaaaaagttacaggtatcacaacgcgtcttggtttgcatttgagctgaaacgacaaacgacaaacgacatgtcatctttcatcccactttcttcgtttctatcttctcctcagaacaaagacgcagattagctacagcttcctgacccctcttgtagatagcgtcacatcaacttcttcaccttcacatatccgcaagccctcataaacataaacactccccaatccggcatcatccgagctacctgctaccttagccttatagcatggggtcggcgtgcagctagatcccttgccatcgtcatcatgtctaagatcgagaagctcagcatcaagggcatccgttccttcgaccatctcaacacccagaccatcaagttcttcgcccccttgaccctcatcgtcggccagaatggctgcggcaaaaccaccatcatcgagtgtctcaaatatgccaccaccggagaccagccgcccaactccaagggtggcgctttcgtgcacgatcccaagctctcgggagacagcgtcgtcaaggcgcaggttaagctcctcttctcagagccccccgacacaacccataccgtcacccgctccatggaggtcacgatgaagaagacggcccggaatctgaagacaatcgactccaccctacattccatcaaccccgacgagcctaacggcaagcctctcagaggttcggatatcaatgaagccgtccccgcccacctcggtgccagccgcgccgtcatcgacgctgtgatcttctgccatcaggaggaatccctgtggcccatgagtgagcctgccgcgcttaagacccgcttcgacaagatcttcgaggtctccaaatacaccgatgcaatcaccaacatcaagaaggtccggaagaccaagggtgacgagcaccagaagcttgtcatcgtggaagcgagcctcaaaaaggacaaggcacatgcagagaagttgaatagagagagccatcagctgcaagtagatatcgatgggctaaaagagcaactcgaagagattcagcaaaagatggcactgcaggaggaacagaaagtcgaccggcaaaagaaggcgaatgacgctttaaccatcgtcaaccgactgaaacaaaagcaggatgaactcgggtaccgccaaacgcaactccgagaatatcagcagcgaatggtgagacagctgagtgcttcggatgactcactcagacacgatctcaatcaatatgaggaacgggtggctcagttcagtcgagatctcgaggaatgccaacgacaacatggggaatccaaggatgacctagaagacagccgtgcacatttgaacgagaagctgagcgaacacggcaggctcgagtccgataagaagaagtacgaacggcaggtccaagtgcgccttgagcacgtacatcaagctgcacatgagcataccattcgcggattcgatggcgacttggatgataggaagatacaggtgttttacgaacgtctacaaaagctgcatgtcgacaaagtacgcgagttcgccaacctcaaagacgaaaatgctagcgagtataatgagcaaacgaccgccatcactgacctgaatggccgcaaatctacatataatagtgatcgaagttatgctgcccagaaaattacttcatcggagcagcttgttgccagtcgacgaaaagagctcgggtcgattgatgtcgacgatggtgccaaggcgcttctcgactccgacgctcaggacatcgaaactcagctccagcaggcaatgaatagtgtgcaggcggccgattttgacaataaactacagcaagaacacgagcagttgcagcaacttgaaactgagaactcgcgactcggtgacgagctagctgaatctacccaaatcgtctctgatcgtgaggcattgaagcaccagcagaacgacctcactcgcaaacagcagaagttcaatactctcaaaagtcattgcaatgacaagctatcagccctagttggtcgggactgggacccaaagactgttgagcgtagattcgaagaaagacttggtgtgaaaagacaagcatatgaagtagcgttgcgagaagtcgatgagcagaatcgcgtgcgccttgataaagaaggtcagctcaaggtgatgtccacaaaagctcaacaacgcgatgcagagataacgagatgcaagaacgctatagccggtgtgctcaggcaggtggctccagaaagcacattcagcctcgatgctctggctcaagagatttcacgcgtggaagaagaaatcaaagttctggacagtgatgccaagacggccagtgaacttcgggactattttctgggctgtcaaaaagctctagatgagaagaacaaatgcggcctttgcgaacgatcgttctccactccacatgagaaatcgactctggccaacaagctgaagaaggctctcggagaattcgataatgcccagctggaggttgacttgcgcgagctgcgccaagatctcgcacagctgcaaaacgttcaaggcgagaacgaaatttatgctaggcttatcaaggaaaagccaattgcagaggacgaaaaacgtcaacttggagagcaaatagccggcctgatccgggacttggaagagaaggatgatcaagctcggagcaaacgagaggacaaagaagaattcgagtcattaagcaccacagttcgcgaaatcgcccatgcccatagggatctcgaggacacccaaactttagttgatcagactctgtccaaacagcaacaatccggcccagtcgtcagaagtacttctgagatcagtgagctgatgagacaatgcggagagcagcttaaggtagtgaaggcaaagatcgccaaactcaccaaggaccagcaacgtctccgagacacaatcagcagacttgagttagcccgaagtgagctcaaaaacaaaatcagtcatgcgatcagacaactggagagacgtcgtggcattcaaaatcaaatccagactgagaaagaggagattctcaagtcgaaagaagtcatacaaagggcagacaaggatttgggggccgttgatatagaaatcgccaaagctagggagattcgtgaagatgcacagcagagggcaaggaccaaggaagataatgtggccaaggagcgagatgacctagcggactccatgaagcggctcaaaacactggatcacgatatacgcgagtacttagatcatggcggcctatcaatactcaaggacaatgagaacacgattcagacaatccagaccacaattcgacgcatcggacagactttagatgacatcaaagtccggtcagaaaagatgcagaaagagctggccaataccgatagcgaaaagagaaatatccaagacaacctcgagtatcgcaacgcggctcgtgaagtggattcgctcaaagagatcattgacgatctggaatcgcaaagtgcacaggacgactacgatcaattcgccaaggaagcacaaagttttgagaagcaatataacaatctgagtgctgaaaacaggtcgatttatgaaatcatcaagttaaaagacaacgatttgggcgaaaaaacaaaagagtgggacgaaaacttcaaggacgcaccagagaagtaccgcgagacacacatcaaaactcaaactctcaaggcggctatcgaggatctcggtcgatacgctgcggcgctaaatcatgccgtaatcaagtatcacggcgtcaagttgcgtgaagtgaacgacatgattgacgagttgtggacgaaaacgtatcaaggcacagatatcgacaggattatgatcacgtcggatgcagaccccactggaaatagaagcgcatacaactatcgcgtggtgatgaccaagaacgccgtcgagatggacatgcgaggtcgttgctctgctggtcaaaaggtgctcgcctctatcattattcgcctcgcgctcgctgagtcttttggcattggctgtggcatcattgcactcgatgagccaactaccaaccttgatcgtgacaatatcaaggcgttggctcagagtctgaaaggcatcgttgaacatagacgagcgcagagaaacttccagttggttgtcattacacacgatgcagacttcctacgagagatgcagtgctcggacttcactgatgattactggtatgtcgaacgcgactcggaccagaacagccggatcgtgaaaaagaacatcggcacgctttgatagaccacgtttactcttcttgatatttttcagctggcgtttttggttgagatatgtggatgatgcattgcatggcgtacttcggacaagatggatcggtaatcagtgtgatcttttaaagccacatgggcttttgacacgtaaatggatgcatccagcactggaaaacaatagagttgcgtttagttcatacttaatgatagctatcgccaagagagatggatctctaataatgggacaatagatgccttgag

SEQ ID NO: 26400 - DNA, 1740 bp, Muscodor strobelii
  misc_feature: SGI cDNA ID NO. 569029
  misc_feature: Encodes the peptide sequence at SEQ ID NO 26401
atgaagacaatttaccaacattgtcagcgcgtcttcctatttccaggactcgccatggcagagattgctcaagagcagcgcacaacggactttgaacccagacggaacatcactgaaatcaaccatgcactgctagagcaggaagtctttggtcttcgttactttagcagggtctgggttgtccaggaactactgttggccccgttaatcgtcataccaatccgaggcacacactatacgatacatggcaggctaagtagagagattcagttggtttgcggaaaggctccttggtttagaagggtttgcgacccagttgcattagctaatgtgtccctactccaggcactccaactcacggagtcatgccaggcatctgatccaagggatagagtgtatggtgttcttggaatactaggcagcgacacgtggaaaccgacacctgattactcgatatcgactatgcaaacgtttgttggtgtatttgcacatctactgctcaatctcaagcatgtggaaatactcttggccagtgcggcccgctctgcaccttctaatcaccctacatggctaccaaatattgaccagcctagcaatttctccaatattctagagtatgcatctgccgtgcgacaatggggctataaaagttttttgactaaagagtattacgagctcgaaggatcccctattctgatatcccaggacttggaagaatcgtcgtacgttgggtctcagacgttgggcctcacagttcatcttctgaaactattcacttcgaacgaagaggaactgtgcatgcagagtgataaatggggcatgcagggggacaactggggcgtgagtagaatttacattggaaaatatctaggcaatttgtacacttcattcactgtttacggtccatgcctggacctttcgaagttaatcatcccgggcatggttaatgtcttcctcatgggccaccctctcatgctactctttctcaatcgagaacgatccagtgtatatacaatgctagcgagtttcctctgcgttgaaatgcactaccgttctactcggattttcccaaggagcccaaagagaccaaaggaggagagatcaatattccgcaacatgtatgacgccctcgtccacgtccaagcagcataccaagcattagaacgcagagtttccacggatgaatgggccatggcagacataaataagatctttcctgggagcaaatggactatgagagatattcttgaagtatgggctgccatactgcccgattctacgcacggagagattatcagagcaagtgacctccaaatgtggcagaagagaatgaaaatagcgacgtcgggtcaatgttttttatggttacagccacaaaatcccaaaatcatggcactgaggcaagtggtacttaatgtggatccgtggtactggaaggatgtcttgaaatgggctcaaagcgatcagcaatctgatgatgttaccaccgccttacggatgcaaaggtcgataaagattacgatatcccacactgagctactcggaatccttagaaatgatcctttttcacccatgatggatctactaaagcaaataagccgctctacacaaaaactcatacctgatgtcttagaactggagccgaaagaagagcacaaattcattaacattgtgccatgggcagatgagggcgtggaactcctagctaaggcgaagctcatgaaagtaacgattgtttag

SEQ ID NO: 26401 - protein, 579 aa, Muscodor strobelii
  misc_feature: SGI Peptide ID NO. 569029
  misc_feature (1)..(248): NCBI GI: 256721389 Blast Desc: NECHADRAFT_82416 [Nectria haematococca mpVI 77-13-4]
  misc_feature (1)..(202): NCBI GI: 115385895 Blast Desc: [Aspergillus terreus NIH2624] gi|114187941|gb|EAU29641.1| [Aspergillus terreus NIH2624]
  misc_feature (1)..(193): NCBI GI: 67901694 Blast Desc: AN7834.2 [Aspergillus nidulans FGSC A4] gi|40741983|gb|EAA61173.1| AN7834.2 [Aspergillus nidulans FGSC A4] gi|259484192|tpe|CBF80201.1| TPA: conserved [Aspergillus FGSC
  misc_feature (47)..(259): NCBI GI: 256730180 Blast Desc: NECHADRAFT_82912 [Nectria haematococca mpVI 77-13-4]
  misc_feature (1)..(230): NCBI GI: 256726064 Blast Desc: NECHADRAFT_1127 [Nectria haematococca mpVI 77-13-4]
  misc_feature (1)..(190): NCBI GI: 145603884 Blast Desc: MGG_10250 [Magnaporthe grisea 70-15] gi|145012019|gb|EDJ96675.1| MGG_10250 [Magnaporthe grisea 70-15]
  misc_feature (1)..(190): NCBI GI: 149211101 Blast Desc: MGCH7_ch7g1013 [Magnaporthe grisea 70-15] gi|86196968|gb|EAQ71606.1| MGCH7_ch7g1013 [Magnaporthe grisea 70-15]
  misc_feature (1)..(193): NCBI GI: 256722955 Blast Desc: NECHADRAFT_1120 [Nectria haematococca mpVI 77-13-4]
  misc_feature (1)..(192): NCBI GI: 171694584 Blast Desc: protein product [Podospora anserina] gi|170947534|emb|CAP59695.1| protein product [Podospora anserina]
  misc_feature (1)..(200): NCBI GI: 256728403 Blast Desc: NECHADRAFT_87806 [Nectria haematococca mpVI 77-13-4]
MKTIYQHCQRVFLFPGLAMAEIAQEQRTTDFEPRRNITEINHALLEQEVFGLRYFSRVWVVQELLLAPLIVIPIRGTHYTIHGRLSREIQLVCGKAPWFRRVCDPVALANVSLLQALQLTESCQASDPRDRVYGVLGILGSDTWKPTPDYSISTMQTFVGVFAHLLLNLKHVEILLASAARSAPSNHPTWLPNIDQPSNFSNILEYASAVRQWGYKSFLTKEYYELEGSPILISQDLEESSYVGSQTLGLTVHLLKLFTSNEEELCMQSDKWGMQGDNWGVSRIYIGKYLGNLYTSFTVYGPCLDLSKLIIPGMVNVFLMGHPLMLLFLNRERSSVYTMLASFLCVEMHYRSTRIFPRSPKRPKEERSIFRNMYDALVHVQAAYQALERRVSTDEWAMADINKIFPGSKWTMRDILEVWAAILPDSTHGEIIRASDLQMWQKRMKIATSGQCFLWLQPQNPKIMALRQVVLNVDPWYWKDVLKWAQSDQQSDDVTTALRMQRSIKITISHTELLGILRNDPFSPMMDLLKQISRSTQKLIPDVLELEPKEEHKFINIVPWADEGVELLAKAKLMKVTIV

SEQ ID NO: 26402 - DNA, 3244 bp, Muscodor strobelii
  misc_feature: SGI EST ID NO. CUFF.62365.0
  misc_feature: Variant of the nucleotide sequence at SEQ ID NO 26400
ggcacggccttagagacataagaattatgtgttcggaaattcgttgtttccgtttagaaatgtgagcctcaaaaatgacatgagctagctccatatggtagcataattgccagaatgctaccgattgcgacatggtgctatgctcgacactcgagttcttagatgttcaaagttgaaggcagtgctctcctataatatgagcgattattctcgaccagataaatccacttcaacagaacaacgatgggtgatactgctcgacggtatcatcgaagttcggatgacgcagtttcagctactttcttgatcgacgctgttacaccgcatgtatgaccacagtccagcatctaggacttctatgcacggaagcacaagcacctccagccgcatcgtgtttactctcctcagtccaacgcctcgcgccttgggtgagggtgctgctatggcttcattgcattgatcatcgaagaacacccaatttctttttgattcaaattgttcagtagagaaggatattgacttctctaaggactccatcattgcttctcatcagatcccgtccgtttcgtatggacagccgataactctgggcgcagccttgcgtgtatgtctctcgggatctactgctttgcaaacaagtatcggcattgttgcgtatatgacctttttgtttcaacaacgctgctcttctagaggcggagatcatggttcgttggcatgaatcttggtgtttagagccccagatctcagtcgaagacggagttccaaaatgctctacgtgcgatagtcagccaaatttggaggaggtaaagaaaacggctaacgttgtgaaaccttggaagccgcctcctgatgaggcacctgaacagaggaattactcatggcctccctccgtgccatatcgatccgagatagatgatagcgactctctcgacgcggatattagacaacacacgccactcgtcaaccaaattagtacatcaagtacagtcaatgggaaaataacgctagactatccctatgacaagagattaagtggtggcgaattccgacttatctgtttaccagccacgagcaggacacagaacaacccaatccaccttgacctaatgacgttcaacgatggcgatagtccggaatatgaggcagtgtcttatctttgggatggcgaggatgctgacaattctcgactcggcaatatctctcgccaacgcgagatctatgtcggccgctattgggatgttatggtacaacaacatagctgttatgacttattatggtatatgactccgaagtacggcgttcgtttcgtatgggtagacgcaatttgcataaatcaagcagacattgaagagcgttcgatccaagttgcgaagatgaagacaatttaccaacattgtcagcgcgtcttcctatttccaggactcgccatggcagagattgctcaagagcagcgcacaacggactttgaacccagacggaacatcactgaaatcaaccatgcactgctagagcaggaagtctttggtcttcgttactttagcagggtctgggttgtccaggaactactgttggccccgttaatcgtcataccaatccgaggcacacactatacgatacatggcaggctaagtagagagattcagttggtttgcggaaaggctccttggtttagaagggtttgcgacccagttgcattagctaatgtgtccctactccaggcactccaactcacggagtcatgccaggcatctgatccaagggatagagtgtatggtgttcttggaatactaggcagcgacacgtggaaaccgacacctgattactcgatatcgactatgcaaacgtttgttggtgtatttgcacatctactgctcaatctcaagcatgtggaaatactcttggccagtgcggcccgctctgcaccttctaatcaccctacatggctaccaaatattgaccagcctagcaatttctccaatattctagagtatgcatctgccgtgcgacaatggggctataaaagttttttgactaaagagtattacgagctcgaaggatcccctattctgatatcccaggacttggaagaatcgtcgtacgttgggtctcagacgttgggcctcacagttcatcttctgaaactattcacttcgaacgaagaggaactgtgcatgcagagtgataaatggggcatgcagggggacaactggggcgtgagtagaatttacattggaaaatatctaggcaatttgtacacttcattcactgtttacggtccatgcctggacctttcgaagttaatcatcccgggcatggttaatgtcttcctcatgggccaccctctcatgctactctttctcaatcgagaacgatccagtgtatatacaatgctagcgagtttcctctgcgttgaaatgcactaccgttctactcggattttcccaaggagcccaaagagaccaaaggaggagagatcaatattccgcaacatgtatgacgccctcgtccacgtccaagcagcataccaagcattagaacgcagagtttccacggatgaatgggccatggcagacataaataagatctttcctgggagcaaatggactatgagagatattcttgaagtatgggctgccatactgcccgattctacgcacggagagattatcagagcaagtgacctccaaatgtggcagaagagaatgaaaatagcgacgtcgggtcaatgttttttatggttacagccacaaaatcccaaaatcatggcactgaggcaagtggtacttaatgtggatccgtggtactggaaggatgtcttgaaatgggctcaaagcgatcagcaatctgatgatgttaccaccgccttacggatgcaaaggtcgataaagattacgatatcccacactgagctactcggaatccttagaaatgatcctttttcacccatgatggatctactaaagcaaataagccgctctacacaaaaactcatacctgatgtcttagaactggagccgaaagaagagcacaaattcattaacattgtgccatgggcagatgagggcgtggaactcctagctaaggcgaagctcatgaaagtaacgattgtttagagtatgaatatcaagtctctccatcaccatatcgctttcatactcttcccatgtccatcttgtttaaatgcttgcgcattcgaacatcctctcgtatgtaatgttgtcaaatatacagttaataaaac

SEQ ID NO: 26403 - DNA, 1092 bp, Muscodor strobelii
  misc_feature: SGI cDNA ID NO. 569030
  misc_feature: Reduced expression when VOC is produced
  misc_feature: Encodes the peptide sequence at SEQ ID NO 26404
atggcttccgctccgagtcgattcagccagttcaagaatggcaccgccgagatgttccagaagaaatggccacgcttcttcttcatcaccatctgcctgcagggcatcatctgtgtagccttcgaggcatatgcatttgctactttccagagcagcctgggcgacacaagcgccgatgtattccaacaagatacttctgtccaagcgcagctcaagaccatccctactttcttaggaatcttcatcttgggcactgtctacgaaatcgccttgacgtgggatgctctcatcgccaagaacacgattcagatcatcggcatctgcattgccaatctcgctcttctggtctacggtggtctgcagatcgatcagattcacgaatccatcaccattctgcatgacaagaatgtgttcctcaactttgacgtctgggttgagacgcgaggcgagttgattgccatccccgccatcatcgggctgacgacattcgttctgggcttcattgcctggaagctctaccaggagtttgcttgggatatcctgaagcacataggagctgactacaggatgaagaagcggttcctgcactaccagatctacattgcccttctcaagttcgatttcttcttctttgtcgggtttacgattcagttcctcgtggttgtgggctataagacgagagttggagccgtcgaagtcggtctcacggcggccgccatccccgtaaccattgccatcctgatttgcgccgcctggtttactcgtcgcgagtggaagatcggtatggtctgcgtcatggtgctgtacctgggtggcctgacctacttcatctacaaactggcgagaatctacgagccctcgcaggccgcgatctacatgccggtgcgcaagtcgctgacggccttcgcggtgctcaccatcatcctcatcgttctgacgataaccaacgcgctggtgtgcatgttcaactttgggcacggacttaagcagcacctcctcaaggcgccccaggccggactggacaaggatcagcaatcgtactcgatgaacgatgttaagaccgcgcagccgagtcggatgacgatcgattaa

SEQ ID NO: 26404 - protein, 363 aa, Muscodor strobelii
  misc_feature: SGI Peptide ID NO. 569030
  misc_feature (12)..(363): NCBI GI: 261358675 Blast Desc: conserved [Verticillium albo-atrum VaMs.102]
  misc_feature (9)..(363): NCBI GI: 85111184 Blast Desc: NCU00899 [Neurospora crassa OR74A] gi|28925554|gb|EAA34580.1| conserved [Neurospora crassa OR74A]
  misc_feature (5)..(363): NCBI GI: 46107662 Blast Desc: FG00714.1 [Gibberella zeae PH-1]
  misc_feature (9)..(363): NCBI GI: 38636464 Blast Desc: conserved [Neurospora crassa]
  misc_feature (1)..(363): NCBI GI: 171694894 Blast Desc: protein product [Podospora anserina] gi|170947689|emb|CAP59851.1| protein product [Podospora anserina]
  misc_feature (13)..(363): NCBI GI: 256734762 Blast Desc: [Nectria haematococca mpVI 77-13-4]
  misc_feature (41)..(363): NCBI GI: 39945074 Blast Desc: MGG_04519 [Magnaporthe grisea 70-15] gi|145021507|gb|EDK05636.1| MGG_04519 [Magnaporthe grisea 70-15]
  misc_feature (23)..(363): NCBI GI: 145229015 Blast Desc: An01g03870 [Aspergillus niger] gi|134054912|emb|CAK36924.1| protein product [Aspergillus niger]
  misc_feature (23)..(363): NCBI GI: 119496807 Blast Desc: NFIA_019860 [Neosartorya fischeri NRRL 181] gi|119413339|gb|EAW23280.1| conserved [Neosartorya fischeri NRRL 181]
  misc_feature (23)..(363): NCBI GI: 70990776 Blast Desc: conserved [Aspergillus fumigatus Af293] gi|66847869|gb|EAL88199.1| conserved [Aspergillus fumigatus Af293] gi|159130713|gb|EDP55826.1| conserved [Aspergillus A1163]
  misc_feature: Useful for introducing or modulating the production of volatile compounds
MASAPSRFSQFKNGTAEMFQKKWPRFFFITICLQGIICVAFEAYAFATFQSSLGDTSADVFQQDTSVQAQLKTIPTFLGIFILGTVYEIALTWDALIAKNTIQIIGICIANLALLVYGGLQIDQIHESITILHDKNVFLNFDVWVETRGELIAIPAIIGLTTFVLGFIAWKLYQEFAWDILKHIGADYRMKKRFLHYQIYIALLKFDFFFFVGFTIQFLVVVGYKTRVGAVEVGLTAAAIPVTIAILICAAWFTRREWKIGMVCVMVLYLGGLTYFIYKLARIYEPSQAAIYMPVRKSLTAFAVLTIILIVLTITNALVCMFNFGHGLKQHLLKAPQAGLDKDQQSYSMNDVKTAQPSRMTID

SEQ ID NO: 26405 - DNA, 3038 bp, Muscodor strobelii
  misc_feature: SGI EST ID NO. CUFF.62370.0
  misc_feature: Variant of the nucleotide sequence at SEQ ID NO 26403
taaaggtgctgcagtgaatgaagttgtattgcatagtaccttcgccatccatttcactggaatacggctattcggattggtgttatctgccctatgttcttcgaatcgggacgtgccaattattctctccatagcccgtctgacagctctgtgggctggcagttgaactttccaagtgggtgggaaagtccatttttagttcacagccccttccagactggaccttctaatgctgctagcctaggacttgatctgagggtcagagccaatctcaccctaaagaccagaaaaatcatcaacatttcaatcagtcaactgcattcaacaacgacttagatcatcccactcgttttgttaacattcttctcgcaatagggctgtctgactcgtcatccagagggagaaccggacgcaggcactcctgcatatcgcggcagttacatcatcacacgctcgacaggcaatacgagggcgtaaccgtgtttttcgccgcccgctagccagttgactgcataccttcacccccaatgcaaccctactaggagcagacaggatccctcattcgatctgcccatcccgagagctagcacggcggcagttcgttccagtgacgtgtgctgattgaatcgtggtaagtgcggatgtgtttcgttgtttgttcttccgtttgcatgttcgtcgctctccccgtcgaaacagcgctggtgcagcttcctagaacacctccgtccccccttcgacaccccccgttgcgggcttcaaacccgccaagcttgtttcagccctcagcccaacacagacaagacacaacagacttatcataactgaccaggagaccccgtcgccgtcgcacagccaatccctccgccggatttgcaacgactacagcacctgccgctcctgcgacgactcttcccacccagcagcccagcgccatcgccaataatcatcagcatcaacatccgcattcacccatttcgtccgtataacgattgaatcattcgccgctcgttcgaacgattgaataaccaacatccatacataccaatcatcgatcatcaatcccggaatatttcccccgtccaataccgactctgccttacacaatccgacagcgacagaccatcggccgagaagagacgtgtcgcaaattacacgactgaacacaaagacccgcatccgctttcctttggccccctttcgccccatcgcagaagaagaactgctttctcctcgaccgtgaggaacaccgtcaaagtggcggctttcgatcaacacaggacatctctgttggccggggacagcggaggcttccaacagatcccgtctccccagccctacgctccctaccaggccggccagttccccgatagaccagagtacgacaaccctccgtacgcacaataccctcagtacgagtcctcaccgcagtctccccgtcacttcgacaccaaccgctccaacatggcttccgctccgagtcgattcagccagttcaagaatggcaccgccgagatgttccagaagaaatggccacgcttcttcttcatcaccatctgcctgcagggcatcatctgtgtagccttcgaggcatatgcatttgctactttccagagcagcctgggcgacacaagcgccgatgtattccaacaagatacttctgtccaagcgcagctcaagaccatccctactttcttaggaatcttcatcttgggcactgtctacgaaatcgccttgacgtgggatgctctcatcgccaagaacacgattcagatcatcggcatctgcattgccaatctcgctcttctggtctacggtggtctgcagatcgatcagattcacgaatccatcaccattctgcatgacaagaatgtgttcctcaactttgacgtctgggttgagacgcgaggcgagttgattgccatccccgccatcatcgggctgacgacattcgttctgggcttcattgcctggaagctctaccaggagtttgcttgggatatcctgaagcacataggagctgactacaggatgaagaagcggttcctgcactaccagatctacattgcccttctcaagttcgatttcttcttctttgtcgggtttacgattcagttcctcgtggttgtgggctataagacgagagttggagccgtcgaagtcggtctcacggcggccgccatccccgtaaccattgccatcctgatttgcgccgcctggtttactcgtcgcgagtggaagatcggtatggtctgcgtcatggtgctgtacctgggtggcctgacctacttcatctacaaactggcgagaatctacgagccctcgcaggccgcgatctacatgccggtgcgcaagtcgctgacggccttcgcggtgctcaccatcatcctcatcgttctgacgataaccaacgcgctggtgtgcatgttcaactttgggcacggacttaagcagcacctcctcaaggcgccccaggccggactggacaaggatcagcaatcgtactcgatgaacgatgttaagaccgcgcagccgagtcggatgacgatcgattaaaattgcacaaaaacaccaatatagatgtacaaaagcgacacgacttgcatgattcccatttagcttttttctttccttttcttccattttccatccacttttcccattccagatatcctgccatgtcaggcacaacaggggccaacatttgagaagagacggatcttctcacggggtctcttctgaggcgtttggcgatcaccatccttcgacacccttctcgtacgaagggccatttggcacaaggttagaacaagagcaaggactagtacttgaggtaccacttacaggtcgaatcaaactggatttccttggagacgaaggtgacaagtgtggcttggagacaggggatgaaggaaatctacgacgggtatagataaccctgtgagcgtggagatgtagtagcttccataccgtagctattagcgtgtggctagcgaattaaagataccattgttaccaatttgaagatactatgagaa

SEQ ID NO: 26406 - DNA, 1599 bp, Muscodor strobelii
  misc_feature: SGI cDNA ID NO. 569031
  misc_feature: Reduced expression when VOC is produced
  misc_feature: Encodes the peptide sequence at SEQ ID NO 26407
atggacattgacgaagacgagtctctgcgcactctcgcagcgggcggcgccattgaccactctgcatggccggccttgctctcacacatcgttgcgcgcatcgaaaagatcgcccacgatgaattcccaattccaaacctcccacctccagtccccgttgtcccatcttcaataccaccgccaccagattcagagttatcagagaacttcctagcccctctgccctcctcgcctaccgagccggcctcgagctcgtcacaggatacgaacaaggagaatacccctgcggccactcgaaacgtcgaccatccgccgcctgtggcagctccagcgccagccccagtcgccccagcgcccctcccaccaggcactctaccagctcagatcactcacatgctctccgaaatcacgtctactctcacctctacctttcctacataccctcctcataccgttcagcgtttatcagagctcgtagtgtccccgaagcagcactaccgctcgctcgccacctacctacatgctttggatcgtatcgttcatgtgacctctggtctaaatgtctacccgttgccatcgatacatgccgagaacccaccatccaccatggccaatgggatagccagccaatccgcgtgggcctctccaggaagcgatgaagccctcggcggtgctcttctgacgcctatcccatggctagctcctaatcagcaggtggctacaggatcccctacgccgccagctcaggctacatctcaggagacatccagtgatttggaaggagaggtgcgcacagagagcacagagacgatcgaaggacccaacggtgtgggcagcgtcgagacggtgtccgtgtcagtcaacggcatcccgtcgataggggcccgcggcgtgggcgtaacccaaggtgagttactacgacaggagcagcgtgcgggtgtcgtccccatcagccagctcgtgcccagtcatcacgtgcatccaggacacagtaacgcaagcgcggcggcccagcagcagcaacaacaggtccgcatacagcaccaactagcactagcacaagcacaagcacaagcatcacaagcacaagcccagtcttcatcgtcaccagattctcctgactcagtctcagtgccatccaatgccgcctcgactccttcttccgctacgctggaggaggagtcgccatcgggcgaggacgcggaggcagccgccccggctatcacttccgtccatagcaataatgcagaggacgaggagaagccgcatgctcgtggacccgaggagatcggagccgacgatttggggccgcagtctcagaccacgtcgtcacttaccacgaccaccacgggaccaggtggcgtgacaatgcaaggaattgatctccaggctgccgtgggaaggaagcccctggattcgggaaagagtgaggaggaggataaagaggataagatggttgttgataaggaggatggcgtctcaacgccgaaacgggatgctgaggaggagctggagggaagtgttgctaagaaggtcaaagagagcgagaccgaggagaaagagagtaaggaggagggagatcctatggataaggattga

SEQ ID NO: 26407 - protein, 532 aa, Muscodor strobelii
  misc_feature: SGI Peptide ID NO. 569031
  misc_feature (34)..(469): NCBI GI: 85111186 Blast Desc: NCU00900 [Neurospora crassa OR74A] gi|28925555|gb|EAA34581.1| [Neurospora crassa OR74A] gi|38636463|emb|CAE81998.1| [Neurospora crassa]
  misc_feature (1)..(532): NCBI GI: 145614602 Blast Desc: MGG_04520 [Magnaporthe grisea 70-15] gi|145021505|gb|EDK05634.1| MGG_04520 [Magnaporthe grisea 70-15]
  misc_feature (37)..(320): NCBI GI: 116182582 Blast Desc: CHGG_01919 [Chaetomium globosum CBS 148.51] gi|88186216|gb|EAQ93684.1| CHGG_01919 [Chaetomium globosum CBS 148.51]
  misc_feature (26)..(320): NCBI GI: 171694920 Blast Desc: protein product [Podospora anserina] gi|170947702|emb|CAP59864.1| protein product [Podospora anserina]
  misc_feature (1)..(320): NCBI GI: 156054937 Blast Desc: SS1G_06315 [Sclerotinia sclerotiorum 1980] gi|154704095|gb|EDO03834.1| SS1G_06315 [Sclerotinia sclerotiorum 1980]
  misc_feature (68)..(320): NCBI GI: 256735466 Blast Desc: NECHADRAFT_98953 [Nectria haematococca mpVI 77-13-4]
  misc_feature (1)..(320): NCBI GI: 154295372 Blast Desc: BC1G_13267 [Botryotinia fuckeliana B05.10] gi|150844134|gb|EDN19327.1| BC1G_13267 [Botryotinia fuckeliana B05.10]
  misc_feature (1)..(234): NCBI GI: 169764675 Blast Desc: [Aspergillus oryzae RIB40] gi|83764663|dbj|BAE54807.1| protein product [Aspergillus oryzae]
  misc_feature (1)..(233): NCBI GI: 239611179 Blast Desc: conserved [Ajellomyces dermatitidis ER-3]
  misc_feature (1)..(233): NCBI GI: 261205746 Blast Desc: conserved [Ajellomyces dermatitidis SLH14081] gi|239592669|gb|EEQ75250.1| conserved [Ajellomyces dermatitidis SLH14081]
  misc_feature: Useful for introducing or modulating the production of volatile compounds
MDIDEDESLRTLAAGGAIDHSAWPALLSHIVARIEKIAHDEFPIPNLPPPVPVVPSSIPPPPDSELSENFLAPLPSSPTEPASSSSQDTNKENTPAATRNVDHPPPVAAPAPAPVAPAPLPPGTLPAQITHMLSEITSTLTSTFPTYPPHTVQRLSELVVSPKQHYRSLATYLHALDRIVHVTSGLNVYPLPSIHAENPPSTMANGIASQSAWASPGSDEALGGALLTPIPWLAPNQQVATGSPTPPAQATSQETSSDLEGEVRTESTETIEGPNGVGSVETVSVSVNGIPSIGARGVGVTQGELLRQEQRAGVVPISQLVPSHHVHPGHSNASAAAQQQQQQVRIQHQLALAQAQAQASQAQAQSSSSPDSPDSVSVPSNAASTPSSATLEEESPSGEDAEAAAPAITSVHSNNAEDEEKPHARGPEEIGADDLGPQSQTTSSLTTTTTGPGGVTMQGIDLQAAVGRKPLDSGKSEEEDKEDKMVVDKEDGVSTPKRDAEEELEGSVAKKVKESETEEKESKEEGDPMDKD

SEQ ID NO: 26408 - DNA, 1906 bp, Muscodor strobelii
  misc_feature: SGI EST ID NO. CUFF.62489.1
  misc_feature: Variant of the nucleotide sequence at SEQ ID NO 26406
tcccgccatccgttacatcacacccataccatcgacctagcaattgcagctgtcgcaacgcagcaggcacgtcaatttgaacagccgcttccttggacaatcagccgacaagtctcaattgccgtccccagcatggacattgacgaagacgagtctctgcgcactctcgcagcgggcggcgccattgaccactctgcatggccggccttgctctcacacatcgttgcgcgcatcgaaaagatcgcccacgatgaattcccaattccaaacctcccacctccagtccccgttgtcccatcttcaataccaccgccaccagattcagagttatcagagaacttcctagcccctctgccctcctcgcctaccgagccggcctcgagctcgtcacaggatacgaacaaggagaatacccctgcggccactcgaaacgtcgaccatccgccgcctgtggcagctccagcgccagccccagtcgccccagcgcccctcccaccaggcactctaccagctcagatcactcacatgctctccgaaatcacgtctactctcacctctacctttcctacataccctcctcataccgttcagcgtttatcagagctcgtagtgtccccgaagcagcactaccgctcgctcgccacctacctacatgctttggatcgtatcgttcatgtgacctctggtctaaatgtctacccgttgccatcgatacatgccgagaacccaccatccaccatggccaatgggatagccagccaatccgcgtgggcctctccaggaagcgatgaagccctcggcggtgctcttctgacgcctatcccatggctagctcctaatcagcaggtggctacaggatcccctacgccgccagctcaggctacatctcaggagacatccagtgatttggaaggagaggtgcgcacagagagcacagagacgatcgaaggacccaacggtgtgggcagcgtcgagacggtgtccgtgtcagtcaacggcatcccgtcgataggggcccgcggcgtgggcgtaacccaaggtgagttactacgacaggagcagcgtgcgggtgtcgtccccatcagccagctcgtgcccagtcatcacgtgcatccaggacacagtaacgcaagcgcggcggcccagcagcagcaacaacaggtccgcatacagcaccaactagcactagcacaagcacaagcacaagcatcacaagcacaagcccagtcttcatcgtcaccagattctcctgactcagtctcagtgccatccaatgccgcctcgactccttcttccgctacgctggaggaggagtcgccatcgggcgaggacgcggaggcagccgccccggctatcacttccgtccatagcaataatgcagaggacgaggagaagccgcatgctcgtggacccgaggagatcggagccgacgatttggggccgcagtctcagaccacgtcgtcacttaccacgaccaccacgggaccaggtggcgtgacaatgcaaggaattgatctccaggctgccgtgggaaggaagcccctggattcgggaaagagtgaggaggaggataaagaggataagatggttgttgataaggaggatggcgtctcaacgccgaaacgggatgctgaggaggagctggagggaagtgttgctaagaaggtcaaagagagcgagaccgaggagaaagagagtaaggaggagggagatcctatggataaggattgattgttgttgtatgataagattagatggtggattgccatacgaatttatgatggttttgatgagcaacgcgatttgggggttctgtgatgtgaatgtgttttaatgtgtattgggataagaacactggggttgtgctgatattgtatctcattctatacgtatcactctctacgca

SEQ ID NO: 26409 - DNA, 1224 bp, Muscodor strobelii
  misc_feature: SGI cDNA ID NO. 569032
  misc_feature: Encodes the peptide sequence at SEQ ID NO 26410
atggctccccctagtgcctcacaagatgcgcctccgcacagtgagccgatgaattacttgtcgactagtgaacaagggagaacgcccgccactgtcatcgccatcggcgccgtgtttacggcgttagccgcaataccggtggcactacgcttctactgtcatttgcgcgttagccgtgccggcctgggtgtcgatgactggctaattctagccgcgttcatactcgcgaccgcgatgggcgtgctactgattgttggaggagcaatgcatggtctggcccaaccaacgcctcagggctgggggcctaccgactatttctgggttacggatgacgctgagatcttgacagagaaaatcttctgggctttcatcctgatacaagattgggccttcggattagtcaagctatcggttctcttcttctaccgacgaatattctgcggcaatgtcttcaggaatctcacactaggtctgatagtcttcgtttcgctctggagcgtggggttcttcttcgcctacctgtttagatgcggcacgaatttctgggcgttatgggcacctcttatgtacctgattgaacattgttacgaaagcacggcaatgttttatacactggctatcactgatgtcctcacggacgtcgtcattttgagtctaccaatcttctggatcgcgaaactcaatatgcccctgaaaaagaggcttgcagtagtaggagtgttcctgctcggcgcgattgaaattgctaccggaattgctcgtcttgtcatattcgtacagcagaccacaaattaccttaccaacgccgacggcattggtcttctgaccactcttatggtctggtcgatgatcgagatgagcatcgccgtcatcgccgcctgcctaccagccatttggccacttatcaacaaaatcccactcgaagatatggccaagagtttccgtacagctttctctctcccgagtctgcgtggctcgaccagaggatcctcaagtggcaagagtcgagacgacagttcatcttggtcttcaaaccctgaggcgggtccatacatagaactctccaagtcggaagatagagaggtcaagaacggcgcgatcgcagttgaaaatagctttgcggttcggacatcgactaagactgacagtttccggatgcaggacttatcgacacagacacagactcacatatcatcaccaagacgacatcatgacgcgatctaa

SEQ ID NO: 26410 - protein, 407 aa, Muscodor strobelii
  misc_feature: SGI Peptide ID NO. 569032
  misc_feature (34)..(326): NCBI GI: 242816288 Blast Desc: conserved [Talaromyces stipitatus ATCC 10500] gi|218715084|gb|EED14507.1| conserved [Talaromyces stipitatus ATCC 10500]
  misc_feature (28)..(346): NCBI GI: 212534488 Blast Desc: conserved [Penicillium marneffei ATCC 18224] gi|210069799|gb|EEA23889.1| conserved [Penicillium marneffei ATCC 18224]
  misc_feature (29)..(360): NCBI GI: 242784989 Blast Desc: conserved [Talaromyces stipitatus ATCC 10500] gi|218720648|gb|EED20067.1| conserved [Talaromyces stipitatus ATCC 10500]
  misc_feature (28)..(364): NCBI GI: 145249196 Blast Desc: An14g03120 [Aspergillus niger] gi|134081615|emb|CAK46549.1| protein product [Aspergillus niger]
  misc_feature (125)..(326): NCBI GI: 242816292 Blast Desc: conserved [Talaromyces stipitatus ATCC 10500] gi|218715085|gb|EED14508.1| conserved [Talaromyces stipitatus ATCC 10500]
  misc_feature (38)..(362): NCBI GI: 154324046 Blast Desc: [Botryotinia fuckeliana B05.10] gi|150842651|gb|EDN17844.1| [Botryotinia fuckeliana B05.10]
  misc_feature (28)..(314): NCBI GI: 242800335 Blast Desc: conserved [Talaromyces stipitatus ATCC 10500] gi|218716911|gb|EED16332.1| conserved [Talaromyces stipitatus ATCC 10500]
  misc_feature (42)..(338): NCBI GI: 169621825 Blast Desc: SNOG_14125 [Phaeosphaeria nodorum SN15] gi|160704631|gb|EAT78362.2| SNOG_14125 [Phaeosphaeria nodorum SN15]
  misc_feature (28)..(305): NCBI GI: 85092407 Blast Desc: NCU04931 [Neurospora crassa OR74A] gi|28920784|gb|EAA30143.1| [Neurospora crassa OR74A]
  misc_feature (32)..(340): NCBI GI: 242809618 Blast Desc: conserved [Talaromyces stipitatus ATCC 10500] gi|218716033|gb|EED15455.1| conserved [Talaromyces stipitatus ATCC 10500]
MAPPSASQDAPPHSEPMNYLSTSEQGRTPATVIAIGAVFTALAAIPVALRFYCHLRVSRAGLGVDDWLILAAFILATAMGVLLIVGGAMHGLAQPTPQGWGPTDYFWVTDDAEILTEKIFWAFILIQDWAFGLVKLSVLFFYRRIFCGNVFRNLTLGLIVFVSLWSVGFFFAYLFRCGTNFWALWAPLMYLIEHCYESTAMFYTLAITDVLTDVVILSLPIFWIAKLNMPLKKRLAVVGVFLLGAIEIATGIARLVIFVQQTTNYLTNADGIGLLTTLMVWSMIEMSIAVIAACLPAIWPLINKIPLEDMAKSFRTAFSLPSLRGSTRGSSSGKSRDDSSSWSSNPEAGPYIELSKSEDREVKNGAIAVENSFAVRTSTKTDSFRMQDLSTQTQTHISSPRRHHDAI

SEQ ID NO: 26411 - DNA, 628 bp, Muscodor strobelii
  misc_feature: SGI EST ID NO. CUFF.62380.0
  misc_feature: Variant of the nucleotide sequence at SEQ ID NO 26409
gtctggcccaaccaacgcctcagggctgggggcctaccgactatttctgggttacggatgacgctgagatcttgacagagaaagtgagtatcacaaataacactgtggaaatgagagcgtgtgctgacttggacgcaacatctagatcttctgggctttcatcctgatacaagattgggccttcggattagtcaagctatcggttctcttcttctaccgacgaatattctgcggcaatgtcttcaggaatctcacactaggtctgatagtcttcgtttcgctctggagcgtggggttcttcttcgcctacctgtttagatgcggcacgaatttctgggcgttatgggcacctcttatgtacctgattgaacattgttacgaaagcacggcaatgttttatacactggctatcactgatgtcctcacggacgtcgtcattttgagtctaccaatcttctggatcgcgaaactcaatatgcccctgaaaaagaggcttgcagtagtaggagtgttcctgctcggcgcgattgaaattgctaccggaattgctcgtcttgtcatattcgtacagcagaccacaaattaccttaccaacgccgacggcattggtcttctgaccactcttatg

SEQ ID NO: 26412 - DNA, 582 bp, Muscodor strobelii
  misc_feature: SGI cDNA ID NO. 569033
  misc_feature: Encodes the peptide sequence at SEQ ID NO 26413
atgtgctgcttcaaagacccgcccggggtcgaagacgaggtcctcatgcctgtacgatttggatgggagtactacgctgagacggtggctgacatggaggccgttgaccgtaattggatggcgataaatccagatcttggagccatctccatggatcagacatatgcaggcccacagggcatcattgggggtacgcccgacccgagcgacccaagcaaagaaattcatgtgatgcgcggttaccatgcgttacactgcctgaagatcattcgacacaccatgcagcagctcgccaagggagagccgctggacatgcgatatggtcatgcgatgcattgtgttgcctcgctccttcgagatactatatgttacgctgataactcccttccgcttcgcctagagaatgacagtggcgaatatcaatatgtgcgcaagtgtcgcaactgggcggcaatgagccaatgggctagccctcgcacaacatgcatgaaaacggataataatgggttgttgaacatgacacaccaggattttgagaactgcgatcatagtgacggcctaatattgccgtctctcacatag

SEQ ID NO: 26413 - protein, 193 aa, Muscodor strobelii
  misc_feature: SGI Peptide ID NO. 569033
  misc_feature (24)..(164): NCBI GI: 242818752 Blast Desc: TSTA_055700 [Talaromyces stipitatus ATCC 10500] gi|218713645|gb|EED13069.1| TSTA_055700 [Talaromyces stipitatus ATCC 10500]
  misc_feature (9)..(189): NCBI GI: 242817079 Blast Desc: conserved [Talaromyces stipitatus ATCC 10500] gi|218713345|gb|EED12769.1| conserved [Talaromyces stipitatus ATCC 10500]
  misc_feature (28)..(181): NCBI GI: 189210629 Blast Desc: conserved [Pyrenophora tritici-repentis Pt-1C-BFP] gi|187977739|gb|EDU44365.1| conserved [Pyrenophora tritici-repentis Pt-1C-BFP]
  misc_feature (11)..(167): NCBI GI: 242787550 Blast Desc: TSTA_038090 [Talaromyces stipitatus ATCC 10500] gi|218721179|gb|EED20598.1| TSTA_038090 [Talaromyces stipitatus ATCC 10500]
  misc_feature (28)..(164): NCBI GI: 242784974 Blast Desc: TSTA_033120 [Talaromyces stipitatus ATCC 10500] gi|218720646|gb|EED20065.1| TSTA_033120 [Talaromyces stipitatus ATCC 10500]
  misc_feature (36)..(178): NCBI GI: 242816284 Blast Desc: TSTA_107140 [Talaromyces stipitatus ATCC 10500] gi|218715083|gb|EED14506.1| TSTA_107140 [Talaromyces stipitatus ATCC 10500]
  misc_feature (11)..(167): NCBI GI: 242780316 Blast Desc: TSTA_024590 [Talaromyces stipitatus ATCC 10500] gi|218719716|gb|EED19135.1| TSTA_024590 [Talaromyces stipitatus ATCC 10500]
  misc_feature (39)..(178): NCBI GI: 156034839 Blast Desc: [Sclerotinia sclerotiorum 1980] gi|154698758|gb|EDN98496.1| [Sclerotinia sclerotiorum 1980]
  misc_feature (39)..(164): NCBI GI: 156051644 Blast Desc: SS1G_07229 [Sclerotinia sclerotiorum 1980] gi|154705007|gb|EDO04746.1| SS1G_07229 [Sclerotinia sclerotiorum 1980]
  misc_feature (35)..(181): NCBI GI: 169620792 Blast Desc: SNOG_13602 [Phaeosphaeria nodorum SN15] gi|111057929|gb|EAT79049.1| SNOG_13602 [Phaeosphaeria nodorum SN15]
MCCFKDPPGVEDEVLMPVRFGWEYYAETVADMEAVDRNWMAINPDLGAISMDQTYAGPQGIIGGTPDPSDPSKEIHVMRGYHALHCLKIIRHTMQQLAKGEPLDMRYGHAMHCVASLLRDTICYADNSLPLRLENDSGEYQYVRKCRNWAAMSQWASPRTTCMKTDNNGLLNMTHQDFENCDHSDGLILPSLT

SEQ ID NO: 26414 - DNA, 1745 bp, Muscodor strobelii
  misc_feature: SGI EST ID NO. CUFF.62385.0
  misc_feature: Variant of the nucleotide sequence at SEQ ID NO 26412
cgaccaaagcacacatcaaacccattccgtgagtaaacgtcagtctgtgccaaagtacgacaccagttaacatgtgctgcttcaaagacccgcccggggtcgaagacgaggtcctcatgcctgtacgatttggatgggagtactacgctgagacggtggctgacatggaggccgttgaccgtaattggatggcgataaatccagatcttggagccatctccatggatcagacatatgcaggcccacagggcatcattgggggtacgcccgacccgagcgacccaagcaaagaaattcatgtgatgcgcggttaccatgcgttacactgcctgaagatcattcgacacaccatgcagcagctcgccaagggagagccgctggacatgcgatatggtcatgcgatgcattgtgttgcctcgctccttcgagatactatatgttacgctgataactcccttccgcttcgcctagagaatgacagtggcgaatatcaatatgtgcgcaagtgtcgcaactgggcggcaatgagccaatgggctagccctcgcacaacatgcatgaaaacggataataatgggttgttgaacatgacacaccaggattttgagaactgcgatcatagtgacggcctaatattgccgtctctcacatagagtagtatagaaggaagaaatacatgataccctcacccaagcgcgatgtcacggtaacgaaccagctgaatgatcgtgggtcccaacatgattatagaatagtttctaggctagatagcggagttgtctgtaccgcagcaccggacactatctacatcaggtaggtaatctcgaatcgtcttgttcgcggaccgaagtggcatctaacatcttgcgaaccgaattgtcggatggaaatcatatcaatgctatctgtgtggaccaccactgagagatgggggaaggtatggtatgcctattcattcagctatgaaggttgcaatccagacactatttttacaataggcaagtactcgtatgcctgcccagccagagtcaaagatacccgggtcaagctgtgatagacatttaacgttatcgagaatgccttcggtctgtatcccggccccgcctcattcttgcattgcattaggcctctcttaaaatgcgtatttcagctggagaggaaagttccaggcagtcgccgtatttcttatacgcgggaggatccaatggttaagcatactcggcatactataccatgaacggctattagctctgcctttgattggcggacttcctaccagcgtagcgacctagaatgcgggaaagcggcgctagccaaaagcttgtaacaccctaatcatgggtaaacttgatatcttggaattccgtgtccaaaacaacacacttgaggtgccacgatgtagtaagcgtaattgttcgctagtgtgatacgttgtcaataatcgggaggagatccttcgatacaacctcgcacaaccatcatcaagataatggccatgtggtgtcacaacggttgcaagcccatccatttaggagaagggaaatttgccgcaaggggtaaaagaggatatctattcgtgtcgacttcgatacgacggtcaggaggccgcataacacctttgatgagcgcatgcgaattatacagctaatccgtcacctccgtcaccatgagttcatgagtgggttgacgcctgatctggatatccgagtcgtgccgttgttacgctgttactcctacttgatgag

SEQ ID NO: 26415 - DNA, 1113 bp, Muscodor strobelii
  misc_feature: SGI cDNA ID NO. 569034
  misc_feature: Encodes the peptide sequence at SEQ ID NO 26416
atgagccagcttgattcactactcgaggccaaggctgcgcaggttgaaacccaatttgacgaggctcaggcagagggacaagttctgaatctgtctgatgtgtacttcgccttttccaatgatatcatccatgagtactgttttggcagcggtgccaatacactcgatgatctccaactagctaatgcccggcggacgaatgttgccggtgttctcagcagcgttaagatcatgctccattttggctggatccgtgacatattacagcttctcccagacaacatccgttctggaatgacaccaccaggcgtacgagatatgatgagcttccgatccaagatacgctcagatatcgaccgaatcctcaacactaaaccatcgccttccgaaatcccttccatattcacacatctccgtgacaactcggatctcccagcttccgagaaatcagcgcaaagactcgaagatgaagccacgcttatgatcatggcaggcacatactcgccgatgctgtcactagttaccgcacactaccatctccttacccgtcccgatatcatgagcaagttgcggacagaattgaaagcgcacaaagagatagcaacaacagcctctcggctgcaaaagctcccctatctgtctgccatcatacaggaagcacacagactcacattcgggctaaccggtcggaatccacgtgtatgtcccgacaaagccatcatatactctcaccaagtcaacggtcaagaacgaagctactctttcccaccggggacatccctaagtgcctcaacgctactcatccacaccaatgaggacatcttcccatcgccctgggagttctcaccagaacgatggctgactggcgaccaagcactgctcacggctcgacgtcgatgtatgctgagttttatgcgcggtccaagagcgtgtatcggtatgcatctcgctaatgccgagatggccgtactcattgccgctatggccaggtgggatatgcagctctacgagactacggcacgagatgttgagtttctgcatgactatcatgtcttatgtccgaggcttgactccaagggcgttagagtcactgtgaataagtctctagactga

SEQ ID NO: 26416 - protein, 370 aa, Muscodor strobelii
  misc_feature: SGI Peptide ID NO. 569034
  misc_feature (178)..(328): Pfam Id: PF00067 Pfam Desc: Cytochrome P450
  misc_feature (1)..(363): NCBI GI: 145249194 Blast Desc: An14g03110 [Aspergillus niger] gi|134081614|emb|CAK46548.1| protein product [Aspergillus niger]
  misc_feature (4)..(363): NCBI GI: 169782632 Blast Desc: [Aspergillus oryzae RIB40] gi|83774522|dbj|BAE64645.1| protein product [Aspergillus oryzae]
  misc_feature (4)..(365): NCBI GI: 242815597 Blast Desc: benzoate 4-monooxygenase cytochrome P450, [Talaromyces stipitatus ATCC 10500] gi|218714939|gb|EED14362.1| benzoate 4-monooxygenase cytochrome P450, [Talaromyces stipitatus ATCC
  misc_feature (80)..(363): NCBI GI: 238492275 Blast Desc: cytochrome P450, [Aspergillus flavus NRRL3357] gi|220695868|gb|EED52210.1| cytochrome P450, [Aspergillus flavus NRRL3357]
  misc_feature (6)..(369): NCBI GI: 212539279 Blast Desc: benzoate 4-monooxygenase cytochrome P450, [Penicillium marneffei ATCC 18224] gi|210069537|gb|EEA23628.1| benzoate 4-monooxygenase cytochrome P450, [Penicillium marneffei ATCC
  misc_feature (3)..(366): NCBI GI: 145234316 Blast Desc: An02g13980 [Aspergillus niger] gi|134057475|emb|CAK48829.1| protein product [Aspergillus niger]
  misc_feature (1)..(367): NCBI GI: 171688250 Blast Desc: protein product [Podospora anserina] gi|170944087|emb|CAP70197.1| protein product [Podospora anserina]
  misc_feature (7)..(365): NCBI GI: 9453810 Blast Desc: related to trichodiene oxygenase cytochrome P450 [Neurospora crassa]
  misc_feature (27)..(351): NCBI GI: 115389002 Blast Desc: [Aspergillus terreus NIH2624] gi|114194402|gb|EAU36102.1| [Aspergillus terreus NIH2624]
  misc_feature (8)..(366): NCBI GI: 119499275 Blast Desc: cytochrome P450, [Neosartorya fischeri NRRL 181] gi|119414559|gb|EAW24498.1| cytochrome P450, [Neosartorya fischeri NRRL 181]
  misc_feature (21)..(334): SWISSPROT Homolog: EC 1.14.14.1 Unspecific monooxygenase
MSQLDSLLEAKAAQVETQFDEAQAEGQVLNLSDVYFAFSNDIIHEYCFGSGANTLDDLQLANARRTNVAGVLSSVKIMLHFGWIRDILQLLPDNIRSGMTPPGVRDMMSFRSKIRSDIDRILNTKPSPSEIPSIFTHLRDNSDLPASEKSAQRLEDEATLMIMAGTYSPMLSLVTAHYHLLTRPDIMSKLRTELKAHKEIATTASRLQKLPYLSAIIQEAHRLTFGLTGRNPRVCPDKAIIYSHQVNGQERSYSFPPGTSLSASTLLIHTNEDIFPSPWEFSPERWLTGDQALLTARRRCMLSFMRGPRACIGMHLANAEMAVLIAAMARWDMQLYETTARDVEFLHDYHVLCPRLDSKGVRVTVNKSLD

SEQ ID NO: 26417 - DNA, 4474 bp, Muscodor strobelii
  misc_feature: SGI EST ID NO. CUFF.62520.0
  misc_feature: Variant of the nucleotide sequence at SEQ ID NO 26415
taagaaatagccacatgtgcataacatacagtgctcccatttgcaagattaatacggtgtcaccttcacaaatccacggtcacagactcgtagaggttacatttcagcctgatagatccgcggccaattttttaagcctatgcatcctatggtgtctataggttgcacttgcaagggatcatcagcgtcagcattatataaggtatgcagggaaaccaaatatgcccctcaatcccccaccaccacccaactgactacctattcctcgtctctgatttcaatcgcattacagctagtaaaatgacgattgccgaaacattggtgccaactgtgtctagtgccattggtgcctatattgcttacttattcgttcatccgtatctctttagtccactcgcggagatccctggtcctaagcttgctgccttcacatcatggtatgaatgttattacgatgtgttcctccctgctcaatatgttttcaagattaaaaagcttcacgaacaatacggacccgttgtcagaattggtcccaacgatgtctccatagcagatccagacttcgttgacaccatatacgcgcctggaccagggcacaaacgcgataaagatcacgaaaagaacaaggcactcggaggtcgattcatcagtgggtggatcaatagcccatgacctacaccaaaggcggcgtgaagccctgaatcccttcttttcatctcaacggatgagccagcttgattcactactcgaggccaaggctgcgcaggttgaaacccaatttgacgaggctcaggcagagggacaagttctgaatctgtctgatgtgtacttcgccttttccaatgatatcatccatgagtactgttttggcagcggtgccaatacactcgatgatctccaactagctaatgcccggcggacgaatgttgccggtgttctcagcagcgttaagatcatgctccattttggctggatccgtgacatattacagcttctcccagacaacatccgttctggaatgacaccaccaggcgtacgagatatgatgagcttccgatccaagatacgctcagatatcgaccgaatcctcaacactaaaccatcgccttccgaaatcccttccatattcacacatctccgtgacaactcggatctcccagcttccgagaaatcagcgcaaagactcgaagatgaagccacgcttatgatcatggcaggcacatactcgccgatgctgtcactagttaccgcacactaccatctccttacccgtcccgatatcatgagcaagttgcggacagaattgaaagcgcacaaagagatagcaacaacagcctctcggctgcaaaagctcccctatctgtctgccatcatacaggaagcacacagactcacattcgggctaaccggtcggaatccacgtgtatgtcccgacaaagccatcatatactctcaccaagtcaacggtcaagaacgaagctactctttcccaccggggacatccctaagtgcctcaacgctactcatccacaccaatgaggacatcttcccatcgccctgggagttctcaccagaacgatggctgactggcgaccaagcactgctcacggctcgacgtcgatgtatgctgagttttatgcgcggtccaagagcgtgtatcggtatgcatctcgctaatgccgagatggccgtactcattgccgctatggccaggtgggatatgcagctctacgagactacggcacgagatgttgagtttctgcatgactatcatgtcttatgtccgaggcttgactccaagggcgttagagtcactgtgaataagtctctagactgaagatcaagctagagtggatgcacaattactagtatttgtaaagcggcatctcgaaatgacacttgtgtttccacgaacttcatttctataggagtgacgttatgtctctttggatgtgaagtcaggtcatgtacgatattgcattgtggaagattatagctttgtgtgtgtgtgaggcgggaatgctatcaatggcttgagtgccattggccattcccaagcctctgttttttcgtattatcctccctttaggcgaggcacattattatgtggagaaataacgagtagagcttgaatatgtttaggttttcattacgcgtacctcacaaaatcacaatcatccacgatcataatagttatcaaatgtgcaattgtactgctggtgattgatactacagaattgtgaaaacgtcttgctacagttttgaaagatttccatctagcaatgagatgaatttaagtgtcgacttgctctttcctagagcctagaagcgacgctggagtggtattgtgatattcttaaagcaaagtgcaacttcccatcggtatgaacaccagacacctatacgcctataccttacccgtcattatggagcaacctacgccagacgattattcatgtgacttcagtatcataccctaccctcgcgttgatgcccgatagccacactttacaaaatgatttccctcgtgtccttgacttggccctcactagggcaataagggcacttatacctagtccccttagccaacttcatcaagctctccctcgccaggacatgaccacagggtagtatcataggcggattggcatccgtggtctgctctttgctgaccggacagacgaatatagaatgatacatcatgctgtttggaagcggcgtctcgaacgcgagttcattctgagtcgtccattccgtattcttctccttcaccatgctgttgtacttgactagataaggcagtgccaaggcgccagcagtcgctgtaacgtagagcggtgattcggcggagagaccgagtagggagcagaattccctagtgaacgagccagagacctcgtcgaaggccagcgtgatgtcaaagatagtgcggtatggcgactcggcgagattcgaagagtacaccatagcgcacgaaaggcgttggatctcgcgcagatgacgctgctggaagtgtgggaagttatcccgaccatatttcaaagcccccgagatcccattatccgctgtatccggcatgccattaactaccgcccctttgaataaccatataaattgcagcttgcagagttcgaactccagatttgaaccacgtgcttcgagttccgccgaattgtccctagcccaagtgatggcagggtgaagatcatggtgttttaaggagttgagtatcgagtacatatcggcgaacttctcttgcaactctctagactgcagtgccgtcaagtctgccgggatatctgcatctgttatcatggcatccggaggcgtattggggcgggtgggcgtctcatcacgatcgtatggcgaaggcacttgaaatgggcttaggtactcggtctggtcggcccctggcccgttctgtggttgcgcttcttctataaacgtagatgccactccaaactgcccctcgcgcaagaaatgcattgccacagcccgattaatcaacggtgtttgtgactgcataggatcgtgatctgtcggtaatttccccttcatcttggcaaatgccttgttctgcaagatcttgccaaaggcattctggctcttatgtacgcgcatgatgtcgttattgatcgcatcaagctgggcgctgacaggattgaggagcttcgtaagagtcatggtcgtcgtgtgaggatcgttggcttcgtggaaatcgttagcaagctctatcgtaacgcaagcaagatcctaactatcgagcaatccttacctgcggccacttcttccctcgctctcacgaggatttcgattagcttgtctgcatcgttgacggcctctgatagctttgcccctttcttgaacttggccagttccgtctccagaagtacagcgggggactgtgagtccatgctccttaaccgtgggcggagagagcggatataggcgcagttatagttgaagcccgcttccctgagcaatgactaagtcctcactatagggaagagggagctggtctggaatacgatagtcgccggagctacgagattccgataagagtcaactgtaacaccaccttcaatcgaggcttccgacttgattatcctctgagtgccaaggagttttctataactttgagtcgtccgttattagcttggaaataagatattaagcttgaacttggagaaggcagctgtcgttgaagatcaatgctcagcgcttgctggatgattcacatgaataggtagtgacgatggcagggttcgggtgtcgtcgggtatggacattcaaggatcttttgtcttggacggtgaaggtgcgatatggaacgaatggggtgttcaaaagcagttttcacagtcacgaggcaatacaatggagaacgctgagaagctgcgagccgactctcctagtacttcaagctattgtaaggtgggaggtttgacgacagtccggtgaggttggagacaac

SEQ ID NO: 26418 - DNA, 1338 bp, Muscodor strobelii
  misc_feature: SGI cDNA ID NO. 569035
  misc_feature: Encodes the peptide sequence at SEQ ID NO 26419
atggactcacagtcccccgctgtacttctggagacggaactggccaagttcaagaaaggggcaaagctatcagaggccgtcaacgatgcagacaagctaatcgaaatcctcgtgagagcgagggaagaagtggccgcagccaacgatcctcacacgacgaccatgactcttacgaagctcctcaatcctgtcagcgcccagcttgatgcgatcaataacgacatcatgcgcgtacataagagccagaatgcctttggcaagatcttgcagaacaaggcatttgccaagatgaaggggaaattaccgacagatcacgatcctatgcagtcacaaacaccgttgattaatcgggctgtggcaatgcatttcttgcgcgaggggcagtttggagtggcatctacgtttatagaagaagcgcaaccacagaacgggccaggggccgaccagaccgagtacctaagcccatttcaagtgccttcgccatacgatcgtgatgagacgcccacccgccccaatacgcctccggatgccatgataacagatgcagatatcccggcagacttgacggcactgcagtctagagagttgcaagagaagttcgccgatatgtactcgatactcaactccttaaaacaccatgatcttcaccctgccatcacttgggctagggacaattcggcggaactcgaagcacgtggttcaaatctggagttcgaactctgcaagctgcaatttatatggttattcaaaggggcggtagttaatggcatgccggatacagcggataatgggatctcgggggctttgaaatatggtcgggataacttcccacacttccagcagcgtcatctgcgcgagatccaacgcctttcgtgcgctatggtgtactcttcgaatctcgccgagtcgccataccgcactatctttgacatcacgctggccttcgacgaggtctctggctcgttcactagggaattctgctccctactcggtctctccgccgaatcaccgctctacgttacagcgactgctggcgccttggcactgccttatctagtcaagtacaacagcatggtgaaggagaagaatacggaatggacgactcagaatgaactcgcgttcgagacgccgcttccaaacagcatgatgtatcattctatattcgtctgtccggtcagcaaagagcagaccacggatgccaatccgcctatgatactaccctgtggtcatgtcctggcgagggagagcttgatgaagttggctaaggggactaggtataagtgcccttattgccctagtgagggccaagtcaaggacacgagggaaatcattttgtaa

SEQ ID NO: 26419 - protein, 445 aa, Muscodor strobelii
  misc_feature: SGI Peptide ID NO. 569035
  misc_feature (1)..(444): NCBI GI: 261358674 Blast Desc: conserved [Verticillium albo-atrum VaMs.102]
  misc_feature (1)..(445): NCBI GI: 171694886 Blast Desc: protein product [Podospora anserina] gi|170947685|emb|CAP59847.1| protein product [Podospora anserina]
  misc_feature (2)..(445): NCBI GI: 256735476 Blast Desc: [Nectria haematococca mpVI 77-13-4]
  misc_feature (2)..(445): NCBI GI: 46107664 Blast Desc: FG00715.1 [Gibberella zeae PH-1]
  misc_feature (9)..(445): NCBI GI: 154295370 Blast Desc: BC1G_13266 [Botryotinia fuckeliana B05.10] gi|150844133|gb|EDN19326.1| BC1G_13266 [Botryotinia fuckeliana B05.10]
  misc_feature (1)..(445): NCBI GI: 85115087 Blast Desc: NCU00898 [Neurospora crassa OR74A] gi|28926608|gb|EAA35578.1| conserved [Neurospora crassa OR74A] gi|38636465|emb|CAE82000.1| conserved [Neurospora crassa]
  misc_feature (9)..(445): NCBI GI: 240111118 Blast Desc: CPC735_069530 [Coccidioides posadasii C735 delta SOWgp]
  misc_feature (10)..(425): NCBI GI: 145614606 Blast Desc: MGG_04518 [Magnaporthe grisea 70-15] gi|145021508|gb|EDK05637.1| MGG_04518 [Magnaporthe grisea 70-15]
  misc_feature (9)..(445): NCBI GI: 212540148 Blast Desc: regulator of gluconeogenesis Rmd5, [Penicillium marneffei ATCC 18224] gi|210067528|gb|EEA21620.1| regulator of gluconeogenesis Rmd5, [Penicillium marneffei ATCC 18224]
  misc_feature (9)..(445): NCBI GI: 261188252 Blast Desc: conserved [Ajellomyces dermatitidis SLH14081] gi|239593289|gb|EEQ75870.1| conserved [Ajellomyces dermatitidis SLH14081]
MDSQSPAVLLETELAKFKKGAKLSEAVNDADKLIEILVRAREEVAAANDPHTTTMTLTKLLNPVSAQLDAINNDIMRVHKSQNAFGKILQNKAFAKMKGKLPTDHDPMQSQTPLINRAVAMHFLREGQFGVASTFIEEAQPQNGPGADQTEYLSPFQVPSPYDRDETPTRPNTPPDAMITDADIPADLTALQSRELQEKFADMYSILNSLKHHDLHPAITWARDNSAELEARGSNLEFELCKLQFIWLFKGAVVNGMPDTADNGISGALKYGRDNFPHFQQRHLREIQRLSCAMVYSSNLAESPYRTIFDITLAFDEVSGSFTREFCSLLGLSAESPLYVTATAGALALPYLVKYNSMVKEKNTEWTTQNELAFETPLPNSMMYHSIFVCPVSKEQTTDANPPMILPCGHVLARESLMKLAKGTRYKCPYCPSEGQVKDTREIIL

SEQ ID NO: 26420 - DNA, 3950 bp, Muscodor strobelii
  misc_feature: SGI EST ID NO. CUFF.62521.1
  misc_feature: Variant of the nucleotide sequence at SEQ ID NO 26418
caaacctcccaccttacaatagcttgaagtactaggagagtcggctcgcagcttctcagcgttctccattgtattgcctcgtgactgtgaaaactgcttttgaacaccccattcgttccatatcgcaccttcaccgtccaagacaaaagatccttgaatgtccatacccgacgacacccgaaccctgccatcgtcactacctattcatgtgaatcatccagcaagcgctgagcattgatcttcaacgacagctgccttctccaagttcaagcttaatatcttatttccaagctaataacggacgactcaaagttatagaaaactccttggcactcagaggataatcaagtcggaagcctcgattgaaggtggtgttacagttgactcttatcggaatctcgtagctccggcgactatcgtattccagaccagctccctcttccctatagtgaggacttagtcattgctcagggaagcgggcttcaactataactgcgcctatatccgctctctccgcccacggttaaggagcatggactcacagtcccccgctgtacttctggagacggaactggccaagttcaagaaaggggcaaagctatcagaggccgtcaacgatgcagacaagctaatcgaaatcctcgtgagagcgagggaagaagtggccgcagccaacgatcctcacacgacgaccatgactcttacgaagctcctcaatcctgtcagcgcccagcttgatgcgatcaataacgacatcatgcgcgtacataagagccagaatgcctttggcaagatcttgcagaacaaggcatttgccaagatgaaggggaaattaccgacagatcacgatcctatgcagtcacaaacaccgttgattaatcgggctgtggcaatgcatttcttgcgcgaggggcagtttggagtggcatctacgtttatagaagaagcgcaaccacagaacgggccaggggccgaccagaccgagtacctaagcccatttcaagtgccttcgccatacgatcgtgatgagacgcccacccgccccaatacgcctccggatgccatgataacagatgcagatatcccggcagacttgacggcactgcagtctagagagttgcaagagaagttcgccgatatgtactcgatactcaactccttaaaacaccatgatcttcaccctgccatcacttgggctagggacaattcggcggaactcgaagcacgtggttcaaatctggagttcgaactctgcaagctgcaatttatatggttattcaaaggggcggtagttaatggcatgccggatacagcggataatgggatctcgggggctttgaaatatggtcgggataacttcccacacttccagcagcgtcatctgcgcgagatccaacgcctttcgtgcgctatggtgtactcttcgaatctcgccgagtcgccataccgcactatctttgacatcacgctggccttcgacgaggtctctggctcgttcactagggaattctgctccctactcggtctctccgccgaatcaccgctctacgttacagcgactgctggcgccttggcactgccttatctagtcaagtacaacagcatggtgaaggagaagaatacggaatggacgactcagaatgaactcgcgttcgagacgccgcttccaaacagcatgatgtatcattctatattcgtctgtccggtcagcaaagagcagaccacggatgccaatccgcctatgatactaccctgtggtcatgtcctggcgagggagagcttgatgaagttggctaaggggactaggtataagtgcccttattgccctagtgagggccaagtcaaggacacgagggaaatcattttgtaaagtgtggctatcgggcatcaacgcgagggtagggtatgatactgaagtcacatgaataatcgtctggcgtaggttgctccataatgacgggtaaggtataggcgtataggtgtctggtgttcataccgatgggaagttgcactttgctttaagaatatcacaataccactccagcgtcgcttctaggctctaggaaagagcaagtcgacacttaaattcatctcattgctagatggaaatctttcaaaactgtagcaagacgttttcacaattctgtagtatcaatcaccagcagtacaattgcacatttgataactattatgatcgtggatgattgtgattttgtgaggtacgcgtaatgaaaacctaaacatattcaagctctactcgttatttctccacataataatgtgcctcgcctaaagggaggataatacgaaaaaacagaggcttgggaatggccaatggcactcaagccattgatagcattcccgcctcacacacacacaaagctataatcttccacaatgcaatatcgtacatgacctgacttcacatccaaagagacataacgtcactcctatagaaatgaagttcgtggaaacacaagtgtcatttcgagatgccgctttacaaatactagtaattgtgcatccactctagcttgatcttcagtctagagacttattcacagtgactctaacgcccttggagtcaagcctcggacataagacatgatagtcatgcagaaactcaacatctcgtgccgtagtctcgtagagctgcatatcccacctggccatagcggcaatgagtacggccatctcggcattagcgagatgcataccgatacacgctcttggaccgcgcataaaactcagcatacatcgacgtcgagccgtgagcagtgcttggtcgccagtcagccatcgttctggtgagaactcccagggcgatgggaagatgtcctcattggtgtggatgagtagcgttgaggcacttagggatgtccccggtgggaaagagtagcttcgttcttgaccgttgacttggtgagagtatatgatggctttgtcgggacatacacgtggattccgaccggttagcccgaatgtgagtctgtgtgcttcctgtatgatggcagacagataggggagcttttgcagccgagaggctgttgttgctatctctttgtgcgctttcaattctgtccgcaacttgctcatgatatcgggacgggtaaggagatggtagtgtgcggtaactagtgacagcatcggcgagtatgtgcctgccatgatcataagcgtggcttcatcttcgagtctttgcgctgatttctcggaagctgggagatccgagttgtcacggagatgtgtgaatatggaagggatttcggaaggcgatggtttagtgttgaggattcggtcgatatctgagcgtatcttggatcggaagctcatcatatctcgtacgcctggtggtgtcattccagaacggatgttgtctgggagaagctgtaatatgtcacggatccagccaaaatggagcatgatcttaacgctgctgagaacaccggcaacattcgtccgccgggcattagctagttggagatcatcgagtgtattggcaccgctgccaaaacagtactcatggatgatactaagtttggtaagtcagttggtctgttgctacatccggtcgcagttatcgggaagcatactcattggaaaaggcgaagtacacatcagacagattcagaacttgtccctctgcctgagcctcgtcaaattgggtttcaacctgcgcagccttggcctcgagtagtgaatcaagctggctcatccgttgagatgaaaagaagggattcagggcttcacgccgcctttggtgtaggtcatgggctattgatccacccactgatgaatcgacctccgagtgccttgttcttttcgtgatctttatcgcgtttgtgccctggtccaggcgcgtatatggtgtcaacgaagtctggatctgctatggagacatcgttgggaccaattctgacaacgggtcctggtatttcctgcggttagat

SEQ ID NO: 26421 - DNA, 2649 bp, Muscodor strobelii
  misc_feature: SGI cDNA ID NO. 569036
  misc_feature: Reduced expression when VOC is produced
  misc_feature: Encodes the peptide sequence at SEQ ID NO 26422
atggcgttgcgcattcctgcttcctacggtcatgatcccagaccccaccgcgacgaagatggctctctttccaagcccgcatcgcacagaggcggcgcccactcctctcagcacgacagttccgtagcgccttccgaatcgcgaccctccttttcttccgagagacctccgtcacccctcccggaccgccgccatgtcgtgataccagaccccgttgctttcaaatacttggaagaagacaaatccgtggccatcgtcgaacgcaaggccgagctcacgggctacgaactatacctagtagagcaatgggcctgttcgcggcaatcgcccaccctcgtgatcgtcaccttcaccggagatgccagacatagcgtcgttgtcggcgtgctgtccgtgcctgcagatgacaaagcgtggtctcctcggttacgtgtatacttcaaggccatacaacaatatcatgccagacccaaggagacagagttgggcgagttgatggtcacaaacctgagcagcttcccttctgccctaaccgtcattcctgtgccagggggtaatattaagaaccaacgacggatattcatagtcaacgaggatttaaagagactaggctgttcagggcggtcgggcatgaccttatccaagcctacaccaactaccgaggccaagtttcaacagctatacaagacggacgataaagtatcagtagatgaagctgtcatcgaactagtcaagctctgccaagttgctctttcccttttcggaaaccttgactccgtctatatagatggtttgttatgtgatgtcacagaaactgctattggtgattggtggacggagtttggagtcgagtatttcaacatggaacctactgatggcatcttgggtccaacaacagtggctgccctactgggtctgctaatgggagcaagaaaccggctgagttacttgagtgcccctgttcccaaggatgtgtttgacatcgacacaaccgaacgagggatctcctcgttccagaagtacaataaactggaacgaactcgaaaactcgatagacagacgatgcatagactgcatgctgttacagcgaaagcagcggccggcgaaggatggggtgtccagaaggcagtcaaatcgacgatgacggaaataggaggcaaaagaggtgaaatcgtcctcggcatggtcagtggccgcgacaagggtgctatcggtgacatcgagactgtcgatctcgataggtttatcagcctactttctggagaccgtgcaaaatggctctggtatggaaaagcaaaacgggcaccagcctttgagcacgagaagtccggacccgatatgattctgtacggaaaggaagatgcgtcggccccgcttgaagacgacagtgaaaggcgacgcaaagaggaaacaccaccaatatactctgtaccgactcatggatcagcagttagtatagcggacagcccaggtgacagagatgcactgcgacgaggagtattcaagaacgtcgcccgtgatgctcgatcaggtttcagacagattaaagacgtggtcacgagcggcggtggcctccgtggccacggttccaaattatcaagggatgagtacagcgaatcaggcccaccttcagtcttgacgggatctccaggaggtttggtcagcagtcccgggccactccccaactccacgcagatcaaccgagcgttcacttggaagaacaagcccgaggaatatttaagtgcaatgaacaaggatagagacgtttcggcaccagcagctctttctgcggcaccatctttggatgaagctccacctcgcgaatccttgaacctcccacgaagtagtaacatttcattgaaaggagccaacattgaaaagcaacgcacctctcaaataattgtgcctgtcgaagctctcttgacagagtctgtgaaagccgagagtttaacgggaggtgaaaacgagaagtcgtcagatagaagtcctggctcacatacatcggtaccacatttacgccgccgccacagcgctggtaccccccagactttaggcatcgatgaacttaaggaagctcgatgggcgcgaaggttgtcatttgccgatgccgaagatgctatcctacaatggaaagagatagcagattttacagacctcgaaaacgcaggtacaatggataacacgataggcctcctcgaatgcgcacaaaacatgtatatgaacatcgagtatttcgacaacaaactcgagccgtgggttagcgggaaagttcaactcgtagatgacatcaacgaggcctacacacagcaattcgacgagctacaatctctatattcagaagtccaactcaagtacgaaagagctcatcacgaaagccgaagtgttctcgcagatcataaagagcacctacaagaggccgtcaacggacttgaaggcgagtcggcgaagttagaatacgagatcacagctttgatgtctaaagtggaggatgtcgaagacgccgcggctcagttcgagatacaggtccaggaaatggaaaagagggccgatgagctcaaaggcgtgctcgagaaggagagttggttgcattgggccgtcagaacgctcacaggcattggcactgggccgaatattacgagggccagatga

SEQ ID NO: 26422 - protein, 882 aa, Muscodor strobelii
  misc_feature: SGI Peptide ID NO. 569036
  misc_feature (1)..(882): NCBI GI: 171694884 Blast Desc: protein product [Podospora anserina] gi|170947684|emb|CAP59846.1| protein product [Podospora anserina]
  misc_feature (62)..(880): NCBI GI: 85115083 Blast Desc: NCU00897 [Neurospora crassa OR74A] gi|28926607|gb|EAA35577.1| conserved [Neurospora crassa OR74A] gi|38636466|emb|CAE82001.1| related to SIN3 protein-binding STB2
  misc_feature (1)..(881): NCBI GI: 256734763 Blast Desc: NECHADRAFT_75355 [Nectria haematococca mpVI 77-13-4]
  misc_feature (1)..(863): NCBI GI: 116182576 Blast Desc: CHGG_01916 [Chaetomium globosum CBS 148.51] gi|88186213|gb|EAQ93681.1| CHGG_01916 [Chaetomium globosum CBS 148.51]
  misc_feature (57)..(881): NCBI GI: 46107666 Blast Desc: FG00716.1 [Gibberella zeae PH-1]
  misc_feature (63)..(878): NCBI GI: 39945070 Blast Desc: MGG_04517 [Magnaporthe grisea 70-15] gi|145021509|gb|EDK05638.1| MGG_04517 [Magnaporthe grisea 70-15]
  misc_feature (16)..(882): NCBI GI: 156054933 Blast Desc: SS1G_06313 [Sclerotinia sclerotiorum 1980] gi|154704093|gb|EDO03832.1| SS1G_06313 [Sclerotinia sclerotiorum 1980]
  misc_feature (18)..(865): NCBI GI: 261188254 Blast Desc: Sin3 complex subunit Stb2 [Ajellomyces dermatitidis SLH14081] gi|239593290|gb|EEQ75871.1| Sin3 complex subunit Stb2 [Ajellomyces dermatitidis SLH14081]
  misc_feature (18)..(865): NCBI GI: 239609304 Blast Desc: Sin3 complex subunit [Ajellomyces dermatitidis ER-3]
  misc_feature (57)..(865): NCBI GI: 225680695 Blast Desc: conserved [Paracoccidioides brasiliensis Pb03]
  misc_feature: Useful for introducing or modulating the production of volatile compounds
MALRIPASYGHDPRPHRDEDGSLSKPASHRGGAHSSQHDSSVAPSESRPSFSSERPPSPLPDRRHVVIPDPVAFKYLEEDKSVAIVERKAELTGYELYLVEQWACSRQSPTLVIVTFTGDARHSVVVGVLSVPADDKAWSPRLRVYFKAIQQYHARPKETELGELMVTNLSSFPSALTVIPVPGGNIKNQRRIFIVNEDLKRLGCSGRSGMTLSKPTPTTEAKFQQLYKTDDKVSVDEAVIELVKLCQVALSLFGNLDSVYIDGLLCDVTETAIGDWWTEFGVEYFNMEPTDGILGPTTVAALLGLLMGARNRLSYLSAPVPKDVFDIDTTERGISSFQKYNKLERTRKLDRQTMHRLHAVTAKAAAGEGWGVQKAVKSTMTEIGGKRGEIVLGMVSGRDKGAIGDIETVDLDRFISLLSGDRAKWLWYGKAKRAPAFEHEKSGPDMILYGKEDASAPLEDDSERRRKEETPPIYSVPTHGSAVSIADSPGDRDALRRGVFKNVARDARSGFRQIKDVVTSGGGLRGHGSKLSRDEYSESGPPSVLTGSPGGLVSSPGPLPNSTQINRAFTWKNKPEEYLSAMNKDRDVSAPAALSAAPSLDEAPPRESLNLPRSSNISLKGANIEKQRTSQIIVPVEALLTESVKAESLTGGENEKSSDRSPGSHTSVPHLRRRHSAGTPQTLGIDELKEARWARRLSFADAEDAILQWKEIADFTDLENAGTMDNTIGLLECAQNMYMNIEYFDNKLEPWVSGKVQLVDDINEAYTQQFDELQSLYSEVQLKYERAHHESRSVLADHKEHLQEAVNGLEGESAKLEYEITALMSKVEDVEDAAAQFEIQVQEMEKRADELKGVLEKESWLHWAVRTLTGIGTGPNITRAR

SEQ ID NO: 26423 - DNA, 3395 bp, Muscodor strobelii
  misc_feature: SGI EST ID NO. CUFF.62395.0
  misc_feature: Variant of the nucleotide sequence at SEQ ID NO 26421
cacccatctcatgatcttaagcctaagcaaaccagggccacattgcttcataggtattgaacggatatctatgggattcattcattgaaatatgtatataatattctccaaaccattgcactggacagatgtaatccgcaaactgcgacatagaagggatccaatgatcggtcttatcaagctccgaccggttggttcttggttcatggcacgctcgacattgaagtttgccaactagttcagttgaaacggagcaagcatttacgggggaggatgacgcactgataggttgttcatgcgccaagatcaacatctcccattgcttcaggggtctttggttacatcgtccacacctccgagatctttgccagcattacgaggaggacttattaataaggacttctttgttcatcacatgccaatacttagcttcgggaggagctggaattcgagtagctagaaacatcttgcctcagactcctatgcctcgacttatcactccatcgccatctatgcttcccacatcatgaacccgccgtcatccccgtctgtggtacatggagtgagccatggcgttgcgcattcctgcttcctacggtcatgatcccagaccccaccgcgacgaagatggctctctttccaagcccgcatcgcacagaggcggcgcccactcctctcagcacgacagttccgtagcgccttccgaatcgcgaccctccttttcttccgagagacctccgtcacccctcccggaccgccgccatgtcgtgataccagaccccgttgctttcaaatacttggaagaagacaaatccgtggccatcgtcgaacgcaaggccgagctcacgggctacgaactatacctagtagagcaatgggcctgttcgcggcaatcgcccaccctcgtgatcgtcaccttcaccggagatgccagacatagcgtcgttgtcggcgtgctgtccgtgcctgcagatgacaaagcgtggtctcctcggttacgtgtatacttcaaggccatacaacaatatcatgccagacccaaggagacagagttgggcgagttgatggtcacaaacctgagcagcttcccttctgccctaaccgtcattcctgtgccagggggtaatattaagaaccaacgacggatattcatagtcaacgaggatttaaagagactaggctgttcagggcggtcgggcatgaccttatccaagcctacaccaactaccgaggccaagtttcaacagctatacaagacggacgataaagtatcagtagatgaagctgtcatcgaactagtcaagctctgccaagttgctctttcccttttcggaaaccttgactccgtctatatagatggtttgttatgtgatgtcacagaaactgctattggtgattggtggacggagtttggagtcgagtatttcaacatggaacctactgatggcatcttgggtccaacaacagtggctgccctactgggtctgctaatgggagcaagaaaccggctgagttacttgagtgcccctgttcccaaggatgtgtttgacatcgacacaaccgaacgagggatctcctcgttccagaagtacaataaactggaacgaactcgaaaactcgatagacagacgatgcatagactgcatgctgttacagcgaaagcagcggccggcgaaggatggggtgtccagaaggcagtcaaatcgacgatgacggaaataggaggcaaaagaggtgaaatcgtcctcggcatggtcagtggccgcgacaagggtgctatcggtgacatcgagactgtcgatctcgataggtttatcagcctactttctggagaccgtgcaaaatggctctggtatggaaaagcaaaacgggcaccagcctttgagcacgagaagtccggacccgatatgattctgtacggaaaggaagatgcgtcggccccgcttgaagacgacagtgaaaggcgacgcaaagaggaaacaccaccaatatactctgtaccgactcatggatcagcagttagtatagcggacagcccaggtgacagagatgcactgcgacgaggagtattcaagaacgtcgcccgtgatgctcgatcaggtttcagacagattaaagacgtggtcacgagcggcggtggcctccgtggccacggttccaaattatcaagggatgagtacagcgaatcaggcccaccttcagtcttgacgggatctccaggaggtttggtcagcagtcccgggccactccccaactccacgcagatcaaccgagcgttcacttggaagaacaagcccgaggaatatttaagtgcaatgaacaaggatagagacgtttcggcaccagcagctctttctgcggcaccatctttggatgaagctccacctcgcgaatccttgaacctcccacgaagtagtaacatttcattgaaaggagccaacattgaaaagcaacgcacctctcaaataattgtgcctgtcgaagctctcttgacagagtctgtgaaagccgagagtttaacgggaggtgaaaacgagaagtcgtcagatagaagtcctggctcacatacatcggtaccacatttacgccgccgccacagcgctggtaccccccagactttaggcatcgatgaacttaaggaagctcgatgggcgcgaaggttgtcatttgccgatgccgaagatgctatcctacaatggaaagagatagcagattttacagacctcgaaaacgcaggtacaatggataacacgataggcctcctcgaatgcgcacaaaacatgtatatgaacatcgagtatttcgacaacaaactcgagccgtgggttagcgggaaagttcaactcgtagatgacatcaacgaggcctacacacagcaattcgacgagctacaatctctatattcagaagtccaactcaagtacgaaagagctcatcacgaaagccgaagtgttctcgcagatcataaagagcacctacaagaggccgtcaacggacttgaaggcgagtcggcgaagttagaatacgagatcacagctttgatgtctaaagtggaggatgtcgaagacgccgcggctcagttcgagatacaggtccaggaaatggaaaagagggccgatgagctcaaaggcgtgctcgagaaggagagttggttgcattgggccgtcagaacgctcacaggcattggcactgggccgaatattacgagggccagatgagacctacgatgtgctcttgatactgtcgcgtggcacgagaagtttgccgcgtctaggtagacttgagtcatgtttctggtacaggcaaagaaggcgaaaagataaacatattgctgcttcttgtaaagatagataccccgatagcgtaattgacaaaatatgtgtctacactttccg

SEQ ID NO: 26424 - DNA, 1590 bp, Muscodor strobelii
  misc_feature: SGI cDNA ID NO. 569037
  misc_feature: Reduced expression when VOC is produced
  misc_feature: Encodes the peptide sequence at SEQ ID NO 26425
atgaggccatttaccagagctgtcaccgcccgggggctcgcccgccacactggacggcgagctctagacatgcgtacgcgcgctttactcatccccctccgaacaattaacaccgagacacactcgaatagccactccggtggtcctccacccggctttaatgcagaacaggctaagaaaccgctccccaaggctgagtcgcaggcgaccaccaagaagccatcagagacaaagaccgaggcggacgccaagaccgcaacgccaaaccagcccacagtgccgtctgtaggcgaaccctctgctgagcccaagtccctcaccgaactggccgcaaaaaaggaggagacaattcagaagacggaggaaaagcaagccaagaagctcacccttgggcaacggataaaacacgaaatccagcactactgggacggcaccaagctgctcggcaccgagatcaagatcagcagcaaattggcactgaagatggctgctggttacgagctgacaagacgcgagaaccgacaattgcaacgcaccgtccaagatcttggtcgtctagtaccattctcggtgttcatcatagtaccattcgccgaagcattgttacccatcgctctacgactcttccccaacttattacccagcacctacgagggtcaacagtccaaagacaaaaaggcagccacgctcagagcgactcgcaaggaggtcagctctttcttgcgcgacacactcaaagagaccggcttgcccttgtcggcagccacaacacagaaggaggagtttgctactttcttccgcaaattgcgagccaccggtgaaaagcccagcacagacgacgtcatcaaagtctctaagacatttagagatgatctcacactggacaatctgtcaagattccagttacagtctatctgccgctatttgaacttgaatacttttggtaccgacaccatgctgcgatatcagatccgacacaggatgcgccaaatcaagagggacgataaggcgatcagttttgaaggagtagacagtctcaatgtcggagagttgcagacagcatgcgctagccgaggtatcaagacacatacagtttcacccagcaggttgcgcgaggaccttcagtcctggttagacttgcgtttgaagcatggtgttccctctacgctcttagtcttgagcaatgcctacatgtacagccaaaaggctgacgagggtggtttccacagccaaatcgaggcactcaccggtgtactgtcctcgattcccgaggaattataccacgagattgaactcgaggtgcacaatgccgaaggtgctgctaccaacaagcagcgtctcgacgtcctcaaggagcagcaagagctcatcgaggaagagaacgagcaagaccaggaaagccaagacagtggcatggctacacccaaagacgtcgaagatatcgacgagaaagaggaccgacaattggcagctgcggaaaaggggctcgaccaggaagtggtcggtgaggccgttgacgcagaggctgaccaagcacaggccaagaagactgcgcctgatgcccccgagtccaagaaagttgagaactag

SEQ ID NO: 26425 - protein, 529 aa, Muscodor strobelii
  misc_feature: SGI Peptide ID NO. 569037
  misc_feature (127)..(394): Pfam Id: PF07766 Pfam Desc: LETM1-like protein
  misc_feature (2)..(508): NCBI GI: 145615934 Blast Desc: MGG_03684 [Magnaporthe grisea 70-15] gi|145009721|gb|EDJ94377.1| MGG_03684 [Magnaporthe grisea 70-15]
  misc_feature (16)..(516): NCBI GI: 116182626 Blast Desc: CHGG_01941 [Chaetomium globosum CBS 148.51] gi|88186238|gb|EAQ93706.1| CHGG_01941 [Chaetomium globosum CBS 148.51]
  misc_feature (13)..(508): NCBI GI: 85117746 Blast Desc: NCU03217 [Neurospora crassa OR74A] gi|28927124|gb|EAA36081.1| NCU03217 [Neurospora crassa OR74A]
  misc_feature (13)..(517): NCBI GI: 171694892 Blast Desc: protein product [Podospora anserina] gi|170947688|emb|CAP59850.1| protein product [Podospora anserina]
  misc_feature (4)..(525): NCBI GI: 242822621 Blast Desc: MRS7 family protein [Talaromyces stipitatus ATCC 10500] gi|218712846|gb|EED12271.1| MRS7 family protein [Talaromyces stipitatus ATCC 10500]
  misc_feature (2)..(518): NCBI GI: 46134037 Blast Desc: FG09158.1 [Gibberella zeae PH-1]
  misc_feature (4)..(486): NCBI GI: 212546687 Blast Desc: MRS7 family protein [Penicillium marneffei ATCC 18224] gi|210065017|gb|EEA19112.1| MRS7 family protein [Penicillium marneffei ATCC 18224]
  misc_feature (24)..(510): NCBI GI: 154321253 Blast Desc: BC1G_01501 [Botryotinia fuckeliana B05.10] gi|150852039|gb|EDN27231.1| BC1G_01501 [Botryotinia fuckeliana B05.10]
  misc_feature (49)..(517): NCBI GI: 121705158 Blast Desc: MRS7 family protein [Aspergillus clavatus NRRL 1] gi|119398988|gb|EAW09416.1| MRS7 family protein [Aspergillus clavatus NRRL 1]
  misc_feature (28)..(510): NCBI GI: 67524963 Blast Desc: AN2939.2 [Aspergillus nidulans FGSC A4] gi|40744334|gb|EAA63510.1| AN2939.2 [Aspergillus nidulans FGSC A4] gi|259486122|tpe|CBF83711.1| TPA: MRS7 family protein FGSC
  misc_feature: Useful for introducing or modulating the production of volatile compounds
MRPFTRAVTARGLARHTGRRALDMRTRALLIPLRTINTETHSNSHSGGPPPGFNAEQAKKPLPKAESQATTKKPSETKTEADAKTATPNQPTVPSVGEPSAEPKSLTELAAKKEETIQKTEEKQAKKLTLGQRIKHEIQHYWDGTKLLGTEIKISSKLALKMAAGYELTRRENRQLQRTVQDLGRLVPFSVFIIVPFAEALLPIALRLFPNLLPSTYEGQQSKDKKAATLRATRKEVSSFLRDTLKETGLPLSAATTQKEEFATFFRKLRATGEKPSTDDVIKVSKTFRDDLTLDNLSRFQLQSICRYLNLNTFGTDTMLRYQIRHRMRQIKRDDKAISFEGVDSLNVGELQTACASRGIKTHTVSPSRLREDLQSWLDLRLKHGVPSTLLVLSNAYMYSQKADEGGFHSQIEALTGVLSSIPEELYHEIELEVHNAEGAATNKQRLDVLKEQQELIEEENEQDQESQDSGMATPKDVEDIDEKEDRQLAAAEKGLDQEVVGEAVDAEADQAQAKKTAPDAPESKKVEN

SEQ ID NO: 26426 - DNA, 1906 bp, Muscodor strobelii
  misc_feature: SGI EST ID NO. CUFF.62404.0
  misc_feature: Variant of the nucleotide sequence at SEQ ID NO 26424
cgtcaggctattttcctcattcttccattctcatctccctggctcctacaactcaccaaatatcctcgcatcagtcaatatgaggccatttaccagagctgtcaccgcccgggggctcgcccgccacactggacggcgagctctagacatgcgtacgcgcgctttactcatccccctccgaacaattaacaccgagacacactcgaatagccactccggtggtcctccacccggctttaatgcagaacaggctaagaaaccgctccccaaggctgagtcgcaggcgaccaccaagaagccatcagagacaaagaccgaggcggacgccaagaccgcaacgccaaaccagcccacagtgccgtctgtaggcgaaccctctgctgagcccaagtccctcaccgaactggccgcaaaaaaggaggagacaattcagaagacggaggaaaagcaagccaagaagctcacccttgggcaacggataaaacacgaaatccagcactactgggacggcaccaagctgctcggcaccgagatcaagatcagcagcaaattggcactgaagatggctgctggttacgagctgacaagacgcgagaaccgacaattgcaacgcaccgtccaagatcttggtcgtctagtaccattctcggtgttcatcatagtaccattcgccgaagcattgttacccatcgctctacgactcttccccaacttattacccagcacctacgagggtcaacagtccaaagacaaaaaggcagccacgctcagagcgactcgcaaggaggtcagctctttcttgcgcgacacactcaaagagaccggcttgcccttgtcggcagccacaacacagaaggaggagtttgctactttcttccgcaaattgcgagccaccggtgaaaagcccagcacagacgacgtcatcaaagtctctaagacatttagagatgatctcacactggacaatctgtcaagattccagttacagtctatctgccgctatttgaacttgaatacttttggtaccgacaccatgctgcgatatcagatccgacacaggatgcgccaaatcaagagggacgataaggcgatcagttttgaaggagtagacagtctcaatgtcggagagttgcagacagcatgcgctagccgaggtatcaagacacatacagtttcacccagcaggttgcgcgaggaccttcagtcctggttagacttgcgtttgaagcatggtgttccctctacgctcttagtcttgagcaatgcctacatgtacagccaaaaggctgacgagggtggtttccacagccaaatcgaggcactcaccggtgtactgtcctcgattcccgaggaattataccacgagattgaactcgaggtgcacaatgccgaaggtgctgctaccaacaagcagcgtctcgacgtcctcaaggagcagcaagagctcatcgaggaagagaacgagcaagaccaggaaagccaagacagtggcatggctacacccaaagacgtcgaagatatcgacgagaaagaggaccgacaattggcagctgcggaaaaggggctcgaccaggaagtggtcggtgaggccgttgacgcagaggctgaccaagcacaggccaagaagactgcgcctgatgcccccgagtccaagaaagttgagaactagagattgtgtgaaactctagcgccctgtattacatacacctgtatcgcttctcctttgttgtataatggcactacggatagaggtttttgccagtgtgtattaaagcggaacaattgaggttactggagtagcggtcataggtatgatagaaagacaagagacagaaaattctcttctcgtgacgataacacaaaaatcatagatttgaatagacatgatcaactttactaccacgtt

SEQ ID NO: 26427 - DNA, 1422 bp, Muscodor strobelii
  misc_feature: SGI cDNA ID NO. 569038
  misc_feature: Elevated expression when VOC is produced
  misc_feature: Encodes the peptide sequence at SEQ ID NO 26428
atgcttggcttaacaccactcttgagtggtttcgctctcattactaccaccaccgcgttatacgacctccctgctcctccatctcatgcccgcgatcttcaactcattgatagggagtcggatgtggtgttgttcagaaaagaaagtacgcataatgctacgctaccgatagcttcgagtattacgaatcagaagttgttctctgggaaatggagtctaggctcggaatctctttcgttgagcttgacttgtatcgactgccataccacggggaatattatcgcatcggcgacatttccggatctgagtgatgtcgcggatgatttattgcatccgcaggatatttttgatgaatcgtccctagcgctgaactttcagggtgttggagccgtcgtggacgtagatgttacggcgagtgctacgggggattttagtattccgctttttaccagtgagagtccgattggtatttcgggtcctggatttcaggtcggagttgttttctcggtcgacttgttgattggtcttgctggggaggttgatacgacgggtggcttccagctcgctattcctgatggctcgtcgttcgttgttcctcttaatgacgataagcctaatgttgcgaacttcgatggagcacaaacaaccctcttaccattaacctcagacactgcggcaaacgtaacactcgctctacgtttcaaagtccaggccggcgtcgacctaccagatctcaaagtcatagacgcaaaagctctagcaggtgtcttcctcacactacccgagatcgatattcaagaaaccaccaatctcatcggatctacccctggatcatgcacagagtccctggcagccgagattaacattaatgccggtgccttcatcgacatcggagcaagcatagagggacaagaaattggcgaatggaatccaacagcatcgaccaccttctggtctgctggtaccactacatgtctcgctaccgcaacgggctcatcgacagctgcaccaacaacaacgggttcagcttgtccgacaaacctcgtcactcgcgcagcgaccaacacatatgacatcacaagttgcgcagtggatgttgtcaactgcccaacaagtctagcgcagacgattgttgttgagcagacaactgttacggcggcggcaagctgtgtaccgactattactgcagcggctaatacgacgatgactacgattacgacttcacgtggaaatggaaatgggacttatcctacatatgcttatggcaagaggatccccatgcctacgcctattgctatccgtgcagacggaaatgcgttgacgatcccgtttacgagtttggcaaatccagtcacgcaagacttgcctgcgttgccggacatgactgtcgtgcccattatcacggggcagccgatcgcgtga

SEQ ID NO: 26428 - protein, 473 aa, Muscodor strobelii
  misc_feature: SGI Peptide ID NO. 569038
  misc_feature (119)..(380): NCBI GI: 212539049 Blast Desc: conserved [Penicillium marneffei ATCC 18224] gi|210069422|gb|EEA23513.1| conserved [Penicillium marneffei ATCC 18224]
  misc_feature (118)..(373): NCBI GI: 256720765 Blast Desc: NECHADRAFT_101767 [Nectria haematococca mpVI 77-13-4]
  misc_feature (119)..(389): NCBI GI: 242819763 Blast Desc: conserved [Talaromyces stipitatus ATCC 10500] gi|218713848|gb|EED13272.1| conserved [Talaromyces stipitatus ATCC 10500]
  misc_feature (72)..(302): NCBI GI: 154323668 Blast Desc: BC1G_00233 [Botryotinia fuckeliana B05.10] gi|150842462|gb|EDN17655.1| BC1G_00233 [Botryotinia fuckeliana B05.10]
  misc_feature (80)..(294): NCBI GI: 156056965 Blast Desc: SS1G_04213 [Sclerotinia sclerotiorum 1980] gi|154701999|gb|EDO01738.1| SS1G_04213 [Sclerotinia sclerotiorum 1980]
  misc_feature (98)..(377): NCBI GI: 169618213 Blast Desc: SNOG_12296 [Phaeosphaeria nodorum SN15] gi|111058989|gb|EAT80109.1| SNOG_12296 [Phaeosphaeria nodorum SN15]
  misc_feature (118)..(249): NCBI GI: 261356440 Blast Desc: conserved [Verticillium albo-atrum VaMs.102]
  misc_feature (118)..(405): NCBI GI: 189201047 Blast Desc: conserved [Pyrenophora tritici-repentis Pt-1C-BFP] gi|187983959|gb|EDU49447.1| conserved [Pyrenophora tritici-repentis Pt-1C-BFP]
  misc_feature (123)..(385): NCBI GI: 67526125 Blast Desc: AN3520.2 [Aspergillus nidulans FGSC A4] gi|40739891|gb|EAA59081.1| AN3520.2 [Aspergillus nidulans FGSC A4] gi|259481965|tpe|CBF75982.1| TPA: conserved [Aspergillus FGSC
  misc_feature (123)..(417): NCBI GI: 145259425 Blast Desc: An04g10140 [Aspergillus niger] gi|134074993|emb|CAK39073.1| [Aspergillus niger]
  misc_feature: Useful for introducing or modulating the production of volatile compounds
MLGLTPLLSGFALITTTTALYDLPAPPSHARDLQLIDRESDVVLFRKESTHNATLPIASSITNQKLFSGKWSLGSESLSLSLTCIDCHTTGNIIASATFPDLSDVADDLLHPQDIFDESSLALNFQGVGAVVDVDVTASATGDFSIPLFTSESPIGISGPGFQVGVVFSVDLLIGLAGEVDTTGGFQLAIPDGSSFVVPLNDDKPNVANFDGAQTTLLPLTSDTAANVTLALRFKVQAGVDLPDLKVIDAKALAGVFLTLPEIDIQETTNLIGSTPGSCTESLAAEININAGAFIDIGASIEGQEIGEWNPTASTTFWSAGTTTCLATATGSSTAAPTTTGSACPTNLVTRAATNTYDITSCAVDVVNCPTSLAQTIVVEQTTVTAAASCVPTITAAANTTMTTITTSRGNGNGTYPTYAYGKRIPMPTPIAIRADGNALTIPFTSLANPVTQDLPALPDMTVVPIITGQPIA

SEQ ID NO: 26429 - DNA, 3217 bp, Muscodor strobelii
  misc_feature: SGI EST ID NO. CUFF.62410.0
  misc_feature: Variant of the nucleotide sequence at SEQ ID NO 26427
gcaaggtatcgttggttcaactactatttcgttcctaatctccatttgttcatcctcagctatcagaattaaagagaggcagtgcgactataaaacccgcagactcgtacgattacccaattgtctatttgcccagaatccaaaacatagggataggcatgtcgttgcataacgaaccacttccgaaattagaagccgccagggcttgagccgcagctggtcccgaactgccctatatgtacagccctgtctgttttgaaaccagcctcgctccgccgcagtgccaacctagctaggttttgggggctggcttttctgccgttcgctccccggacttttgttatgtggattggagtttgcagcaacgctcggcattgtttgaagagtcgagacggagaagcaaggagactcccccggtttcttggtagaaatgcggtgttgatggaaggatctgaggaatcggggatcagacgagatggtatggatgggatgggtagtgaaaagcagggaggagtggtatataatgcttcacggccgtactgtctttttgattgattagatgatattgagaggtgtcattgtttgtttcgttatcacgttctttacgagtggtgtgtttcttttactgagtgcatgtttaagctttctctcgctcgtttgctaaagctctgaactgaaaatgcttggcttaacaccactcttgagtggtttcgctctcattactaccaccaccgcgttatacgacctccctgctcctccatctcatgcccgcgatcttcaactcattgatagggagtcggatgtggtgttgttcagaaaagaaagtacgcataatgctacgctaccgatagcttcgagtattacgaatcagaagttgttctctgggaaatggagtctaggctcggaatctctttcgttgagcttgacttgtatcgactgccataccacggggaatattatcgcatcggcgacatttccggatctgagtgatgtcgcggatgatttattgcatccgcaggatatttttgatgaatcgtccctagcgctgaactttcagggtgttggagccgtcgtggacgtagatgttacggcgagtgctacgggggattttagtattccgctttttaccagtgagagtccgattggtatttcgggtcctggatttcaggtcggagttgttttctcggtcgacttgttgattggtcttgctggggaggttgatacgacgggtggcttccagctcgctattcctgatggctcgtcgttcgttgttcctcttaatgacgataagcctaatgttgcgaacttcgatggagcacaaacaaccctcttaccattaacctcagacactgcggcaaacgtaacactcgctctacgtttcaaagtccaggccggcgtcgacctaccagatctcaaagtcatagacgcaaaagctctagcaggtgtcttcctcacactacccgagatcgatattcaagaaaccaccaatctcatcggatctacccctggatcatgcacagagtccctggcagccgagattaacattaatgccggtgccttcatcgacatcggagcaagcatagagggacaagaaattggcgaatggaatccaacagcatcgaccaccttctggtctgctggtaccactacatgtctcgctaccgcaacgggctcatcgacagctgcaccaacaacaacgggttcagcttgtccgacaaacctcgtcactcgcgcagcgaccaacacatatgacatcacaagttgcgcagtggatgttgtcaactgcccaacaagtctagcgcagacgattgttgttgagcagacaactgttacggcggcggcaagctgtgtaccgactattactgcagcggctaatacgacgatgactacgattacgacttcacgtggaaatggaaatgggacttatcctacatatgcttatggcaagaggatccccatgcctacgcctattgctatccgtgcagacggaaatgcgttgacgatcccgtttacgagtttggcaaatccagtcacgcaagacttgcctgcgttgccggacatgactgtcgtgcccattatcacggggcagccgatcgcgtgagatctttgaagggtatgaaattatgatgcatgtggcaagtctttgaatttcttgtatatagtttgtcactagctttgggcgttaccgctggtttttgggatagaggtatcgaataggaccttatagcgttttattcctgaacacagagcagttcgtgttcaagatttgaaacaatgcagttgtattgaagagtatcttgatattgggatcacaggactaagaatatgatatgtagggtacgttatcgggaatatatatcatatgatgtatttggccaatttgaaacggcatcacaatgagcatgagacttcgccttatcagcacctggatgatttcagccccaacaccctcctaatgtttctatgataggcatcccagatatcgggttattgcatgatgctaagtgtctatccatggcgccttaatgagcacgagacgtccgcttatcagtcattggcgtggggtccatccatacttatagagaaacccagtattccccagatgtgccttatcgccaattacgcatagactcgatcatgaggctcttcaggtttgcagttacaatcaagtgggcatttccaagctgtctatagacgtgttaatcttttatgatcatcgtattgacaatcgagacaccaaacaacaagctgatgttcatagtgtgttagtcctaatttttcgaaatgcgtgcgcagccaacgcttctcttgcatgcagttggtggttatacgtctcgggcagttggtcatatacagttcaacaagctgaagttcacataagcacgaaaagactatgcattcttgaagagtgccaagtgatgcatgacagacccgattacgaaaatccggtccatccggacctgtcggtgtatcgcaaaaccggaaggtcccactgatgatgtttctgaacatttcagctacgaataagggtctctcaattcttcagcatcgaagaagccctacataaaatatcgaccctatcagacaagtacctgcgttccattccattggtgcttattccccctgactcgggcagaaagtaaaaagcctctgatatcagaaaagtcatttgacaaataaagtatcatgtgcttggcagcactgttgtatcacccac

SEQ ID NO: 26430 - DNA, 1203 bp, Muscodor strobelii
  misc_feature: SGI cDNA ID NO. 569040
  misc_feature: Reduced expression when VOC is produced
  misc_feature: Encodes the peptide sequence at SEQ ID NO 26431
atggcatccatcggtccctgtctgcaacctcaccttgcgaagcggaaacgggaggaagacgaagaagcatctgcagactcaccaccagccaagatcagagtatcagacagtcccatcggcccagccagaccactgcataacacagatgaagtcgcattagatagcgacgatgatgaagatggtattggaccatcggcgccacccaagaccgcagcctctataggcccaagtctcccacctcgaaacacagacgaggtcgggttggacagcgacgacgatgacgatattgggccatctgcgccgccaccactacacagcgccagcacaaagcgctccataggaccggcgctcccgccgactgcatcgataggacctacacttccacccaccacaaatacagacgaagtcacattagacagcggtaccgacaccgactcgatgacggcccacgtccaccgctcaagagtgacctacggcccttcagcacccaccacacctctccccgagcgcccaacaaccaacgcagataccgactcagactcagactcagactacggccctgcccttccctcctcctcaacgcaacaagcccgcgccgcacacgcggcagatctagcagcccacgaagcggctaatcccaccgcgcctaaacgtgacgactggatgctcgcgccaccgccatcagaaggctaccgcgcatccgacccctcaaagataaaagcccgaaagttcaactccggaccacgcgcaagcagcggcaactcggggggagagttgagcagtatatggacagaaacgcccgaagaaaaacgcaagcgtctcgaagccgccgttctcgggcgagaaacgtcttccacctccaaatccaaccccaactctcacaaaccactatcaagagaagaacaagaacaagccgcccgtatccaatcagcaatctccgcttcccgcggcaaatccctttacgaagagcaccaagcatcccgcgaagcaaacaagagtaagaacagtgaagagaaagaacagagtagaagtggagcgaagaaggcctgggcagaggaggaggatgacgacccctcgaaacgcgcgttcgacaaggagaaagatatgaagctcggaggccgcataggcgcctcgcagagacgggagctcgttactaaggccgcggattttggtgggaggttcgctaaggggaagtttttgtag

SEQ ID NO: 26431 - protein, 400 aa, Muscodor strobelii
  misc_feature: SGI Peptide ID NO. 569040
  misc_feature (1)..(400): NCBI GI: 116181484 Blast Desc: CHGG_01370 [Chaetomium globosum CBS 148.51] gi|88185667|gb|EAQ93135.1| CHGG_01370 [Chaetomium globosum CBS 148.51]
  misc_feature (1)..(400): NCBI GI: 46108000 Blast Desc: FG00882.1 [Gibberella zeae PH-1]
  misc_feature (1)..(400): NCBI GI: 171695896 Blast Desc: protein product [Podospora anserina] gi|170948190|emb|CAP60354.1| protein product [Podospora anserina]
  misc_feature (1)..(400): NCBI GI: 154321319 Blast Desc: BC1G_01534 [Botryotinia fuckeliana B05.10] gi|150852072|gb|EDN27264.1| BC1G_01534 [Botryotinia fuckeliana B05.10]
  misc_feature (1)..(400): NCBI GI: 256735427 Blast Desc: NECHADRAFT_75256 [Nectria haematococca mpVI 77-13-4]
  misc_feature (1)..(400): NCBI GI: 85119655 Blast Desc: NCU02553 [Neurospora crassa OR74A] gi|28927496|gb|EAA36448.1| NCU02553 [Neurospora crassa OR74A]
  misc_feature (1)..(400): NCBI GI: 156054314 Blast Desc: SS1G_06005 [Sclerotinia sclerotiorum 1980] gi|154703785|gb|EDO03524.1| SS1G_06005 [Sclerotinia sclerotiorum 1980]
  misc_feature (1)..(400): NCBI GI: 261355238 Blast Desc: conserved [Verticillium albo-atrum VaMs.102]
  misc_feature (1)..(400): NCBI GI: 39950698 Blast Desc: MGG_01239 [Magnaporthe grisea 70-15] gi|145020956|gb|EDK05085.1| MGG_01239 [Magnaporthe grisea 70-15]
  misc_feature (148)..(400): NCBI GI: 226283747 Blast Desc: conserved [Paracoccidioides brasiliensis Pb01]
  misc_feature: Useful for introducing or modulating the production of volatile compounds
MASIGPCLQPHLAKRKREEDEEASADSPPAKIRVSDSPIGPARPLHNTDEVALDSDDDEDGIGPSAPPKTAASIGPSLPPRNTDEVGLDSDDDDDIGPSAPPPLHSASTKRSIGPALPPTASIGPTLPPTTNTDEVTLDSGTDTDSMTAHVHRSRVTYGPSAPTTPLPERPTTNADTDSDSDSDYGPALPSSSTQQARAAHAADLAAHEAANPTAPKRDDWMLAPPPSEGYRASDPSKIKARKFNSGPRASSGNSGGELSSIWTETPEEKRKRLEAAVLGRETSSTSKSNPNSHKPLSREEQEQAARIQSAISASRGKSLYEEHQASREANKSKNSEEKEQSRSGAKKAWAEEEDDDPSKRAFDKEKDMKLGGRIGASQRRELVTKAADFGGRFAKGKFL

SEQ ID NO: 26432 - DNA, 1442 bp, Muscodor strobelii
  misc_feature: SGI EST ID NO. CUFF.62833.0
  misc_feature: Variant of the nucleotide sequence at SEQ ID NO 26430
ccgtgatcgtcaacatctccaaggctgcattgctacctcgaagattgaacaactcccttttcacagcttcatctactcgctgcaaaagggaaaaagcctgggcaccaattcagattcttctatctccaacaacctcccatcttgaatatggcatccatcggtccctgtctgcaacctcaccttgcgaagcggaaacgggaggaagacgaagaagcatctgcagactcaccaccagccaagatcagagtatcagacagtcccatcggcccagccagaccactgcataacacagatgaagtcgcattagatagcgacgatgatgaagatggtattggaccatcggcgccacccaagaccgcagcctctataggcccaagtctcccacctcgaaacacagacgaggtcgggttggacagcgacgacgatgacgatattgggccatctgcgccgccaccactacacagcgccagcacaaagcgctccataggaccggcgctcccgccgactgcatcgataggacctacacttccacccaccacaaatacagacgaagtcacattagacagcggtaccgacaccgactcgatgacggcccacgtccaccgctcaagagtgacctacggcccttcagcacccaccacacctctccccgagcgcccaacaaccaacgcagataccgactcagactcagactcagactacggccctgcccttccctcctcctcaacgcaacaagcccgcgccgcacacgcggcagatctagcagcccacgaagcggctaatcccaccgcgcctaaacgtgacgactggatgctcgcgccaccgccatcagaaggctaccgcgcatccgacccctcaaagataaaagcccgaaagttcaactccggaccacgcgcaagcagcggcaactcggggggagagttgagcagtatatggacagaaacgcccgaagaaaaacgcaagcgtctcgaagccgccgttctcgggcgagaaacgtcttccacctccaaatccaaccccaactctcacaaaccactatcaagagaagaacaagaacaagccgcccgtatccaatcagcaatctccgcttcccgcggcaaatccctttacgaagagcaccaagcatcccgcgaagcaaacaagagtaagaacagtgaagagaaagaacagagtagaagtggagcgaagaaggcctgggcagaggaggaggatgacgacccctcgaaacgcgcgttcgacaaggagaaagatatgaagctcggaggccgcataggcgcctcgcagagacgggagctcgttactaaggccgcggattttggtgggaggttcgctaaggggaagtttttgtagttgggttgaatattggcatttgagagtggtggatgtaaataagagtgatgagttatgagatgagatgaatgatagtattatatcaaaattcc

SEQ ID NO: 26433 - DNA, 4854 bp, Muscodor strobelii
  misc_feature: SGI cDNA ID NO. 569041
  misc_feature: Encodes the peptide sequence at SEQ ID NO 26434
atgagcccgccgccggagagagaagatggactttcagctccagacatggacgacgatcagccgcagctctccaccgacggagatgacgcctccagcgacgaggacaccataagaggcgatgatcagagccacatcgccgaggttctagaggaggtcatcgaagaggatgctcaagatgctgccatcgcccttgctgaacgaggctctgtggcccagcactaccgccaggtgctcagagagcaggaggacaacacctctgacgatgcatctatggacgggctcccacggagggccggcagtcccatggaatcgctgctctccgtgccagatgactctccttccattcaggggtctatgctatcatctcctggaagctctgtcctcccatccgtagcttcacggcccggcttgagtagcccgactccctcctttcgaccctttgatcgacgcttccagtcacgcattgcttctccatctgcactatctccccgaccctcctctcccgcattcctcaacagccacagccgaaacgtatccatcatcagcagtcagttgctgctggactctggcgagaccgaaaccccctcgcccccctgggaagttgtacgatggacgaaacttaagaaactcaacggccaggccttctctgaggctgggaaacggaattttggctctcctacttgtatcaccgtgtcggcttcgattttgttaggaacctcgaagggaataatcttaatgtttgattacaaccaaaacttgaaaatgataataggcccaggaacgaaagctgtggaatcggggccagtcacggcaatcgccgtctcagcagatcataccaccataggaggtgggcatgcaaacggcaatatcttcacttgggacacaagtcgagcttctcgcccatttctctcaattcctcatttggaccaatcacagacacagcatcgaacgatcgatggccacttgccaaatgtggccgttactcaccttggcttcttggggacaagacacacagctctggtatctgcagatgagcgaggcatggctttctctcatcttgctacaagaggcacgggtgcgttgggtagaactgtcaagactgtgaggatactcggtcgttatcccgacgcacccgtacccgctaccaaaccaccaaaacctagtaccgttttggccttttcacctttgccactggggaatgtcgaacgagctacagataatatgggcttaacagctatgctcaccccttatctcctcgtcattgtttcgacaacgccagtcgctcaaactcagcacaagtcagcgaggccgaaggacgtggcaccacacagcgctatgagcggttgtctggcctggttccctgccgtcaagctgaagatacccgatccccatactggcagtaccatgtcgaaagtcaagttggtgtattgctggtcgaatgtgttgaccgtcttggacgtcgatgagatagtttccgacaataaagacaagccaccaatactgaagttcaaagctcggagtaggtggaaatgtgaagaggctatcgtcgctgttcaatggctcagtcggtcggtattgacagtcttgacgattacccaaaggttgatagtactggaggatcgttctatgaggatgacggaagcctttgacctcatctacaaacacatatatcacaaggatctgttttctacgcagcttcactccctggttgagcaactcgacgaggaagatacttcaatgcatggcgtggtggccgatgccttctacatgagtctcaaatcctacaagggccggatattccttctcggattcaatgatgtatcaattggcgcgttgtcgaattgggccgaccgactgatcgctctcatggagaatggcgattatgtcggtgccatccagctggccacctcatattacactggcgatgcgaacaaacttaccatcgggctgccagaagacacagctctgaggcatcagaccgttcgcgacaagttgatggagataatgtccgcatctctgaagtacgcgttcggtcagcgccagaagaacaattcattggtcgatgatcagcatcttcaagagcttgcagaaacctgttttgtcgcttgccagaacgtgcaggacatcgatttcctctttgatgaggcatatgagtggtatgaagatagtgacgttgaaggaatatttcttgaagtgctcgagccatatatcctggagaaaacgatcagaatggtaccaccaactgttgtcaaggccatggtcactcattatgtcagtaaaggctgggagagtcgccttgaagagatgatctgtcatatggaaaccgctactctcgacatcgaccagataacgcttctttgcaaacaacacgccctctacgacgctctcatttatgtatggaaccaggcgctaaacgactatatcacacctttaatcgacctcctcaccctcctgaaaccttacatgcagaatggtgactatggcactaacgagagcacaatggaattggagaacttcagtgttagcgctctcaagattttcccatatttgtcctataccttaacaggtagagtctatcccacgggtgaacctattgacgatgcgctcgctgagaaagcgaaagccgaaatttactggtttctcttctctggacggaatatcgcctggccgaaaagcaacgccaaagaatttcagactcgtcccgccggttcagaagaaccatcgttcccatatttgcgaatgatactaaaatttgacgctcctagtttcttgagcgcgcttaacgaagcctttgaggatcccttcttgaacagttcccaagaaaagcagcttaacggaggggctttcgaagatcttccagaagagcaaatattcggaatgactgtagaccgccagtatgtcatctccatccttcttgagatcatgaatcccgaggactttgcccctgaggacaccatttacctcgacatgttcattgcacgtaatcttccaaagttccaacaatacctcatcattccaggatccacgctcggcaagattatcggcgggctctgcaattatcctggtacagacttagccgaagacgctcaactgagtgccgagtatcttctctcagtatatcaaccccctgacatgtcagcgttgataccactgttccaaaaggctggattttttcgaatattgaaacggacttataagagcgataagcgatatggtgatttagtccaagtttacttcgaagatctcgaagaccaagaaggcgtttttgggtgtattgcagactgcctacggcctcaaacagcccttactaagaaacagacccaagacgtccacgatgttatcaggcaacatgctcacgagtttgttgacctcgaccccgtcaaagctgctcaagttctagacacatatgctccagagcttcaccgtttcgtcttggactccttagacgaaggctcggagctacaatacacgtacctgaaagccttgctggaacccgcgtcagaaggatccgagagggcagctagtgcattagaacgagatttcatcgagacatatgtgcggctcatgtgccagttcaacccggcacatgtctccacgttcgtcaacctcgttcaggcaacaaatttgcggctcgagaacttgctcccaactatggagacaacaggagtcatcgacgcggcagtgatcctcatggcgagggaaggacagatacaggatgctatgggcagactaactaaacacttattcacgcttcagtcgacactccagggcctgttgtcaggcacgagtaactacggcgaagaggtcgatgtgcaagacgtcgctgaagatatcctgaaagcattacagaaatacactcatgtgggtatttggctgtgtcaggggcagatgaagacctccaaacagcttacaactctgcaaaagcggcagacgtcgccagatcctagtgacttaacggtggaagagaacttatggctggagatgattgatgccaccgtacaaatcacgaggagactatcggggttagtctcctcgcctgatgagcagtctgaagcggaaagtgcgaatcccattccgatcctagattcggagaaactcgtcgcgctgctccggtccctcgtccaacacacatttacagccctattaaccgctacgacaacgcaagatcctcaacctcatactccgaagtcgaagaatgtgatcaatacctcgaccacaaacctcacattcctccgcatcctacgcgccttcttgtcacgggccgccgctacatcgccaaacctggcggacctaagagcggtgctcgcttcgatatttgctgcgtataaatacgaggagtcgatactcagactatcaaacaatctcctagagaagacactgttcacaaacgtgaaacaagctgtggaactccgacagcggggctggcgcccaaaaggctcaacttgcgagggttgtgggaagagggtttggggacctggtgtgtggggtgtttgggaggcctgggaggagaggaagagtcttgaggacaggagacgggcagataagacagagcaagtcgctgcgagtgcgagggcagggaagatcaatgcgggcaatgcggaagggagcaaggggaaggggaaaagtgctgaggcgcaacctgctgctgtacccgcttcccaggccgaggagggtgtaaatgggactggtgaagtgacgacgagagagaaccccgggcccctggtggtactggcttgtagacatgtgtatcataaaggttgtcttgatacgttgctggagagggatgggggagagggacagaggagtgtggatgagtttgggcgcgagaggttgaggtgtcctgttgatggatag

SEQ ID NO: 26434 - protein, 1617 aa, Muscodor strobelii
  misc_feature: SGI Peptide ID NO. 569041
  misc_feature (26)..(1617): NCBI GI: 46107998 Blast Desc: FG00881.1 [Gibberella zeae PH-1]
  misc_feature (19)..(1617): NCBI GI: 171695898 Blast Desc: protein product [Podospora anserina] gi|170948191|emb|CAP60355.1| protein product [Podospora anserina]
  misc_feature (19)..(1616): NCBI GI: 85119659 Blast Desc: NCU02554 [Neurospora crassa OR74A] gi|28927497|gb|EAA36449.1| conserved [Neurospora crassa OR74A]
  misc_feature (34)..(1617): NCBI GI: 156054312 Blast Desc: SS1G_06004 [Sclerotinia sclerotiorum 1980] gi|154703784|gb|EDO03523.1| SS1G_06004 [Sclerotinia sclerotiorum 1980]
  misc_feature (310)..(1616): NCBI GI: 145613956 Blast Desc: MGG_01238 [Magnaporthe grisea 70-15] gi|145020957|gb|EDK05086.1| MGG_01238 [Magnaporthe grisea 70-15]
  misc_feature (107)..(1607): NCBI GI: 239609373 Blast Desc: golgi complex component [Ajellomyces dermatitidis ER-3]
  misc_feature (107)..(1596): NCBI GI: 261188432 Blast Desc: golgi complex component [Ajellomyces dermatitidis SLH14081] gi|239593231|gb|EEQ75812.1| golgi complex component [Ajellomyces dermatitidis SLH14081]
  misc_feature (107)..(1600): NCBI GI: 240279794 Blast Desc: golgi complex component [Ajellomyces capsulatus H143]
  misc_feature (7)..(1615): NCBI GI: 169770977 Blast Desc: [Aspergillus oryzae RIB40] gi|83767817|dbj|BAE57956.1| protein product [Aspergillus oryzae]
  misc_feature (107)..(1600): NCBI GI: 225562973 Blast Desc: conserved [Ajellomyces capsulatus G186AR]
MSPPPEREDGLSAPDMDDDQPQLSTDGDDASSDEDTIRGDDQSHIAEVLEEVIEEDAQDAAIALAERGSVAQHYRQVLREQEDNTSDDASMDGLPRRAGSPMESLLSVPDDSPSIQGSMLSSPGSSVLPSVASRPGLSSPTPSFRPFDRRFQSRIASPSALSPRPSSPAFLNSHSRNVSIISSQLLLDSGETETPSPPWEVVRWTKLKKLNGQAFSEAGKRNFGSPTCITVSASILLGTSKGIILMFDYNQNLKMIIGPGTKAVESGPVTAIAVSADHTTIGGGHANGNIFTWDTSRASRPFLSIPHLDQSQTQHRTIDGHLPNVAVTHLGFLGTRHTALVSADERGMAFSHLATRGTGALGRTVKTVRILGRYPDAPVPATKPPKPSTVLAFSPLPLGNVERATDNMGLTAMLTPYLLVIVSTTPVAQTQHKSARPKDVAPHSAMSGCLAWFPAVKLKIPDPHTGSTMSKVKLVYCWSNVLTVLDVDEIVSDNKDKPPILKFKARSRWKCEEAIVAVQWLSRSVLTVLTITQRLIVLEDRSMRMTEAFDLIYKHIYHKDLFSTQLHSLVEQLDEEDTSMHGVVADAFYMSLKSYKGRIFLLGFNDVSIGALSNWADRLIALMENGDYVGAIQLATSYYTGDANKLTIGLPEDTALRHQTVRDKLMEIMSASLKYAFGQRQKNNSLVDDQHLQELAETCFVACQNVQDIDFLFDEAYEWYEDSDVEGIFLEVLEPYILEKTIRMVPPTVVKAMVTHYVSKGWESRLEEMICHMETATLDIDQITLLCKQHALYDALIYVWNQALNDYITPLIDLLTLLKPYMQNGDYGTNESTMELENFSVSALKIFPYLSYTLTGRVYPTGEPIDDALAEKAKAEIYWFLFSGRNIAWPKSNAKEFQTRPAGSEEPSFPYLRMILKFDAPSFLSALNEAFEDPFLNSSQEKQLNGGAFEDLPEEQIFGMTVDRQYVISILLEIMNPEDFAPEDTIYLDMFIARNLPKFQQYLIIPGSTLGKIIGGLCNYPGTDLAEDAQLSAEYLLSVYQPPDMSALIPLFQKAGFFRILKRTYKSDKRYGDLVQVYFEDLEDQEGVFGCIADCLRPQTALTKKQTQDVHDVIRQHAHEFVDLDPVKAAQVLDTYAPELHRFVLDSLDEGSELQYTYLKALLEPASEGSERAASALERDFIETYVRLMCQFNPAHVSTFVNLVQATNLRLENLLPTMETTGVIDAAVILMAREGQIQDAMGRLTKHLFTLQSTLQGLLSGTSNYGEEVDVQDVAEDILKALQKYTHVGIWLCQGQMKTSKQLTTLQKRQTSPDPSDLTVEENLWLEMIDATVQITRRLSGLVSSPDEQSEAESANPIPILDSEKLVALLRSLVQHTFTALLTATTTQDPQPHTPKSKNVINTSTTNLTFLRILRAFLSRAAATSPNLADLRAVLASIFAAYKYEESILRLSNNLLEKTLFTNVKQAVELRQRGWRPKGSTCEGCGKRVWGPGVWGVWEAWEERKSLEDRRRADKTEQVAASARAGKINAGNAEGSKGKGKSAEAQPAAVPASQAEEGVNGTGEVTTRENPGPLVVLACRHVYHKGCLDTLLERDGGEGQRSVDEFGRERLRCPVDG

SEQ ID NO: 26435 - DNA, 5645 bp, Muscodor strobelii
  misc_feature: SGI EST ID NO. CUFF.62434.0
  misc_feature: Variant of the nucleotide sequence at SEQ ID NO 26433
gtgcgacggcacgattggaacgtcgataaggccttggaagggcacagctgcagagatcctgctgaattgtgtgacacaattgtcatttggtgatcttgtctgtatcatatcctgtatgtttccggattgaacggtgtttgctatgtgagtgagattacgacgatttatagagctccatcccatactcgtagaccatccgcgctagtaatctagacagctgcctcccgagatcgaatagcgacaactgaattacgcaacgcacgatagcgaacgctcgggagtccacgacgtgactcgtgactctattctcttgctgcgatacaggagaactactctgaagcaatgcgccggatgttatctcgccgatgagcccgccgccggagagagaagatggactttcagctccagacatggacgacgatcagccgcagctctccaccgacggagatgacgcctccagcgacgaggacaccataagaggcgatgatcagagccacatcgccgaggttctagaggaggtcatcgaagaggatgctcaagatgctgccatcgcccttgctgaacgaggctctgtggcccagcactaccgccaggtgctcagagagcaggaggacaacacctctgacgatgcatctatggacgggctcccacggagggccggcagtcccatggaatcgctgctctccgtgccagatgactctccttccattcaggggtctatgctatcatctcctggaagctctgtcctcccatccgtagcttcacggcccggcttgagtagcccgactccctcctttcgaccctttgatcgacgcttccagtcacgcattgcttctccatctgcactatctccccgaccctcctctcccgcattcctcaacagccacagccgaaacgtatccatcatcagcagtcagttgctgctggactctggcgagaccgaaaccccctcgcccccctgggaagttgtacgatggacgaaacttaagaaactcaacggccaggccttctctgaggctgggaaacggaattttggctctcctacttgtatcaccgtgtcggcttcgattttgttaggaacctcgaagggaataatcttaatgtttgattacaaccaaaacttgaaaatgataataggcccaggaacgaaagctgtggaatcggggccagtcacggcaatcgccgtctcagcagatcataccaccataggaggtgggcatgcaaacggcaatatcttcacttgggacacaagtcgagcttctcgcccatttctctcaattcctcatttggaccaatcacagacacagcatcgaacgatcgatggccacttgccaaatgtggccgttactcaccttggcttcttggggacaagacacacagctctggtatctgcagatgagcgaggcatggctttctctcatcttgctacaagaggcacgggtgcgttgggtagaactgtcaagactgtgaggatactcggtcgttatcccgacgcacccgtacccgctaccaaaccaccaaaacctagtaccgttttggccttttcacctttgccactggggaatgtcgaacgagctacagataatatgggcttaacagctatgctcaccccttatctcctcgtcattgtttcgacaacgccagtcgctcaaactcagcacaagtcagcgaggccgaaggacgtggcaccacacagcgctatgagcggttgtctggcctggttccctgccgtcaagctgaagatacccgatccccatactggcagtaccatgtcgaaagtcaagttggtgtattgctggtcgaatgtgttgaccgtcttggacgtcgatgagatagtttccgacaataaagacaagccaccaatactgaagttcaaagctcggagtaggtggaaatgtgaagaggctatcgtcgctgttcaatggctcagtcggtcggtattgacagtcttgacgattacccaaaggttgatagtactggaggatcgttctatgaggatgacggaagcctttgacctcatctacaaacacatatatcacaaggatctgttttctacgcagcttcactccctggttgagcaactcgacgaggaagatacttcaatgcatggcgtggtggccgatgccttctacatgagtctcaaatcctacaagggccggatattccttctcggattcaatgatgtatcaattggcgcgttgtcgaattgggccgaccgactgatcgctctcatggagaatggcgattatgtcggtgccatccagctggccacctcatattacactggcgatgcgaacaaacttaccatcgggctgccagaagacacagctctgaggcatcagaccgttcgcgacaagttgatggagataatgtccgcatctctgaagtacgcgttcggtcagcgccagaagaacaattcattggtcgatgatcagcatcttcaagagcttgcagaaacctgttttgtcgcttgccagaacgtgcaggacatcgatttcctctttgatgaggcatatgagtggtatgaagatagtgacgttgaaggaatatttcttgaagtgctcgagccatatatcctggagaaaacgatcagaatggtaccaccaactgttgtcaaggccatggtcactcattatgtcagtaaaggctgggagagtcgccttgaagagatgatctgtcatatggaaaccgctactctcgacatcgaccagataacgcttctttgcaaacaacacgccctctacgacgctctcatttatgtatggaaccaggcgctaaacgactatatcacacctttaatcgacctcctcaccctcctgaaaccttacatgcagaatggtgactatggcactaacgagagcacaatggaattggagaacttcagtgttagcgctctcaagattttcccatatttgtcctataccttaacaggtagagtctatcccacgggtgaacctattgacgatgcgctcgctgagaaagcgaaagccgaaatttactggtttctcttctctggacggaatatcgcctggccgaaaagcaacgccaaagaatttcagactcgtcccgccggttcagaagaaccatcgttcccatatttgcgaatgatactaaaatttgacgctcctagtttcttgagcgcgcttaacgaagcctttgaggatcccttcttgaacagttcccaagaaaagcagcttaacggaggggctttcgaagatcttccagaagagcaaatattcggaatgactgtagaccgccagtatgtcatctccatccttcttgagatcatgaatcccgaggactttgcccctgaggacaccatttacctcgacatgttcattgcacgtaatcttccaaagttccaacaatacctcatcattccaggatccacgctcggcaagattatcggcgggctctgcaattatcctggtacagacttagccgaagacgctcaactgagtgccgagtatcttctctcagtatatcaaccccctgacatgtcagcgttgataccactgttccaaaaggctggattttttcgaatattgaaacggacttataagagcgataagcgatatggtgatttagtccaagtttacttcgaagatctcgaagaccaagaaggcgtttttgggtgtattgcagactgcctacggcctcaaacagcccttactaagaaacagacccaagacgtccacgatgttatcaggcaacatgctcacgagtttgttgacctcgaccccgtcaaagctgctcaagttctagacacatatgctccagagcttcaccgtttcgtcttggactccttagacgaaggctcggagctacaatacacgtacctgaaagccttgctggaacccgcgtcagaaggatccgagagggcagctagtgcattagaacgagatttcatcgagacatatgtgcggctcatgtgccagttcaacccggcacatgtctccacgttcgtcaacctcgttcaggcaacaaatttgcggctcgagaacttgctcccaactatggagacaacaggagtcatcgacgcggcagtgatcctcatggcgagggaaggacagatacaggatgctatgggcagactaactaaacacttattcacgcttcagtcgacactccagggcctgttgtcaggcacgagtaactacggcgaagaggtcgatgtgcaagacgtcgctgaagatatcctgaaagcattacagaaatacactcatgtgggtatttggctgtgtcaggggcagatgaagacctccaaacagcttacaactctgcaaaagcggcagacgtcgccagatcctagtgacttaacggtggaagagaacttatggctggagatgattgatgccaccgtacaaatcacgaggagactatcggggttagtctcctcgcctgatgagcagtctgaagcggaaagtgcgaatcccattccgatcctagattcggagaaactcgtcgcgctgctccggtccctcgtccaacacacatttacagccctattaaccgctacgacaacgcaagatcctcaacctcatactccgaagtcgaagaatgtgatcaatacctcgaccacaaacctcacattcctccgcatcctacgcgccttcttgtcacgggccgccgctacatcgccaaacctggcggacctaagagcggtgctcgcttcgatatttgctgcgtataaatacgaggagtcgatactcagactatcaaacaatctcctagagaagacactgttcacaaacgtgaaacaagctgtggaactccgacagcggggctggcgcccaaaaggctcaacttgcgagggttgtgggaagagggtttggggacctggtgtgtggggtgtttgggaggcctgggaggagaggaagagtcttgaggacaggagacgggcagataagacagagcaagtcgctgcgagtgcgagggcagggaagatcaatgcgggcaatgcggaagggagcaaggggaaggggaaaagtgctgaggcgcaacctgctgctgtacccgcttcccaggccgaggagggtgtaaatgggactggtgaagtgacgacgagagagaaccccgggcccctggtggtactggcttgtagacatgtgtatcataaaggttgtcttgatacgttgctggagagggatgggggagagggacagaggagtgtggatgagtttgggcgcgagaggttgaggtgtcctgttgatggatagctagtatatagaatattacgcgttgaaacgaagatttcttgcgatgtcgtcgtgtattcgctataatgactgtgttatgtaaagatgcggcgtaacctcgtgtcgaatgatcctgcataattttaactgtttgaaacgatcactaattgtacacgaaaggagggtcggatgcgcatctatttaatacgcatttcaagtcaaggaatgacgcacgagaaccttgtgttgaacgattgatctttacgccaccggtcattaagatcagaatagacagtccttcgtatgcacaggtgcttagttaatgtaacatcgtatcttgagcctcactagttatctttgattgagccatagactcatgcacccgcccttgtatgttgtgatttagaccatggtactctaccacaccctttcacctaacaaactcgc

SEQ ID NO: 26436 - DNA, 2529 bp, Muscodor strobelii
  misc_feature: SGI cDNA ID NO. 569042
  misc_feature: Elevated expression when VOC is produced
  misc_feature: Encodes the peptide sequence at SEQ ID NO 26437
atggatttagtgatccgggggccatcaaagcaaatcgacaacgaagagaaagaagcgttacgcaccgctttgatcggcgaactcttccgattagctcaagtcgaaagcgaaaaagcgaacgaccaaatcacgacgagatccccaagacgtctcacgattcagcgattgatacttgagcaactggagtacactggaatgatagaaagggaagagagaatcccagaagcgcatcagaagacctttcgatggatattcgatgactcctctagcgattttggcgaagcgcgttggtcgaacttcagagaatggctcgagtcggaagcacagctttattgggtcacagggaaagcgggttcgggaaaatcaaccttgatgaaattcatctgcgcggcggatgaagcgaaaaagaaattgtcaggtaaattcggccgaggaagcatgtcatattacctcgacaatacttctggagagccttcgacgtccataagatgtattgagtcgctgagaaaatgggcagacggtcataagctggtggttgcttcgttctacttctggaactcgggagcctcgatacagatgagccaggagggacttctgcgcaccttactgtttcagatattcagccagtgtcctgagctcatcgctaaagccctaccaattcgctgggaggcgctttgcctgtttgatgagtgcgccgaggagctctcgcccgaagaactatacaatgccctacgcatggctacgaagtatgctccgaataccttacgaatatgtcttttcatcgatggtctcgatgaatttgacggcgaccataagagcctcgtggctttgtttcatgatctgctcactaatccacatgtcaagatctgtgctgcaagtcggccatggattgtgttcgaggacaaatttaagagcaaacctagtcttatgctacaagaccttacttatcacgacattaagagttatgtggaaaccgaatttgagaacgacgttgcttttgcaaggctcaagatgcgtgatgcagatatggccgaggaactcatagaagaggtcgttcaaaagtcgtccggcgtgtttctatgggtcttcatcgttgtatcctcactgattaagggccttaacgaaggagatcgaattagtgacttgaggcgccgactggacgtacttcctccggatttggaagaattatacgacaaaatcttagactcgattgaccctttctatatggaacatacagctcagttattcgcactcacgcaaagtgcgttggaaccacctacacttttagagctctcctatgcagacgacgaggatgccgtcgaccgagccattaaccaaagcagtcggcttcagtggtccgaagaaacatcaatgcgcctcgaatcactattgcgccgaataaacagtcgctgtctgggcttcctggaagtcaaaggcttatcaatacataccaaggacctcgacacatatgcatatcacactgtgcaatatcttcatagaacagtcaaggaatatctcgccggacctagagtgcaaaagatattctcagctgcgctcaagagtcgatttgacccccatatgagactctgcgcagccaacttgcttctttcgatgagcgacgagccagatctcgacgaaagcgaaatcgcaacgagattatggagtaccgtcaaacattgcctataccacgcagcgcgggcaaaggaaagctcagctccaacagacgtcatcgccttgctcgacaagctcgaactagtttctcgcgtgatcgtatttaaaaacctcgacgaaaacgcggatcttgcaagtcccaacgacgacagtcgctggatccacgtcttatttcgcaaaatgcgcctccgtttcgataatttcgggcacacatacttatccctagcagtccgtttcggcgtgacgacttacgtgcgagcgcgtgcgcccaagggatgtaatgtacggactagaatcgcggggatcggcggaagactcgagcgttggcctttactatgcgatgcggtttgcgcggaccgaaaatggtatatgcaagccgcgtttgcaacgccgcaacgcgcgatgattgcatgtctgcttgaatgtggagcgaatccgaatcagcagccgaggcctggtaagtatacactgaaggttgatgttagagaggatgcgaggcttcaccttaagattgcggttgttgtgttgaacttacttactacgaattatctgagcagatttttcactaataagttgaatatgagttggattctggggattaagagtaatccgacgtgttgggtgtcgtttctggcgtggagcttgaatatcaatgtgggtgatgttgagagtgtttatgattgggctgatatggttagacttatgattgataatggtgcggaccttaatattgctaagccccgctatttggcgaaacttggtgattgggagtaccgggatttggttgctcttcagagagaacttaagaagattaagagggagaagatgttgagaagtgttaatatcttcgcctcgtga

SEQ ID NO: 26437 - protein, 842 aa, Muscodor strobelii
  misc_feature: SGI Peptide ID NO. 569042
  misc_feature (18)..(714): NCBI GI: 46116306 Blast Desc: FG03995.1 [Gibberella zeae PH-1]
  misc_feature (54)..(535): NCBI GI: 171682584 Blast Desc: protein product [Podospora anserina] gi|170941251|emb|CAP66901.1| protein product [Podospora anserina]
  misc_feature (57)..(704): NCBI GI: 225684243 Blast Desc: conserved [Paracoccidioides brasiliensis Pb03]
  misc_feature (57)..(704): NCBI GI: 226293863 Blast Desc: conserved [Paracoccidioides brasiliensis Pb18]
  misc_feature (53)..(704): NCBI GI: 261190024 Blast Desc: conserved [Ajellomyces dermatitidis SLH14081] gi|239591250|gb|EEQ73831.1| conserved [Ajellomyces dermatitidis SLH14081]
  misc_feature (57)..(643): NCBI GI: 169768460 Blast Desc: [Aspergillus oryzae RIB40] gi|238497764|ref|XP_002380117.1| conserved [Aspergillus flavus NRRL3357] gi|83766558|dbj|BAE56698.1| protein product oryzae]
  misc_feature (9)..(703): NCBI GI: 238501160 Blast Desc: conserved [Aspergillus flavus NRRL3357] gi|220692051|gb|EED48398.1| conserved [Aspergillus flavus NRRL3357]
  misc_feature (50)..(706): NCBI GI: 154293653 Blast Desc: BC1G_14084 [Botryotinia fuckeliana B05.10] gi|150845240|gb|EDN20433.1| BC1G_14084 [Botryotinia fuckeliana B05.10]
  misc_feature (57)..(724): NCBI GI: 116195412 Blast Desc: CHGG_04304 [Chaetomium globosum CBS 148.51] gi|88180217|gb|EAQ87685.1| CHGG_04304 [Chaetomium globosum CBS 148.51]
  misc_feature (57)..(534): NCBI GI: 256730922 Blast Desc: NECHADRAFT_84637 [Nectria haematococca mpVI 77-13-4]
  misc_feature: Useful for introducing or modulating the production of volatile compounds
MDLVIRGPSKQIDNEEKEALRTALIGELFRLAQVESEKANDQITTRSPRRLTIQRLILEQLEYTGMIEREERIPEAHQKTFRWIFDDSSSDFGEARWSNFREWLESEAQLYWVTGKAGSGKSTLMKFICAADEAKKKLSGKFGRGSMSYYLDNTSGEPSTSIRCIESLRKWADGHKLVVASFYFWNSGASIQMSQEGLLRTLLFQIFSQCPELIAKALPIRWEALCLFDECAEELSPEELYNALRMATKYAPNTLRICLFIDGLDEFDGDHKSLVALFHDLLTNPHVKICAASRPWIVFEDKFKSKPSLMLQDLTYHDIKSYVETEFENDVAFARLKMRDADMAEELIEEVVQKSSGVFLWVFIVVSSLIKGLNEGDRISDLRRRLDVLPPDLEELYDKILDSIDPFYMEHTAQLFALTQSALEPPTLLELSYADDEDAVDRAINQSSRLQWSEETSMRLESLLRRINSRCLGFLEVKGLSIHTKDLDTYAYHTVQYLHRTVKEYLAGPRVQKIFSAALKSRFDPHMRLCAANLLLSMSDEPDLDESEIATRLWSTVKHCLYHAARAKESSAPTDVIALLDKLELVSRVIVFKNLDENADLASPNDDSRWIHVLFRKMRLRFDNFGHTYLSLAVRFGVTTYVRARAPKGCNVRTRIAGIGGRLERWPLLCDAVCADRKWYMQAAFATPQRAMIACLLECGANPNQQPRPGKYTLKVDVREDARLHLKIAVVVLNLLTTNYLSRFFTNKLNMSWILGIKSNPTCWVSFLAWSLNINVGDVESVYDWADMVRLMIDNGADLNIAKPRYLAKLGDWEYRDLVALQRELKKIKREKMLRSVNIFAS

SEQ ID NO: 26438 - DNA, 2570 bp, Muscodor strobelii
  misc_feature: SGI EST ID NO. CUFF.62440.0
  misc_feature: Variant of the nucleotide sequence at SEQ ID NO 26436
tcgagtcggaagcacagctttattgggtcacagggaaagcgggttcgggaaaatcaaccttgatgaaattcatctgcgcggcggatgaagcgaaaaagaaattgtcaggtaaattcggccgaggaagcatgtcatattacctcgacaatacttctggagagccttcgacgtccataagatgtattgagtcgctgagaaaatgggcagacggtcataagctggtggttgcttcgttctacttctggaactcgggagcctcgatacagatgagccaggagggacttctgcgcaccttactgtttcagatattcagccagtgtcctgagctcatcgctaaagccctaccaattcgctgggaggcgctttgcctgtttgatgagtgcgccgaggagctctcgcccgaagaactatacaatgccctacgcatggctacgaagtatgctccgaataccttacgaatatgtcttttcatcgatggtctcgatgaatttgacggcgaccataagagcctcgtggctttgtttcatgatctgctcactaatccacatgtcaagatctgtgctgcaagtcggccatggattgtgttcgaggacaaatttaagagcaaacctagtcttatgctacaagaccttacttatcacgacattaagagttatgtggaaaccgaatttgagaacgacgttgcttttgcaaggctcaagatgcgtgatgcagatatggccgaggaactcatagaagaggtcgttcaaaagtcgtccggcgtgtttctatgggtcttcatcgttgtatcctcactgattaagggccttaacgaaggagatcgaattagtgacttgaggcgccgactggacgtacttcctccggatttggaagaattatacgacaaaatcttagactcgattgaccctttctatatggaacatacagctcagttattcgcactcacgcaaagtgcgttggaaccacctacacttttagagctctcctatgcagacgacgaggatgccgtcgaccgagccattaaccaaagcagtcggcttcagtggtccgaagaaacatcaatgcgcctcgaatcactattgcgccgaataaacagtcgctgtctgggcttcctggaagtcaaaggcttatcaatacataccaaggacctcgacacatatgcatatcacactgtgcaatatcttcatagaacagtcaaggaatatctcgccggacctagagtgcaaaagatattctcagctgcgctcaagagtcgatttgacccccatatgagactctgcgcagccaacttgcttctttcgatgagcgacgagccagatctcgacgaaagcgaaatcgcaacgagattatggagtaccgtcaaacattgcctataccacgcagcgcgggcaaaggaaagctcagctccaacagacgtcatcgccttgctcgacaagctcgaactagtttctcgcgtgatcgtatttaaaaacctcgacgaaaacgcggatcttgcaagtcccaacgacgacagtcgctggatccacgtcttatttcgcaaaatgcgcctccgtttcgataatttcgggcacacatacttatccctagcagtccgtttcggcgtgacgacttacgtgcgagcgcgtgcgcccaagggatgtaatgtacggactagaatcgcggggatcggcggaagactcgagcgttggcctttactatgcgatgcggtttgcgcggaccgaaaatggtatatgcaagccgcgtttgcaacgccgcaacgcgcgatgattgcatgtctgcttgaatgtggagcgaatccgaatcagcagccgaggcctggtaagtatacactgaaggttgatgttagagaggatgcgaggcttcaccttaagattgcggttgttgtgttgaacttacttactacgaattatctgagcagatttttcactaataagttgaatatgagttggattctggggattaagagtaatccgacgtgttgggtgtcgtttctggcgtggagcttgaatatcaatgtgggtgatgttgagagtgtttatgattgggctgatatggttagacttatgattgataatggtgcggaccttaatattgctaagccccgctatttggcgaaacttggtgattgggagtaccgggatttggttgctcttcagagagaacttaagaagattaagagggagaagatgttgagaagtgttaatatcttcgcctcgtgactggagacgacatgaagggggacaatatttgagatccgttggtgtgctggggtgtcggtacgtacccgatatggtacatatcatgtgttcaaaagattcctaggttaggcctctaacttgagggccctttgttacgtacagaggtgacatggtctgcaatacgtcgtatagtaggaacacatgctgagagcaaaacacaggcggtagtagataccataatgtagatcctgaggtagtttagcattggcgtgggaacatagcataccccattatggcaatttcagacaaaacaagataccataagcaattcaacctcaacttgtctaagtctcatgcttgaactaacggacg

SEQ ID NO: 26439 - DNA, 1815 bp, Muscodor strobelii
  misc_feature: SGI cDNA ID NO. 569043
  misc_feature: Encodes the peptide sequence at SEQ ID NO 26440
atggaacctcaagcacaaccaagctcttcacctttgtatccggcgccaatccgcgggtcagctacggctacatcccgaaatgcgattctgatggcagagaatagtatggaaaacttcagtttcgtgagaagacagctctggtataatgcaggcctgggctctctatcgactgttcgggaacacatcgatcatgtcgagccacgatttgatcccaccgtctttccggccgaaacgcaggatcgtgattcaacaggcgagatgatatcggcccgcgagattcctcctcgcatcgcagagctgccacttccgcctcacaggaggtattctgtcgcagactatagatccctttatctttcgggcgatcttactccattggctgtcgctcaggctattcttcctttgatccgccgggatacgtcccctcctggtgagcactcgatagcttggctccaagttagagccgacttagtgctgaaggctgctagagagtctacgctgaggtatcaacagaacaaatccttaggaaatctggacggtgtacccacaggcgttaaggacgagtacgatatagaaggctacacgacatgcttgggaagcatacacgacctcacaggtcaagcaccagacggagaaacgattgatagttggtgtgtgaagaagcttcaacaagctggcgctatcatccttggcaagctaaccatggtggagattggcatggacacttgcggctgcaacgcgaatcatggcactccacgcaatccatacaatgcagaatattatactggtggtagttcatcgggatgcgcatatgctgtcgctactgggttgattcccgtagccatgggaagcgacggtggcggcagtatacggatcccttcttcattctgctctgtgattgggcttaaaccttctcttgggcgcatttcgtatcatccgcgccacaacgctagcagtacttccgcagtgaacggtccgatagcgactgatatgaaatcgcttgctgagatttacgccgtagctgcacaaccccacgagctctctcatttcggtccgcctataactcccgccgggaggaccggtgattacaataggcggcccaaggttatcggtctcccggaagcttggctacagagcgcgacacctgcgatccagcagctgtgccgagaaatgatcacaaggctggtagacaagaaaggctacaccctcgtatccatagatattccgttcatcaaacaaggcaagattgctttgtctctgacgatgctaacgaatgcatcgacgcatatacccgatgctcgtggtctatcggcaacaagccgcatactagtcgcgctcggaaaagtgacgcctgcaacagattacctactggcacagaagctacgccatgttctcatgtcccatcttgcttggctttggaagacttatccaggaatggtcattgtaacacccacgacagcctgcgctggctggcccatacgaacggtatccgagctgacacacgggattagtgacggtgatcagacattcgcatcgatggagtatgtttggctagctaatctctgtggcgtgccaagccttactctcccggtgggctatgttatgccagaagcaacggcacatgcaggcaaggtcgcgagaccagatactgatggcaaggtacctgttggcatcatggccacaggggagtggacgactgaagacacacttatgatgtttggtatggatgtagaagaggttggtgccggatcccagtgtcgcccacccacatgggtggacgttgtaggacttgcgaaaacagagatgggcgaaggataa

SEQ ID NO: 26440 - protein, 604 aa, Muscodor strobelii
  misc_feature: SGI Peptide ID NO. 569043
  misc_feature (129)..(570): Pfam Id: PF01425 Pfam Desc: Amidase
  misc_feature (148)..(570): Pfam Id: PF01425 Pfam Desc: Amidase
  misc_feature (13)..(604): NCBI GI: 238839787 Blast Desc: glutamyl-tRNA(Gln) amidotransferase subunit A [Microsporum canis CBS 113480]
  misc_feature (41)..(603): NCBI GI: 258573559 Blast Desc: conserved [Uncinocarpus reesii 1704] gi|237901227|gb|EEP75628.1| conserved [Uncinocarpus reesii 1704]
  misc_feature (36)..(601): NCBI GI: 240106222 Blast Desc: Amidase family protein [Coccidioides posadasii C735 delta SOWgp]
  misc_feature (36)..(601): NCBI GI: 119192100 Blast Desc: CIMG_00427 [Coccidioides immitis RS]
  misc_feature (12)..(600): NCBI GI: 261356992 Blast Desc: amidase [Verticillium albo-atrum VaMs.102]
  misc_feature (13)..(603): NCBI GI: 85077960 Blast Desc: NCU04092 [Neurospora crassa OR74A] gi|28917133|gb|EAA26852.1| conserved [Neurospora crassa OR74A]
  misc_feature (29)..(600): NCBI GI: 256720639 Blast Desc: NECHADRAFT_72189 [Nectria haematococca mpVI 77-13-4]
  misc_feature (41)..(604): NCBI GI: 115386944 Blast Desc: conserved [Aspergillus terreus NIH2624] gi|114191011|gb|EAU32711.1| conserved [Aspergillus terreus NIH2624]
  misc_feature (12)..(598): NCBI GI: 238485422 Blast Desc: fatty-acid amide hydrolase, [Aspergillus flavus NRRL3357] gi|220698828|gb|EED55167.1| fatty-acid amide hydrolase, [Aspergillus flavus NRRL3357]
  misc_feature (41)..(598): NCBI GI: 169771975 Blast Desc: [Aspergillus oryzae RIB40] gi|83768316|dbj|BAE58455.1| protein product [Aspergillus oryzae]
  misc_feature (175)..(532): SWISSPROT Homolog: EC 3.5.1.4 Amidase
MEPQAQPSSSPLYPAPIRGSATATSRNAILMAENSMENFSFVRRQLWYNAGLGSLSTVREHIDHVEPRFDPTVFPAETQDRDSTGEMISAREIPPRIAELPLPPHRRYSVADYRSLYLSGDLTPLAVAQAILPLIRRDTSPPGEHSIAWLQVRADLVLKAARESTLRYQQNKSLGNLDGVPTGVKDEYDIEGYTTCLGSIHDLTGQAPDGETIDSWCVKKLQQAGAIILGKLTMVEIGMDTCGCNANHGTPRNPYNAEYYTGGSSSGCAYAVATGLIPVAMGSDGGGSIRIPSSFCSVIGLKPSLGRISYHPRHNASSTSAVNGPIATDMKSLAEIYAVAAQPHELSHFGPPITPAGRTGDYNRRPKVIGLPEAWLQSATPAIQQLCREMITRLVDKKGYTLVSIDIPFIKQGKIALSLTMLTNASTHIPDARGLSATSRILVALGKVTPATDYLLAQKLRHVLMSHLAWLWKTYPGMVIVTPTTACAGWPIRTVSELTHGISDGDQTFASMEYVWLANLCGVPSLTLPVGYVMPEATAHAGKVARPDTDGKVPVGIMATGEWTTEDTLMMFGMDVEEVGAGSQCRPPTWVDVVGLAKTEMGEG

SEQ ID NO: 26441 - DNA, 2538 bp, Muscodor strobelii
  misc_feature: SGI EST ID NO. CUFF.62453.0
  misc_feature: Variant of the nucleotide sequence at SEQ ID NO 26439
ttcgcagagccgcagtaacatatgccctcgccccattttggggagacttgccgaaaatacgtaggtaagtcggcaccacaatcttcattagcgttgagctattagcgattgaacggccaatgctgctacgcacaattcctgggtccacagagttaactatcgcctgtggtctaacctccagtcagtagtgtcatcgcaccagcattttcagacgagatgggatctagtgatagcttagagaagtggttgtactcattatctggtcccaccatttgcttggcgatttctgaaatggaatacatcaagagcagtttgctgttatcatagtttggctctgttgttttccacaaaggaggccagttctgtcggctgctaagatgacacagaataccctcctgacgagcccaatcgggccaatgtgtaatgtctggatacagatggtcccgggaactaatgaaaactaggtgtgctggcgtttcccgattcctagactcctctttcatccaagccgagagaagtaaccctaagaggacagtgcttaaagcgttcacctgcaacgtgctttccctgtgtatacagtaatatttgttagacacaaagatagtatagatgagttgacatgttgccagcaagcttaccagccttcagcactctcctgaaacttggaatgaataagaccagcgttcagcaccacgacatcaaggccaccctgaggtgcaaaaacgctcttcagctctttcacgaacgcaacacaagacgcataccgttccatatctaagtgaagtatagtgactgtacctggagtggaaattcgcgctgctcgttgaatatggcgcctagctgcttctccccgcgagatgtcacgataggtaatgataacgtttgctcctaggttgacgaagtgcaccgcagccgctaagccaagcccagcagttcctcctgtgatcaggaccgtctggcccgtgaacgtgccagcctgaggtaagggattgccgatgaaccgcccgcgaaaacggtgaggcgagatgtggagtaatgtcatagctacctaggtatatatttggcagcgagttcgagatagagcaggttcataaagttctccctctagagtgagcaaagcgctactagactaaagcaagtgaacacaaaccaatgagggagatatttcagcagagacggagaatttagtgtctttgaagaaaagggccaaacgggtcataacgatgcagctttataagattaggtgtgctcgtcgagtgtgacaattcgtgcacaccaataggcggacagagccgagtgggataataatttgaccattccaggtatctttctcggccccaacgagcgcccataacactctaacacaaaggcgggcagggatcgcgcatgacctgatgcggtcgcccagattatactcatggtacacctagtatcatgttcaatcagccactgaatttatacaaatcgtaccagaacagaaagagacttacctcatgcctacctcctccatcatcagctcacctgtctccttgatcattccgctacggatctgaaggtgatcacatcatggaacctcaagcacaaccaagctcttcacctttgtatccggcgccaatccgcgggttcgtttcaatctatgacagactcgcaaatgggcgtctctaataccttcaccgtgataccagcccgatgattccatacaaaccagagagaaagcgcaaccctcggcttgcgggatggctactgctcatcattgcctacttgtacgtctgctgagtttcacgaataaattccaggtcagctacggctacatcccgaaatgcgattctgatggcagagaatagtatggaaaacttcagtttcgtgagaagacagctctggtataatgcaggcctgggctctctatcgactgttcgggaacacatcgatcatgtcgagccacgatttgatcccaccgtctttccggccgaaacgcaggatcgtgattcaacaggcgagatgatatcggcccgcgagattcctcctcgcatcgcagagctgccacttccgcctcacaggaggtattctgtcgcagactatagatccctttatctttcgggcgatcttactccattggctgtcgctcaggctattcttcctttgatccgccgggatacgtcccctcctggtgagcactcgatagcttggctccaagttagagccgacttagtgctgaaggctgctagagagtctacgctgaggtatcaacagaacaaatccttaggaaatctggacggtgtacccacaggcgttaaggacgagtacgatatagaaggctacacgacatgcttgggaagcatacacgacctcacaggtcaagcaccagacggagaaacgattgatagttggtgtgtgaagaagcttcaacaagctggcgctatcatccttggcaagctaaccatggtggagattggcatggacacttgcggctgcaacgcgaatcatggcactccacgcaatccatacaatgcagaatattatactggtggtagttcatcg

SEQ ID NO: 26442 - DNA, 1083 bp, Muscodor strobelii
  misc_feature: SGI cDNA ID NO. 569044
  misc_feature: Encodes the peptide sequence at SEQ ID NO 26443
atgacattactccacatctcgcctcaccgttttcgcgggcggttcatcggcaatcccttacctcaggctggcacgttcacgggccagacggtcctgatcacaggaggaactgctgggcttggcttagcggctgcggtgcacttcgtcaacctaggagcaaacgttatcattacctatcgtgacatctcgcggggagaagcagctaggcgccatattcaacgagcagcgcgaatttccactccaggtacagtcactatacttcacttagatatggaacggtatgcgtcttgtgttgcgttcgtgaaagagctgaagagcgtttttgcacctcagggtggccttgatgtcgtggtgctgaacgctggtcttattcattccaagtttcaggagagtgctgaaggctgggaaagcacgttgcaggtgaacgctttaagcactgtcctcttagggttacttctctcggcttggatgaaagaggagtctaggaatcgggaaacgccagcacacctagttttcattagttcccgggaccatctgtatccagacattacacattggcccgattgggctcgtcaggagggtattctgtgtcatcttagcagccgacagaactggcctcctttgtggaaaacaacagagccaaactatgataacagcaaactgctcttgatgtattccatttcagaaatcgccaagcaaatggtgggaccagataatgagtacaaccacttctctaagctatcactagatcccatctcgtctgaaaatgctggaattgtgcgtagcagcattggccgttcaatcgctaatagctcaacgctaatgaagattgtggtgccgacttacctacgtattttcggcaagtctccccaaaatggggcgagggcatatgttactgcggctctgcgaaatgaacacggacggttctacatgggatggttgacagataaacagtattgcaaaataaccacgaaaaatatgacaagtgagacgggaaaggcagttcagtcgctagtatggtgtgaaatttcgcgtgagctgagctcgaaggtggaggcactcaaagacgtagcccagatatag

SEQ ID NO: 26443 - protein, 360 aa, Muscodor strobelii
  misc_feature: SGI Peptide ID NO. 569044
  misc_feature (29)..(180): Pfam Id: PF00106 Pfam Desc: short chain dehydrogenase
  misc_feature (29)..(149): Pfam Id: PF00106 Pfam Desc: short chain dehydrogenase
  misc_feature (3)..(319): NCBI GI: 119490096 Blast Desc: short chain dehydrogenase/reductase family oxidoreductase, [Neosartorya fischeri NRRL 181] gi|119411124|gb|EAW21067.1| short chain dehydrogenase/reductase
  misc_feature (9)..(313): NCBI GI: 116202939 Blast Desc: CHGG_09354 [Chaetomium globosum CBS 148.51] gi|88177872|gb|EAQ85340.1| CHGG_09354 [Chaetomium globosum CBS 148.51]
  misc_feature (11)..(357): NCBI GI: 39977595 Blast Desc: [Magnaporthe grisea 70-15] gi|145013802|gb|EDJ98443.1| [Magnaporthe grisea 70-15]
  misc_feature (25)..(353): NCBI GI: 154305526 Blast Desc: BC1G_08532 [Botryotinia fuckeliana B05.10] gi|150853319|gb|EDN28511.1| BC1G_08532 [Botryotinia fuckeliana B05.10]
  misc_feature (11)..(357): NCBI GI: 242802037 Blast Desc: short-chain dehydrogenases/reductase, [Talaromyces stipitatus ATCC 10500] gi|218717239|gb|EED16660.1| short-chain dehydrogenases/reductase, [Talaromyces stipitatus ATCC 10500]
  misc_feature (11)..(359): NCBI GI: 240108554 Blast Desc: oxidoreductase,short chain dehydrogenase, [Coccidioides posadasii C735 delta SOWgp]
  misc_feature (11)..(357): NCBI GI: 119186485 Blast Desc: CIMG_03290 [Coccidioides immitis RS]
  misc_feature (7)..(354): NCBI GI: 169595156 Blast Desc: SNOG_00312 [Phaeosphaeria nodorum SN15] gi|111070687|gb|EAT91807.1| SNOG_00312 [Phaeosphaeria nodorum SN15]
  misc_feature (13)..(354): NCBI GI: 238844027 Blast Desc: WW domain-containing oxidoreductase [Microsporum canis CBS 113480]
  misc_feature (25)..(354): NCBI GI: 115384868 Blast Desc: conserved [Aspergillus terreus NIH2624] gi|114196673|gb|EAU38373.1| conserved [Aspergillus terreus NIH2624]
MTLLHISPHRFRGRFIGNPLPQAGTFTGQTVLITGGTAGLGLAAAVHFVNLGANVIITYRDISRGEAARRHIQRAARISTPGTVTILHLDMERYASCVAFVKELKSVFAPQGGLDVVVLNAGLIHSKFQESAEGWESTLQVNALSTVLLGLLLSAWMKEESRNRETPAHLVFISSRDHLYPDITHWPDWARQEGILCHLSSRQNWPPLWKTTEPNYDNSKLLLMYSISEIAKQMVGPDNEYNHFSKLSLDPISSENAGIVRSSIGRSIANSSTLMKIVVPTYLRIFGKSPQNGARAYVTAALRNEHGRFYMGWLTDKQYCKITTKNMTSETGKAVQSLVWCEISRELSSKVEALKDVAQI

SEQ ID NO: 26444 - DNA, 2704 bp, Muscodor strobelii
  misc_feature: SGI EST ID NO. CUFF.62452.1
  misc_feature: Variant of the nucleotide sequence at SEQ ID NO 26442
gccgcaagtgtctggtgtaaatacatcagtatatcggtctagaatcccctgtgtccaaaatttcagggtcttacccatgccaatctccaccatggttagcttgccaaggatgatagcgccagcttgttgaagcttcttcacacaccaactatcaatcgtttctccgtctggtgcttgacctgtgaggtcgtgtatgcttcccaagcatgtcgtgtagccttctatatcgtactcgtccttaacgcctactctctagcagccttcagcactaagtcggctctaacttggagccaagctatcgagtgctcaccaggaggggacgtatcccggcggatcaaaggaagaatagcctgagcgacagccaatggagtaagatcgcccgaaagataaagggatctatagtctgcgacagaatacctcctgtgaggcggaagtggcagctctgcgatgcgaggaggaatctcgcgggccgatatcatctcgcctgttgaatcacgatcctgcgtttcggccggaaagacggtgggatcaaatcgtggctcgacatgatcgatgtgttcccgaacagtcgatagagagcccaggcctgcattataccagagctgtcttctcacgaaactgaagttttccatactattctctgccatcagaatcgcatttcgggatgtagccgtagctgacctggaatttattcgtgaaactcagcagacgtacaagtaggcaatgatgagcagtagccatcccgcaagccgagggttgcgctttctctctggtttgtatggaatcatcgggctggtatcacggtgaaggtattagagacgcccatttgcgagtctgtcatagattgaaacgaacccgcggattggcgccggatacaaaggtgaagagcttggttgtgcttgaggttccatgatgtgatcaccttcagatccgtagcggaatgatcaaggagacaggtgagctgatgatggaggaggtaggcatgaggtgtaccatgagtataatctgggcgaccgcatcaggtcatgcgcgatccctgcccgcctttgtgttagagtgttatgggcgctcgttggggccgagaaagatacctggaatggtcaaattattatcccactcggctctgtccgcctattggtgtgcacgaattgtcacactcgacgagcacacctaatcttataaagctgcatcgttatgacccgtttggcccttttcttcaaagacactaaattctccgtctctgctgaaatatctccctcattggtttgtgttcacttgctttagtctagtagcgctttgctcactctagagggagaactttatgaacctgctctatctcgaactcgctgccaaatatatacctaggtagctatgacattactccacatctcgcctcaccgttttcgcgggcggttcatcggcaatcccttacctcaggctggcacgttcacgggccagacggtcctgatcacaggaggaactgctgggcttggcttagcggctgcggtgcacttcgtcaacctaggagcaaacgttatcattacctatcgtgacatctcgcggggagaagcagctaggcgccatattcaacgagcagcgcgaatttccactccaggtacagtcactatacttcacttagatatggaacggtatgcgtcttgtgttgcgttcgtgaaagagctgaagagcgtttttgcacctcagggtggccttgatgtcgtggtgctgaacgctggtcttattcattccaagtttcaggagagtgctgaaggctgggaaagcacgttgcaggtgaacgctttaagcactgtcctcttagggttacttctctcggcttggatgaaagaggagtctaggaatcgggaaacgccagcacacctagttttcattagttcccgggaccatctgtatccagacattacacattggcccgattgggctcgtcaggagggtattctgtgtcatcttagcagccgacagaactggcctcctttgtggaaaacaacagagccaaactatgataacagcaaactgctcttgatgtattccatttcagaaatcgccaagcaaatggtgggaccagataatgaaccacaggcgatagttaactctgtggacccaggaattgtgcgtagcagcattggccgttcaatcgctaatagctcaacgctaatgaagattgtggtgccgacttacctacgtattttcggcaagtctccccaaaatggggcgagggcatatgttactgcggctctgcgaaatgaacacggacggttctacatgggatggttgacagataaacagtattgcaaaataaccacgaaaaatatgacaagtgagacgggaaaggcagttcagtcgctagtatggtgtgaaatttcgcgtgagctgagctcgaaggtggaggcactcaaagacgtagcccagatatagataccccaaatggccttcatacacgaaaaacaattcatgcaaataggtctagtggcgttgagacgtcggggttagctattgttatacttttaccagattgatgatatgggatttccgataaaggtggagagttgacgactatgtaactgggaaacaaaccagtgcttccatggaaaacgcctggaaggatatccgaataattcgagattgtaagctggttataggcagcagctacttgaagtggctcttgcggcggtctattcggctcggg

SEQ ID NO: 26445 - DNA, 537 bp, Muscodor strobelii
  misc_feature: SGI cDNA ID NO. 569045
  misc_feature: Encodes the peptide sequence at SEQ ID NO 26446
atggcggctcgtaacgatgaaggacgagcgtacccgttcttcgattacaccgcgcccgtccctgcgcctccctgccctcacgttcgtgtacattgcaaattcaccgaaaatcctccccgagtcaacttgaatacgcatgaccaccgcggcacctggcttgtcgacatcaacgtcactgtcgcgcatcgtgatctggagagtttcgtcgtcattgataacaatggtatcctggacgaggagggcaatccgacctctccctctgacgtgcccaaggaccacagatgcctctgcgtagcagagagtcttcagaacggtctcttgtgtggctatgtggtgaagcctacgcctggttcgctgactagccactacaacaacttccacaatccggaaagcaagcatcggcagaagatagatcggagcaagctctatgactaccgccactacgatgagccagcgatccagacaacgctcgcggccgagcagcacgctcgcagtcaacatggtcatacaggagattatgaggctttgtttgcctga

SEQ ID NO: 26446 - protein, 178 aa, Muscodor strobelii
  misc_feature: SGI Peptide ID NO. 569045
MAARNDEGRAYPFFDYTAPVPAPPCPHVRVHCKFTENPPRVNLNTHDHRGTWLVDINVTVAHRDLESFVVIDNNGILDEEGNPTSPSDVPKDHRCLCVAESLQNGLLCGYVVKPTPGSLTSHYNNFHNPESKHRQKIDRSKLYDYRHYDEPAIQTTLAAEQHARSQHGHTGDYEALFA

SEQ ID NO: 26447 - DNA, 1683 bp, Muscodor strobelii
  misc_feature: SGI cDNA ID NO. 569046
  misc_feature: Encodes the peptide sequence at SEQ ID NO 26448
atggaggataaaacccaacaacacaagctcgacacgcccaaaagccacatcaccagatcttatgccagcgagacaactcaagacacccaactaggtatactagatgggcgcaaagtcttcaatatgagtactgcaatcacgaatatgctacgaaggctagaccatcagattgagtcggacttggtcgatctcagcagccgcctctctatcgacggccaactattaggtagtggtcttgtcaagcccgatcctaaactatccgaagtagagcaagatgaaaataaatcattctccattctcaaaagcatctcagtgcgcgaacgtccggcagtgaagggccttcacgggtccaaaaaccattacggcggacttgacgacgagctcgaaaaacaatttcgggaaatctgctggaagcccatgctgctagacggctacaagacgctcaggcattctgctgcccgcaagtcggcgctgcagagcgttgatcgcatcaaggatcttcgcttagatgccgtccttgatatacagaggcagattgtgatcgagaagcaaacacttgatcagacatccgcgggacaagaagtacagcgagaactcctcgaacagaagcgtctccacgagaaggaccttaaagaggttcaacaaagcctcgtccttgctttgcggcaaggcaagaaggagtctgccgatgtactgtcgaaactcaaaccattgacggttggcgcacgcctgactaggcatcgagatgatagcgacgatacggcgaacgcagccagaccggccaaacacgtaaaactagattcgcaggaacaaagaacccttgcttgcccgtttctcaagcacaacccctcgatctacaagacgtggagatcttgttcctggtctggctggcgaaccacccatcgactcaaagagcacctgattaggaagcatgtattgcccaagtacatatgcaaccgttgcaagcaagacttcaagtcacagattctgctgtttgaccatcagacacttcctgactcgtgtctgatccaggcaggcgggccgcaagagggcattgatgatacgcagctccaagccatacgatcgaagaagaagccttctgggcgaactaatatgtccgaagaggaaaagtgggcgaacatttacaaagtcctctttccacatgatgaccctatcccgtcaccttatcacaattgcaattgggcagaatctggcagttctccagtattatcccgaaatcaaacccttaccttgcttgaggatttgggcaaccatgcacggcatgagcttccgaagctgatgcgacccggtttggaattgttgttcaacgcgaatcccaatgcgccatgctcacgcgatgacattatagagatagcccaagacgctatccaacaggttatacaaaatttcaaatcggacagatccgttgttcacatatccgcgccgtcatgcgaagaacagcggcgcatcagggatcattccgaagcttgcactccgaccgttgcaaattcgtccgagacacgagctaccggcgagcatgtgagtgttttggtcgataacggcgaatatggtttcgctgagggagaggtgtacccatttctccaagacaccctttttgagtctttagaggcatttgatttctcatttgacgaagccactgcagcgcttccagcatcgacctag

SEQ ID NO: 26448 - protein, 560 aa, Muscodor strobelii
  misc_feature: SGI Peptide ID NO. 569046
  misc_feature (274)..(442): NCBI GI: 171683689 Blast Desc: protein product [Podospora anserina] gi|170941804|emb|CAP67458.1| protein product [Podospora anserina]
  misc_feature (243)..(435): NCBI GI: 145608210 Blast Desc: MGG_03279 [Magnaporthe grisea 70-15] gi|145015716|gb|EDK00206.1| MGG_03279 [Magnaporthe grisea 70-15]
  misc_feature (245)..(442): NCBI GI: 116194256 Blast Desc: CHGG_03726 [Chaetomium globosum CBS 148.51] gi|88179639|gb|EAQ87107.1| CHGG_03726 [Chaetomium globosum CBS 148.51]
  misc_feature (259)..(439): NCBI GI: 171689708 Blast Desc: protein product [Podospora anserina] gi|170944816|emb|CAP70928.1| protein product [Podospora anserina]
  misc_feature (243)..(472): NCBI GI: 116205235 Blast Desc: CHGG_10501 [Chaetomium globosum CBS 148.51] gi|88176629|gb|EAQ84097.1| CHGG_10501 [Chaetomium globosum CBS 148.51]
  misc_feature (252)..(398): NCBI GI: 46109250 Blast Desc: FG01507.1 [Gibberella zeae PH-1]
  misc_feature (274)..(513): NCBI GI: 256726722 Blast Desc: NECHADRAFT_76012 [Nectria haematococca mpVI 77-13-4]
  misc_feature (270)..(436): NCBI GI: 16416005 Blast Desc: conserved [Neurospora crassa]
  misc_feature (270)..(436): NCBI GI: 164424800 Blast Desc: NCU05381 [Neurospora crassa OR74A] gi|157070667|gb|EAA33958.2| [Neurospora crassa OR74A]
  misc_feature (274)..(409): NCBI GI: 256734669 Blast Desc: NECHADRAFT_98902 [Nectria haematococca mpVI 77-13-4]
MEDKTQQHKLDTPKSHITRSYASETTQDTQLGILDGRKVFNMSTAITNMLRRLDHQIESDLVDLSSRLSIDGQLLGSGLVKPDPKLSEVEQDENKSFSILKSISVRERPAVKGLHGSKNHYGGLDDELEKQFREICWKPMLLDGYKTLRHSAARKSALQSVDRIKDLRLDAVLDIQRQIVIEKQTLDQTSAGQEVQRELLEQKRLHEKDLKEVQQSLVLALRQGKKESADVLSKLKPLTVGARLTRHRDDSDDTANAARPAKHVKLDSQEQRTLACPFLKHNPSIYKTWRSCSWSGWRTTHRLKEHLIRKHVLPKYICNRCKQDFKSQILLFDHQTLPDSCLIQAGGPQEGIDDTQLQAIRSKKKPSGRTNMSEEEKWANIYKVLFPHDDPIPSPYHNCNWAESGSSPVLSRNQTLTLLEDLGNHARHELPKLMRPGLELLFNANPNAPCSRDDIIEIAQDAIQQVIQNFKSDRSVVHISAPSCEEQRRIRDHSEACTPTVANSSETRATGEHVSVLVDNGEYGFAEGEVYPFLQDTLFESLEAFDFSFDEATAALPAST

SEQ ID NO: 26449 - DNA, 2680 bp, Muscodor strobelii
  misc_feature: SGI EST ID NO. CUFF.62565.1
  misc_feature: Variant of the nucleotide sequence at SEQ ID NO 26447
cgcgagtcgtctagctaggccagccacagatgtgacgagtatgaatatcgctgatttgaagtatgcaaatatgtgcctttgtgttgtagagctgggtctcgaagccgtgataggcgtggacgggtcaggtttttatgctcaatttcgaggcggtgtgggagtgattagggacgtcgtgcaagtgctctcaaaggagtgtcaacagcaggttggatgagatcaagatagttttggagtactcaacctcaagcaaacgatgtctctctatttcgcgatcacacgggaagagggatgtctttatgtcgtttacttttggtggcctttgcaagttgttaaccacccttctttcagtaggcggctcagtggtcttcggtgttgctactgagagacagctgagagaggctaccccacatcttagggaatatcgcaattgcgcacatcgccaacaccagccaaatgcgacaccgacaaactcccctggagcatctcgcagctatgcacaattagacgcatatcagaaaagagccggagtcaccggcacacagcacaggcacgaaatggaggataaaacccaacaacacaagctcgacacgcccaaaagccacatcaccagatcttatgccagcgagacaactcaagacacccaactaggtatactagatgggcgcaaagtcttcaatatgagtactgcaatcacgaatatgctacgaaggctagaccatcagattgagtcggacttggtcgatctcagcagccgcctctctatcgacggccaactattaggtagtggtcttgtcaagcccgatcctaaactatccgaagtagagcaagatgaaaataaatcattctccattctcaaaagcatctcagtgcgcgaacgtccggcagtgaagggccttcacgggtccaaaaaccattacggcggacttgacgacgagctcgaaaaacaatttcgggaaatctgctggaagcccatgctgctagacggctacaagacgctcaggcattctgctgcccgcaagtcggcgctgcagagcgttgatcgcatcaaggatcttcgcttagatgccgtccttgatatacagaggcagattgtgatcgagaagcaaacacttgatcagacatccgcgggacaagaagtacagcgagaactcctcgaacagaagcgtctccacgagaaggaccttaaagaggttcaacaaagcctcgtccttgctttgcggcaaggcaagaaggagtctgccgatgtactgtcgaaactcaaaccattgacggttggcgcacgcctgactaggcatcgagatgatagcgacgatacggcgaacgcagccagaccggccaaacacgtaaaactagattcgcaggaacaaagaacccttgcttgcccgtttctcaagcacaacccctcgatctacaagacgtggagatcttgttcctggtctggctggcgaaccacccatcgactcaaagagcacctgattaggaagcatgtattgcccaagtacatatgcaaccgttgcaagcaagacttcaagtcacagattctgctgtttgaccatcagacacttcctgactcgtgtctgatccaggcaggcgggccgcaagagggcattgatgatacgcagctccaagccatacgatcgaagaagaagccttctgggcgaactaatatgtccgaagaggaaaagtgggcgaacatttacaaagtcctctttccacatgatgaccctatcccgtcaccttatcacaattgcaattgggcagaatctggcagttctccagtattatcccgaaatcaaacccttaccttgcttgaggatttgggcaaccatgcacggcatgagcttccgaagctgatgcgacccggtttggaattgttgttcaacgcgaatcccaatgcgccatgctcacgcgatgacattatagagatagcccaagacgctatccaacaggttatacaaaatttcaaatcggacagatccgttgttcacatatccgcgccgtcatgcgaagaacagcggcgcatcagggatcattccgaagcttgcactccgaccgttgcaaattcgtccgagacacgagctaccggcgagcatgtgagtgttttggtcgataacggcgaatatggtttcgctgagggagaggtgtacccatttctccaagacaccctttttgagtctttagaggcatttgatttctcatttgacgaagccactgcagcgcttccagcatcgacctagtgttagcaccatcctacagtaaaagcggaccattgatacatgatctccttgacttcttgaaggtcagaaagcagagcagtcacatgtttgggacggacgacctataactcaactcatgaatgagcatctccatagcaactcacgcccagttcatctgagatgattattaggttttgaagtagaatataaagattgtcgtgacactccgtgctcaaatactagagcaacggtaaagatcattgctattgtttcttcgtgtatagggcagagtagatgtaggccatgtatgattgtcaaagtggtccatttatagaaagtcatggttgtgaggtaatacgccatgctctatggcacctcatacaggggctcgggagtgtatatataaggtagccaccctccagtcaattcggtagttaaatagagattatcctgttattgtt

SEQ ID NO: 26450 - DNA, 816 bp, Muscodor strobelii
  misc_feature: SGI cDNA ID NO. 569047
  misc_feature: Elevated expression when VOC is produced
  misc_feature: Encodes the peptide sequence at SEQ ID NO 26451
atggctttaatttctctatccttctttctcataccgacaagtgcgaaatcgctgatcagtgtgtcgttaccaatagatcagctggagggccgtttctcggattttggacaagcactccagctcttgggtgtatcagacgtgaatcctaacaagttctcgaacaactgtgtatctgtcgccatcaccaagctccttgcctacaccgatgtccacgaattttggcacgagaccctcggcggcgacctgcccgacgtgtcgctcaacctagcccagatcgaacaacttctcgccaagacaaaatgggactttaagtggcgggttttcaaagcagactgcggaaaaagtgcgtacgtccagctttgccgcgcggggttcgtagccgacccccagttaagcccattccgtgccttaatctatacgcgcgctgaaggcgtgggccactgtgttgtttctggtgcagtgtacgaaatgggacatttgcacgacgactttgtgtgttaccaggaagacaagtatggtgtcaacgtcgagcatgaattgcaggccgcagatatgatgatcatgtgcttcctgagatgtccaagggagacaccgcaatgggatgcgtggcggcatcggcattttctaaggatgtttgagcggaggagagatccggtttggcgaggatgcagacttggagctgtcaacagagcactccaggcgttcggcaagaagacgattgataagtggcctgatgagaagagtgtcaagaagaagaaggctgacgacacattcaagtctacctcaaagtatgcaaatgtcaaactggaagcataa

SEQ ID NO: 26451 - protein, 271 aa, Muscodor strobelii
  misc_feature: SGI Peptide ID NO. 569047
  misc_feature: Useful for introducing or modulating the production of volatile compounds
MALISLSFFLIPTSAKSLISVSLPIDQLEGRFSDFGQALQLLGVSDVNPNKFSNNCVSVAITKLLAYTDVHEFWHETLGGDLPDVSLNLAQIEQLLAKTKWDFKWRVFKADCGKSAYVQLCRAGFVADPQLSPFRALIYTRAEGVGHCVVSGAVYEMGHLHDDFVCYQEDKYGVNVEHELQAADMMIMCFLRCPRETPQWDAWRHRHFLRMFERRRDPVWRGCRLGAVNRALQAFGKKTIDKWPDEKSVKKKKADDTFKSTSKYANVKLEA

SEQ ID NO: 26452 - DNA, 3970 bp, Muscodor strobelii
  misc_feature: SGI EST ID NO. CUFF.62564.2
  misc_feature: Variant of the nucleotide sequence at SEQ ID NO 26450
gttcgccagccagaccaggaacaagatctccacgtcttgtagatcgaggggttgtgcttgagaaacgggcaagcaagggttctttgttcctgcgaatctagttttacgtgtttggccggtctggctgcgttcgccgtatcgtcgctatcatctcgatgcctagtcaggcgtgcgccaaccgtcaatggtttgagtttcgacagtacatcggcagactccttcttgccttgccgcaaagcaaggacgaggctttgttgaacctctttaaggtccttctcgtggagacgcttctgttcgaggagttctcgctgtacttcttgtcccgcggatgtctgatcaagtgtttgcttctcgatcacaatctgcctctgtatatcaaggacggcatctaagcgaagatccttgatgcgatcaacgctctgcagcgccgacttgcgggcagcagaatgcctgagcgtcttgtagccgtctagcagcatgggcttccagcagatttcccgaaattgtttttcgagctcgtcgtcaagtccgccgtaatggtttttggacccgtgaaggcccttcactgccggacgttcgcgcactgagatgcttttgagaatggagaatgatttattttcatcttgctctacttcggatagtttaggatcgggcttgacaagaccactacctaatagttggccgtcgatagagaggcggctgctgagatcgaccaagtccgactcaatctgatggtctagccttcgtagcatattcgtgattgcagtactcatattgaagactttgcgcccatctagtatacctagttgggtgtcttgagttgtctcgctggcataagatctggtgatgtggcttttgggcgtgtcgagcttgtgttgttgggttttatcctccatttcgtgcctgtgctgtgtgccggtgactaaatcaagtgttagagtatgtaaacgcagagtgttataaatacatctatatatacctccggctcttttctgatatgcgtctaattgtgcatagctgcgagatgctccaggggagtttgtcggtgtcgcatttggctggtgttggcgatgtgcgcaattgcgatattccctaagatgtggggtagcctctctcagctgtctctcagtagcaacaccgaagaccactgagccgcctactgaaagaagggtggttaacaacttgcaaaggccaccaaaagtaaacgacataaagacatccctcttcccgtgtgatcgcgaaatagagagacatcgtttgcttgaggttgagtactccaaaactatcttgatctcatccaacctgctgttgacactcctttgagagcacttgcacgacgtccctaatcactcccacaccgcctcgaaattgagcataaaaacctgacccgtccacgcctatcacggcttcgagacccagctctacaacacaaaggcacatatttgcatacttcaaatcagcgatattcatactcgtcacatctgtggctggcctagctagacgactcgcgcttatcaaatatgtcaagtagcgccccaactagcagattggatcagctggagggccgtttctcggattttggacaagcactccagctcttgggtgtatcagacgtgaatcctaacaagttctcgaacaactgtgtatctgtcgccatcaccaagctccttgcctacaccgatgtccacgaattttggcacgagaccctcggcggcgacctgcccgacgtgtcgctcaacctagcccagatcgaacaacttctcgccaagacaaaatgggactttaagtggcgggttttcaaagcagactgcggaaaaagtgcgtacgtccagctttgccgcgcggggttcgtagccgacccccagttaagcccattccgtgccttaatctatacgcgcgctgaaggcgtgggccactgtgttgtttctggtgcagtgtacgaaatgggacatttgcacgacgactttgtgtgttaccaggaagacaagtatggtgtcaacgtcgagcatgaattgcaggccgcagatatgatgatcatgtgcttcctgagatgtccaagggagacaccgcaatgggatgcgtggcggcatcggcattttctaaggatgtttgagcggaggagagatccggtttggcgaggatgcagacttggagctgtcaacagagcactccaggcgttcggcaagaagacgattgataagtggcctgatgagaagagtgtcaagaagaagaaggctgacgacacattcaagtctacctcaaagtatgcaaatgtcaaactggaagcataacacttctctgatattgtctttgagaaattagagtacaaagcaaccaatatccaaaagaagctggggtctctgggatactacatgtcggacaatgcagaatcttcggcacttgggatagcaagggtaatctacaatgacatagagtaacagacaacgtggtagaataagttctttgcacatcaatcccttcatgactgacgcaaagtagaatagatatgcaaggtccagtgtatgtagagaaatatgcacccagtgagatgatacggcggtggaaagtggctctccaaggcgactgaataggccatcatagcgctatggatgtatatttttgtcgattcaactagtatctttagatcttatacacaatcttgtagtttgagatctttccatcccgatactcctggaatccttctgcaacagcgtctagtccgacatctagtactttaggtatatttggcttgatttgcccatgagtgagccaatcaggcattttcttgaatagttctttcacgatggcgtgatcgtgttcattagcctacgcgtataggaattagtcatctgaatatgctgtctttatagctgtgccaacttaccggccacttgaactcgccatacgcatgatccttcaagaatgctgtccatactaacacatccgtcactttggtctgttgagagcaattttcagtatgtgtcttgccaggacggacagtgcacagcgtcccgcccgattctgagatgacctgagaggcagtcacggacgttgacgttttcccgatagtatcgaaaacatacaacacattggaacattgctgcttaatgagctcggcgaccttctcgtcattatagtcaaagacatgtttagcgcctaagcccttcacgagatcgaagtatcgtgggctacatgtcgcgatgacatcgatattgttaatggcggcgatctggatgacatactggcctacactagcttttgattttcttgagtgtcaggatagaagtgctaatgagaaatgtttaacaatatggacttacagcttccaccccagacgagtagcgtgcctttgggactagaacggtcgatagcgagactatctttagagaacaatgctagctccgccgtagcgactgcaagtggcagagtggaggctgctgcatcggaaatgccctccggaatcttgaaagaaatggcttcatctgcaatggtatactcgctgtaaccaccgcgcccctttatttcacctgcagatcgaattagctataaaatattcagtatcaggtaaggataagtcgatcttaccaccccaaataagaccggcaatcttagtgccaacttttgtttgtgtattatccccgcctgcctcaaccgtgccgacgaaatcgcagcccaaaatggccccgtcgccgaaagcatttccatcgaaagattgaactgtacaggtatgtcagaagcttttgactacgatggacgtcctttcgataccgtcggtgggattttgcgcaacgtattcgaccttaacgactaactcatgcacggcgggacttggggttgggatctgctctttggataattgcggggtctttccatcagggagtctgacgaccacagcatcacagatttcagggggcgccataatgtacttgactgaaagctaaatttgcggaaagtgacaggaaacacaaag

SEQ ID NO: 26453 - DNA, 1047 bp, Muscodor strobelii
  misc_feature: SGI cDNA ID NO. 569048
  misc_feature: Encodes the peptide sequence at SEQ ID NO 26454
atggcgccccctgaaatctgtgatgctgtggtcgtcagactccctgatggaaagaccccgcaattatccaaagagcagatcccaaccccaagtcccgccgtgcatgagttagtcgttaaggtcgaatacgttgcgcaaaatcccaccgacgttcaatctttcgatggaaatgctttcggcgacggggccattttgggctgcgatttcgtcggcacggttgaggcaggcggggataatacacaaacaaaagttggcactaagattgccggtcttatttggggtggtgaaataaaggggcgcggtggttacagcgagtataccattgcagatgaagccatttctttcaagattccggagggcatttccgatgcagcagcctccactctgccacttgcagtcgctacggcggagctagcattgttctctaaagatagtctcgctatcgaccgttctagtcccaaaggcacgctactcgtctggggtggaagctctagtgtaggccagtatgtcatccagatcgccgccattaacaatatcgatgtcatcgcgacatgtagcccacgatacttcgatctcgtgaagggcttaggcgctaaacatgtctttgactataatgacgagaaggtcgccgagctcattaagcagcaatgttccaatgtgttgtatgttttcgatactatcgggaaaacgtcaacgtccgtgactgcctctcaggtcatctcagaatcgggcgggacgctgtgcactgtccgtcctggcaagacacatactgaaaattgctctcaacagaccaaagtgacggatgtgttagtatggacagcattcttgaaggatcatgcgtatggcgagttcaagtggccggctaatgaacacgatcacgccatcgtgaaagaactattcaagaaaatgcctgattggctcactcatgggcaaatcaagccaaatatacctaaagtactagatgtcggactagacgctgttgcagaaggattccaggagtatcgggatggaaagatctcaaactacaagattgtgtataagatctaa

SEQ ID NO: 26454 - protein, 348 aa, Muscodor strobelii
  misc_feature: SGI Peptide ID NO. 569048
  misc_feature (34)..(117): Pfam Id: PF08240 Pfam Desc: Alcohol dehydrogenase GroES-like domain
  misc_feature (153)..(301): Pfam Id: PF00107 Pfam Desc: Zinc-binding dehydrogenase
  misc_feature (153)..(240): Pfam Id: PF00107 Pfam Desc: Zinc-binding dehydrogenase
  misc_feature (8)..(348): NCBI GI: 256731947 Blast Desc: NECHADRAFT_41262 [Nectria haematococca mpVI 77-13-4]
  misc_feature (21)..(348): NCBI GI: 238502073 Blast Desc: alcohol dehydrogenase, [Aspergillus flavus NRRL3357] gi|220691080|gb|EED47428.1| alcohol dehydrogenase, [Aspergillus flavus NRRL3357]
  misc_feature (1)..(348): NCBI GI: 145237124 Blast Desc: An07g01200 [Aspergillus niger] gi|134075675|emb|CAK96567.1| protein product [Aspergillus niger]
  misc_feature (1)..(348): NCBI GI: 259485314 Blast Desc: TPA: conserved [Aspergillus nidulans FGSC A4]
  misc_feature (1)..(347): NCBI GI: 145252980 Blast Desc: An16g07030 [Aspergillus niger] gi|134083560|emb|CAK47023.1| protein product [Aspergillus niger]
  misc_feature (1)..(348): NCBI GI: 115390563 Blast Desc: conserved [Aspergillus terreus NIH2624] gi|114193710|gb|EAU35410.1| conserved [Aspergillus terreus NIH2624]
  misc_feature (9)..(336): NCBI GI: 46125743 Blast Desc: FG07249.1 [Gibberella zeae PH-1]
  misc_feature (9)..(348): NCBI GI: 121712122 Blast Desc: zinc-binding dehydrogenase family oxidoreductase, [Aspergillus clavatus NRRL 1] gi|119401828|gb|EAW12250.1| zinc-binding dehydrogenase family oxidoreductase, [Aspergillus 1]
  misc_feature (1)..(348): NCBI GI: 67538174 Blast Desc: AN5257.2 [Aspergillus nidulans FGSC A4] gi|40743017|gb|EAA62207.1| AN5257.2 [Aspergillus nidulans FGSC A4]
  misc_feature (32)..(348): NCBI GI: 256725633 Blast Desc: NECHADRAFT_94354 [Nectria haematococca mpVI 77-13-4]
  misc_feature (12)..(214): SWISSPROT Homolog: EC 1.6.5.5 NADPH:quinone reductase
MAPPEICDAVVVRLPDGKTPQLSKEQIPTPSPAVHELVVKVEYVAQNPTDVQSFDGNAFGDGAILGCDFVGTVEAGGDNTQTKVGTKIAGLIWGGEIKGRGGYSEYTIADEAISFKIPEGISDAAASTLPLAVATAELALFSKDSLAIDRSSPKGTLLVWGGSSSVGQYVIQIAAINNIDVIATCSPRYFDLVKGLGAKHVFDYNDEKVAELIKQQCSNVLYVFDTIGKTSTSVTASQVISESGGTLCTVRPGKTHTENCSQQTKVTDVLVWTAFLKDHAYGEFKWPANEHDHAIVKELFKKMPDWLTHGQIKPNIPKVLDVGLDAVAEGFQEYRDGKISNYKIVYKI

SEQ ID NO: 26455 - DNA, 2283 bp, Muscodor strobelii
  misc_feature: SGI EST ID NO. CUFF.62565.3
  misc_feature: Variant of the nucleotide sequence at SEQ ID NO 26453
gtataagagccgcccatttgaacaatatttgctagcaaatttagacatatactttgtgtttcctgtcactttccgcaaatttagctttcagtcaagtacattatggcgccccctgaaatctgtgatgctgtggtcgtcagactccctgatggaaagaccccgcaattatccaaagagcagatcccaaccccaagtcccgccgtgcatgagttagtcgttaaggtcgaatacgttgcgcaaaatcccaccgacggtatcgaaaggacgtccatcgtagtcaaaagcttctgacatacctgtacagttcaatctttcgatggaaatgctttcggcgacggggccattttgggctgcgatttcgtcggcacggttgaggcaggcggggataatacacaaacaaaagttggcactaagattgccggtcttatttggggtggtgaaataaaggggcgcggtggttacagcgagtataccattgcagatgaagccatttctttcaagattccggagggcatttccgatgcagcagcctccactctgccacttgcagtcgctacggcggagctagcattgttctctaaagatagtctcgctatcgaccgttctagtcccaaaggcacgctactcgtctggggtggaagctctagtgtaggccagtatgtcatccagatcgccgccattaacaatatcgatgtcatcgcgacatgtagcccacgatacttcgatctcgtgaagggcttaggcgctaaacatgtctttgactataatgacgagaaggtcgccgagctcattaagcagcaatgttccaatgtgttgtatgttttcgatactatcgggaaaacgtcaacgtccgtgactgcctctcaggtcatctcagaatcgggcgggacgctgtgcactgtccgtcctggcaagacacatactgaaaattgctctcaacagaccaaagtgacggatgtgttagtatggacagcattcttgaaggatcatgcgtatggcgagttcaagtggccggctaatgaacacgatcacgccatcgtgaaagaactattcaagaaaatgcctgattggctcactcatgggcaaatcaagccaaatatacctaaagtactagatgtcggactagacgctgttgcagaaggattccaggagtatcgggatggaaagatctcaaactacaagattgtgtataagatctaaagatactagttgaatcgacaaaaatatacatccatagcgctatgatggcctattcagtcgccttggagagccactttccaccgccgtatcatctcactgggtgcatatttctctacatacactggaccttgcatatctattctactttgcgtcagtcatgaagggattgatgtgcaaagaacttattctaccacgttgtctgttactctatgtcattgtagattacccttgctatcccaagtgccgaagattctgcattgtccgacatgtagtatcccagagaccccagcttcttttggatattggttgctttgtactctaatttctcaaagacaatatcagagaagtgttatgcttccagtttgacatttgcatactttgaggtagacttgaatgtgtcgtcagccttcttcttcttgacactcttctcatcaggccacttatcaatcgtcttcttgccgaacgcctggagtgctctgttgacagctccaagtctgcatcctcgccaaaccggatctctcctccgctcaaacatccttagaaaatgccgatgccgccacgcatcccattgcggtgtctcccttggacatctcaggaagcacatgatcatcatatctgcggcctgcaattcatgctcgacgttgacaccatacttgtcttcctggtaacacacaaagtcgtcgtgcaaatgtcccatttcgtacactgcaccagaaacaacacagtggcccacgccttcagcgcgcgtatagattaaggcacggaatgggcttaactgggggtcggctacgaaccccgcgcggcaaagctggacgtacgcactttttccgcagtctgctttgaaaacccgccacttaaagtcccattttgtcttggcgagaagttgttcgatctgggctaggttgagcgacacgtcgggcaggtcgccgccgagggtctcgtgccaaaattcgtggacatcggtgtaggcaaggagcttggtgatggcgacagatacacagttgttcgagaacttgttaggattcacgtctgatacacccaagagctggagtgcttgtccaaaatccgagaaacggccctcca

SEQ ID NO: 26456 - DNA, 1785 bp, Muscodor strobelii
  misc_feature: SGI cDNA ID NO. 569049
  misc_feature: Encodes the peptide sequence at SEQ ID NO 26457
atgcgactgatcggtgccttcgagttgctcattgttgggctagtggcacaaagccgagtgcaggcacagaacagcacgttccacaaccccatcttgcctgggtggaactccgatccgagctgcaccttcgtcaaggaatggaacgatacgctattttgtaccacgtcgtctttcttgatattccctggcatacctgtatacgctagcaaggacttcgtcaattggaagcacatcagcaatgccttaaccagaccggagcagctgcccgaactatctcgcaattcgatgcagcaagaaggtatatgggcttccacacttcgctaccgggacggaatcttttatttgatcacatcttatgtttcctggtatgaaggatggggtcctatcatccttctcttcacgaccacggatccatacgacgacgcgtcttggacaggacccttgcgagttgagaaccccgcaaacgacattgaccctgatatattctgggacaacggcaaggtgtacatgtcagtcgccgctggcatttatatcagtgagattgacctagcaacgggcgctgcgaaagagcccatcaaagtctggaacggcactggcgatcgcaatccagagggtcctcatctgtatcgccggtcaagcgacgattactactatctgctgatcggcgagggcggcactgagacgaaccattctgtgacaattgcacgttcaaccaggctcaatgggacatacgaaggctttgccggcaaccctatcctcaccgccaagaacacagatgcgtacttccagactgtcggacatgctgacttatttcaggatggcgctggcaattggtggggtgtagcactggcgactcggtctggctcggcgtgggaagtctacccaatgggtcgcgagacggtgttatttgctgcgagctggccaactaacggatggccaaaactagatcaagtacgcgggactatgacgggacccttgccgcctcgcaatagtgacatatggggagacggacactggattcatgatccggacattgttgacttccaacctgggacacaactaccgcgtcattttgtcacctggaggccaacgacgaacaattcctttgtcgctgtctctgccgccggcaagcacgctaatacactgcgtatccgtccctcgagggtcaacttgaccgcaaccggtgaaaacagcacattcaacccggcgatcgatggcccggccttcatcgcgcgcaaacaggacgccacattgttcaacttcactttggatgtcgacttcgcaccgaaggcgatcggcgaagaagccggcatcaccgtattcctcacgcagctgcagcatattgacctgggtattgtagtgctccccgaggtggaggcttcgtcatacgatcgtcacagcggcaattcttcttcgcccattccttgctttcggtttcgagtcgaagcttccggtaaacctgagcttgggagcgacgaagtccccgcagatatcgtagttgcggttccgcaggagtggcggcaagaaagaatccgattatccgtcgaggctgtgagcgatatcaaatatgttttcagtgcatccccggccacgcggctacatgagcgcatggatattgggacggcgagcgcattgattgtatcaggcggtagtggcccattcatgggcacgcttgttggcgcatacgcgacgagcaatggaggtagagaaaccacaccagcatattttagccgatggaggtatacgcaagtgggacaaaagattgattacgatgagataatatga

SEQ ID NO: 26457 - protein, 594 aa, Muscodor strobelii
  misc_feature: SGI Peptide ID NO. 569049
  misc_feature (27)..(313): Pfam Id: PF04616 Pfam Desc: Glycosyl hydrolases family 43
  misc_feature (20)..(594): NCBI GI: 261354726 Blast Desc: xylosidase/arabinosidase [Verticillium albo-atrum VaMs.102]
  misc_feature (10)..(594): NCBI GI: 119481499 Blast Desc: xylosidase : arabinofuranosidase [Neosartorya fischeri NRRL 181] gi|119408932|gb|EAW18881.1| xylosidase : arabinofuranosidase [Neosartorya fischeri NRRL 181]
  misc_feature (26)..(594): NCBI GI: 159129709 Blast Desc: xylosidase : arabinofuranosidase [Aspergillus fumigatus A1163]
  misc_feature (25)..(594): NCBI GI: 71001940 Blast Desc: xylosidase : arabinofuranosidase [Aspergillus fumigatus Af293] gi|66853289|gb|EAL93613.1| xylosidase : arabinofuranosidase [Aspergillus fumigatus Af293]
  misc_feature (25)..(588): NCBI GI: 238496851 Blast Desc: xylosidase : arabinofuranosidase [Aspergillus flavus NRRL3357] gi|220694541|gb|EED50885.1| xylosidase : arabinofuranosidase [Aspergillus flavus NRRL3357]
  misc_feature (24)..(594): NCBI GI: 145239325 Blast Desc: An08g01900 [Aspergillus niger] gi|134076816|emb|CAK39870.1| protein product [Aspergillus niger]
  misc_feature (1)..(594): NCBI GI: 115384220 Blast Desc: conserved [Aspergillus terreus NIH2624] gi|114196349|gb|EAU38049.1| conserved [Aspergillus terreus NIH2624]
  misc_feature (27)..(594): NCBI GI: 67902980 Blast Desc: AN8477.2 [Aspergillus nidulans FGSC A4] gi|40747943|gb|EAA67099.1| AN8477.2 [Aspergillus nidulans FGSC A4] gi|259484423|tpe|CBF80630.1| TPA: xylosidase : AFUA_2G13190)
  misc_feature (24)..(593): NCBI GI: 116198477 Blast Desc: CHGG_07394 [Chaetomium globosum CBS 148.51] gi|88178673|gb|EAQ86141.1| CHGG_07394 [Chaetomium globosum CBS 148.51]
  misc_feature (7)..(589): NCBI GI: 256724755 Blast Desc: NECHADRAFT_95941 [Nectria haematococca mpVI 77-13-4]
  misc_feature (28)..(584): SWISSPROT Homolog: EC 3.2.1.55 Alpha-N-arabinofuranosidase
  misc_feature (28)..(584): SWISSPROT Homolog: EC 3.2.1.37 Xylan 1,4-beta-xylosidase
MRLIGAFELLIVGLVAQSRVQAQNSTFHNPILPGWNSDPSCTFVKEWNDTLFCTTSSFLIFPGIPVYASKDFVNWKHISNALTRPEQLPELSRNSMQQEGIWASTLRYRDGIFYLITSYVSWYEGWGPIILLFTTTDPYDDASWTGPLRVENPANDIDPDIFWDNGKVYMSVAAGIYISEIDLATGAAKEPIKVWNGTGDRNPEGPHLYRRSSDDYYYLLIGEGGTETNHSVTIARSTRLNGTYEGFAGNPILTAKNTDAYFQTVGHADLFQDGAGNWWGVALATRSGSAWEVYPMGRETVLFAASWPTNGWPKLDQVRGTMTGPLPPRNSDIWGDGHWIHDPDIVDFQPGTQLPRHFVTWRPTTNNSFVAVSAAGKHANTLRIRPSRVNLTATGENSTFNPAIDGPAFIARKQDATLFNFTLDVDFAPKAIGEEAGITVFLTQLQHIDLGIVVLPEVEASSYDRHSGNSSSPIPCFRFRVEASGKPELGSDEVPADIVVAVPQEWRQERIRLSVEAVSDIKYVFSASPATRLHERMDIGTASALIVSGGSGPFMGTLVGAYATSNGGRETTPAYFSRWRYTQVGQKIDYDEII

SEQ ID NO: 26458 - DNA, 2125 bp, Muscodor strobelii
  misc_feature: SGI EST ID NO. CUFF.62475.0
  misc_feature: Variant of the nucleotide sequence at SEQ ID NO 26456
acgctatgtttgcacatccgtaatgaggaagcgatagtgcccatagatatcacgtcgactacttgtgagggaggccatcgtacgaattcgctctttcattaacatctgtcataaggatgtcttgatagctttggcacaaagccgagtgcaggcacagaacagcacgttccacaaccccatcttgcctgggtggaactccgatccgagctgcaccttcgtcaaggaatggaacgatacgctattttgtaccacgtcgtctttcttgatattccctggcatacctgtatacgctagcaaggacttcgtcaattggaagcacatcagcaatgccttaaccagaccggagcagctgcccgaactatctcgcaattcgatgcagcaagaaggtatatgggcttccacacttcgctaccgggacggaatcttttatttgatcacatcttatgtttcctggtatgaaggatggggtcctatcatccttctcttcacgaccacggatccatacgacgacgcgtcttggacaggacccttgcgagttgagaaccccgcaaacgacattgaccctgatatattctgggacaacggcaaggtgtacatgtcagtcgccgctggcatttatatcagtgagattgacctagcaacgggcgctgcgaaagagcccatcaaagtctggaacggcactggcgatcgcaatccagagggtcctcatctgtatcgccggtcaagcgacgattactactatctgctgatcggcgagggcggcactgagacgaaccattctgtgacaattgcacgttcaaccaggctcaatgggacatacgaaggctttgccggcaaccctatcctcaccgccaagaacacagatgcgtacttccagactgtcggacatgctgacttatttcaggatggcgctggcaattggtggggtgtagcactggcgactcggtctggctcggcgtgggaagtctacccaatgggtcgcgagacggtgttatttgctgcgagctggccaactaacggatggccaaaactagatcaagtacgcgggactatgacgggacccttgccgcctcgcaatagtgacatatggggagacggacactggattcatgatccggacattgttgacttccaacctgggacacaactaccgcgtcattttgtcacctggaggccaacgacgaacaattcctttgtcgctgtctctgccgccggcaagcacgctaatacactgcgtatccgtccctcgagggtcaacttgaccgcaaccggtgaaaacagcacattcaacccggcgatcgatggcccggccttcatcgcgcgcaaacaggacgccacattgttcaacttcactttggatgtcgacttcgcaccgaaggcgatcggcgaagaagccggcatcaccgtattcctcacgcagctgcagcatattgacctgggtattgtagtgctccccgaggtggaggcttcgtcatacgatcgtcacagcggcaattcttcttcgcccattccttgctttcggtttcgagtcgaagcttccggtaaacctgagcttgggagcgacgaagtccccgcagatatcgtagttgcggttccgcaggagtggcggcaagaaagaatccgattatccgtcgaggctgtgagcgatatcaaatatgttttcagtgcatccccggccacgcggctacatgagcgcatggatattgggacggcgagcgcattgattgtatcaggcggtagtggcccattcatgggcacgcttgttggcgcatacgcgacgagcaatggaggtagagaaaccacaccagcatattttagccgatggaggtatacgcaagtgggacaaaagattgattacgatgagataatatgattttaagtctaagcatggagatactcgccaggacagtctcctcagtggacatacacatttgacaaaataaatttgattttactgaattgaatcaatagcatggaatatctagacagtagttgaagctcgaagaggtaggttttaatgcatgagattgcgtagcctactatgcagaatggtcatcagattgattcccgctctcatctgactattttcctgttgggtatgcgacaagtcacaactaggtcgctt

SEQ ID NO: 26459 - DNA, 549 bp, Muscodor strobelii
  misc_feature: SGI cDNA ID NO. 569050
  misc_feature: Encodes the peptide sequence at SEQ ID NO 26460
atgccgccgacacagttgcctgccaacggcaatcctctggtattcttcgacgtcacacttggaggcgagcctcttggacgcatcacattcgagcttttcaaagatgtcgtaccccgaacagcagagaacttccggcagttttgcactggcgagtctaagaacagtcgtggtcagccacaagggtacaagggtagcaagttccatcgaatcatcccccaattcatgtgccagggaggcgactttctgaacggcgacggaacaggaagcacatgtatttacggaacgaagtctttcgcggacgaaaatttcactataagacacacgaaggctggtctgctgtctatggctaactcaggtcccaatacgaatggcagtcagttcttcatcacaacccagtccactccgcatctggatgggaagcacgtcgttttcggacaggtggtcaatggccaggatgtcgtggacaagatggagcgcacgaagacgggtagaagaggacgcgatatcccagacatggatatctctatcgcacagtgtggtgagatgtga

SEQ ID NO: 26460 - protein, 182 aa, Muscodor strobelii
  misc_feature: SGI Peptide ID NO. 569050
  misc_feature (13)..(182): Pfam Id: PF00160 Pfam Desc: Cyclophilin type peptidyl-prolyl cis-trans isomerase/CLD
  misc_feature (1)..(182): NCBI GI: 171695438 Blast Desc: protein product [Podospora anserina] gi|170947961|emb|CAP60125.1| protein product [Podospora anserina]
  misc_feature (1)..(182): NCBI GI: 85116219 Blast Desc: NCU02614 [Neurospora crassa OR74A] gi|74662782|sp|Q7SG06.1|PPIH_NEUCR RecName: Full=Peptidyl-prolyl cis-trans isomerase H; Short=PPIase H; Short=Rotamase H conserved
  misc_feature (1)..(182): NCBI GI: 256735426 Blast Desc: [Nectria haematococca mpVI 77-13-4]
  misc_feature (1)..(182): NCBI GI: 145613952 Blast Desc: conserved [Magnaporthe grisea 70-15] gi|145020954|gb|EDK05083.1| conserved [Magnaporthe grisea 70-15]
  misc_feature (1)..(182): NCBI GI: 46108004 Blast Desc: FG00884.1 [Gibberella zeae PH-1] gi|93140597|sp|Q4IPH4.1|PPIH_GIBZE RecName: Full=Peptidyl-prolyl cis-trans isomerase H; Short=PPIase H; Short=Rotamase H
  misc_feature (1)..(182): NCBI GI: 156054324 Blast Desc: conserved [Sclerotinia sclerotiorum 1980] gi|154703790|gb|EDO03529.1| conserved [Sclerotinia sclerotiorum 1980]
  misc_feature (1)..(182): NCBI GI: 154321307 Blast Desc: peptidyl-prolyl cis-trans isomerase [Botryotinia fuckeliana B05.10] gi|150852066|gb|EDN27258.1| peptidyl-prolyl cis-trans isomerase [Botryotinia fuckeliana B05.10]
  misc_feature (2)..(182): NCBI GI: 238845276 Blast Desc: peptidyl-prolyl cis-trans isomerase H [Microsporum canis CBS 113480]
  misc_feature (11)..(182): NCBI GI: 261203395 Blast Desc: peptidyl-prolyl cis-trans isomerase [Ajellomyces dermatitidis SLH14081] gi|239586696|gb|EEQ69339.1| peptidyl-prolyl cis-trans isomerase [Ajellomyces dermatitidis
  misc_feature (11)..(182): NCBI GI: 242798699 Blast Desc: peptidyl-prolyl cis-trans isomerase, [Talaromyces stipitatus ATCC 10500] gi|218716568|gb|EED15989.1| peptidyl-prolyl cis-trans isomerase, [Talaromyces stipitatus ATCC
  misc_feature (1)..(182): SWISSPROT Homolog: EC 5.2.1.8 Peptidylprolyl isomerase
MPPTQLPANGNPLVFFDVTLGGEPLGRITFELFKDVVPRTAENFRQFCTGESKNSRGQPQGYKGSKFHRIIPQFMCQGGDFLNGDGTGSTCIYGTKSFADENFTIRHTKAGLLSMANSGPNTNGSQFFITTQSTPHLDGKHVVFGQVVNGQDVVDKMERTKTGRRGRDIPDMDISIAQCGEM

SEQ ID NO: 26461 - DNA, 1893 bp, Muscodor strobelii
  misc_feature: SGI EST ID NO. CUFF.62493.0
  misc_feature: Variant of the nucleotide sequence at SEQ ID NO 26459
gccgaactcggctccaactccatttgacatcaccgatgagagttgagatgtcgacttgcagcaactgctactctacacatgatcgggtccatacaagagataacaacatatcatatctgtcgcatagcagagaatataccgggtacgtcaacaatgccaaatcattaataggttagggagagagaacgagacgatgctggagctccgcgcatagaacattagcttcgaagacccactcaagctcatatatcaatcgtccaacctggcgcaaatcgaaaatttgaagctggactgattccgtagctcaggtattcttttgggaggttggatggtctcccttatgttcttattgctgagattctaggctggaagctaccgtttcagtggaattcaacgtgggtatggcactacctaggggcccaaggtaagccccgccgctgggaccttggctaggtaggtgttccacctgtttttggcgcgcccctagtcggcacagcacctctaagcttctgtcaccaatcaccattcctgccgtcaattccaacctcatccagccaataacgaaattgaaacgaactttgactacggtccatatcgcaagtatgccgccgacacagttgcctgccaacggcaatcctctggtattcttcgacgtcacacttggaggcgagcctcttggacgcatcacattcgagcttttcaaagatgtcgtaccccgaacagcagagaacttccggcagttttgcactggcgagtctaagaacagtcgtggtcagccacaagggtacaagggtagcaagttccatcgaatcatcccccaattcatgtgccagggaggcgactttctgaacggcgacggaacaggaagcacagtatgatatgattgtcctcgcatccaacaaaagccgactgatacattgaaacagtgtatttacggaacgaagtctttcgcggacgaaaatttcactataagacacacgaaggctggtctgctgtctatggctaactcaggtcccaatacgaatggcagtcagttcttcatcacaacccagtccactccgcatctggatgggaagcacgtcgttttcggacaggtggtcaatggccaggatgtcgtggacaagatggagcgcacgaagacgggtagaagaggacgcgatatcccagacatggatatctctatcgcacagtgtggtgagatgtgagacgggcaaatgattttcaaaaaatggataaagaaagggccatcaaacttgggcaacttcaattgcccagcctcaggtttcgactcgcagtgaccataacgagtgtatcatcgatctcagatccgacgcggatctctgctccacatcacatggcgatattgcgataggaatgcgggtttgatcgatgaattctcattggtactatgtgatgcatgacactgatcccactgcgctatcatttgtagcatggttagacacatatgtctcgactgttttcgtctgcctctccggcacacgacagcggagctcggtattgactctgctatagcttgtctgcccacgagatatgaatctgatcttctgatccgcagtttttgatagaccaaaagaaatacttgcgcatcatcttgaaggctggtgtgtcgtagatcaagggctctctatgaaatatcttctcaaactcccgctgctatcaattggtgcagagatgcgcaatgcaaggggaagtcatatgttgccaaggtgtcattctgggtcatctcgaagcccgccggagtcattgatcttccctgtttcgacgtagcggacttgtaggtaatttgtcggatcattgttgggtcctaaaaggagtggccccatgtaggagcactagatgtcgatagcatcaggtttggtaccgaagagtaca

SEQ ID NO: 26462 - DNA, 498 bp, Muscodor strobelii
  misc_feature: SGI cDNA ID NO. 569051
  misc_feature: Encodes the peptide sequence at SEQ ID NO 26463
atgtcaatactgcaacggccaccaagtctcccacccggatacgcactgcgtcagggattaccctccgccgatgactatctcagagtccgaatcgcgagcggtatgtcagtgaagactaaagagcaagccaccgcagtcgtacgtggaagctggtatggttgtcacattgtctataccgatcctacggaaggcgagtccaaccgcgatactgagcttgtcgtcggagccggacgcatcattagtgatgggggctggtacttccatattgccgatattggcgtcgttgtcgaacaccaaaggcgaggactaggtaatgcgatattgggaaacttgttgcaatacatcgcggagaacgcagctgagggacaacctaccgtaaatttgatggcaaccaacgaggggcaagctttatacaaacgttatggattttacgattctacgcccgatggactacgggcgatgaaattgacgaaagggctgctgagaccgcagacttga

SEQ ID NO: 26463 - protein, 165 aa, Muscodor strobelii
  misc_feature: SGI Peptide ID NO. 569051
  misc_feature (73)..(144): Pfam Id: PF00583 Pfam Desc: Acetyltransferase (GNAT) family
  misc_feature (10)..(154): NCBI GI: 119473683 Blast Desc: GNAT family acetyltransferase, [Neosartorya fischeri NRRL 181] gi|119406870|gb|EAW16820.1| GNAT family acetyltransferase, [Neosartorya fischeri NRRL 181]
  misc_feature (8)..(154): NCBI GI: 146323139 Blast Desc: GNAT family N-acetyltransferase [Aspergillus fumigatus Af293] gi|129556484|gb|EBA27271.1| GNAT family N-acetyltransferase, [Aspergillus fumigatus Af293] GNAT family
  misc_feature (9)..(151): NCBI GI: 67540482 Blast Desc: AN6411.2 [Aspergillus nidulans FGSC A4] gi|40739243|gb|EAA58433.1| AN6411.2 [Aspergillus nidulans FGSC A4] gi|259479365|tpe|CBF69524.1| TPA: GNAT family AFUA_3G00870)
  misc_feature (4)..(156): NCBI GI: 238507217 Blast Desc: GNAT family N-acetyltransferase, [Aspergillus flavus NRRL3357] gi|220689523|gb|EED45874.1| GNAT family N-acetyltransferase, [Aspergillus flavus NRRL3357]
  misc_feature (9)..(148): NCBI GI: 121712377 Blast Desc: GNAT family N-acetyltransferase, [Aspergillus clavatus NRRL 1] gi|119401952|gb|EAW12374.1| GNAT family N-acetyltransferase, [Aspergillus clavatus NRRL 1]
  misc_feature (8)..(154): NCBI GI: 39969931 Blast Desc: MGG_10574 [Magnaporthe grisea 70-15] gi|149209261|ref|XP_001522005.1| MGCH7_ch7g123 [Magnaporthe grisea 70-15] gi|86196078|gb|EAQ70716.1| MGCH7_ch7g123 grisea
  misc_feature (4)..(148): NCBI GI: 240279356 Blast Desc: conserved [Ajellomyces capsulatus H143]
  misc_feature (4)..(148): NCBI GI: 225559617 Blast Desc: conserved [Ajellomyces capsulatus G186AR]
  misc_feature (10)..(163): NCBI GI: 258570687 Blast Desc: conserved [Uncinocarpus reesii 1704] gi|237904417|gb|EEP78818.1| conserved [Uncinocarpus reesii 1704]
  misc_feature (8)..(151): NCBI GI: 119183865 Blast Desc: CIMG_06809 [Coccidioides immitis RS]
MSILQRPPSLPPGYALRQGLPSADDYLRVRIASGMSVKTKEQATAVVRGSWYGCHIVYTDPTEGESNRDTELVVGAGRIISDGGWYFHIADIGVVVEHQRRGLGNAILGNLLQYIAENAAEGQPTVNLMATNEGQALYKRYGFYDSTPDGLRAMKLTKGLLRPQT

SEQ ID NO: 26464 - DNA, 3787 bp, Muscodor strobelii
  misc_feature: SGI EST ID NO. CUFF.62651.0
  misc_feature: Variant of the nucleotide sequence at SEQ ID NO 26462
cgcgactatacagcattttcaaccgttgagatgcatacagattggcctatgtttatccccaactgcacaactgctcgatcgaaacgaccgcgtaattgaacttgataatgtcaatactgcaacggccaccaagtctcccacccggatacgcactgcgtcagggattaccctccgccgatgactatctcagagtccgaatcgcgagcggtatgtcagtgaagactaaagagcaagccaccgcagtcgtacgtggaagctggtatggttgtcacattgtctataccgatcctacggaaggcgagtccaaccgcgatactgagcttgtcgtcggagccggacgcatcattagtgatgggggctggtacttccatattgccgatattggcgtcgttgtcgaacaccaaaggcgaggactaggtaatgcgatattgggaaacttgttgcaatacatcgcggagaacgcagctgagggacaacctaccgtaaatttgatggcaaccaacgaggggcaagctttatacaaacgttatggattttacgattctacgcccgatggactacgggcgatgaaattgacgaaagggctgctgagaccgcagacttgaccaagggcgagaatcaggagtaagaagtgaatgagacaaaattggaagcgattacagattgatcgtgcctaaagcgtgacctctatcctagcaagaagatgattaggcttccggataattcgcctcaacaaaccctcgagccgtcgagtctccaagtgcgtttgagttcgagatcttgtcactctttacatgatatgccggctattctcgattaatccgccgtagctgaaagttcgtcaatggtgccgagaataaatgttcagcttagtgttatcaatgcttcgtactctcgcaaacgtcatctaatatcacagccgcgagcttcgaactatcgataaagttcgcttcgtctgcctcacgcctcttcgcgttcgcaggttcgtacgcggaagccgtggatgcttggaagtgagcctcgtccgtaaacgtcatcacgaccatggcgtcgtaatcgaagtcttcctgctttccaacaatgatcgaagccccgccctctgtatctttgtggacatagtgtcgtttgtgcgaaagtggaaacaaagaccctgccatttcgtagaccagaggcatgtgcttgttttcgtagtagtccttgaactcctgcatcgtgatgcttggctttcgataagctttcattattactgtgtacaccatcttaagactgaaagtacgaaagacttggagaggacgaagtctatacagcctgtgatgggcgtagtttgttaaagaccactcggaagacctgcgttgccatttcgacagaatgtttcgtttccacggattgaactaagggatggtcttacgtcatgacaaaagagacgctatgttgaacatggcaatttctgaagttctagcgtgggttgtcattattccatgtcctgcggggcgaagacttctcatgctgcacccgacagttgcactcaacgttacaaactgaaacgggcgaaacgcgctgctgagtatcgaacgccatacacctattccgtagatcttcagctgtcgccttatcgggctccggcgccaatctgattcgcagtcgggcttaactagggtgaatccttgccagtgcaggtgcgcgatcatacgtcaaacaacagaatgccacgaggatctccagctggaaccattatcagatttcctgatcgtacatggtgagcttttcacaattccaaggcataaaacgtataatggagtcttcaaccggttattcccaaggaggaattgacgtgagatctgtgacgcctcatatgacaagggatctattttgccaagggatgaaattttcttttgaaggacgtgcacgagatgcaggaggattcaaatccgacaaactcgagacggacgccgaacctcctatcatcaacacagtcatctcaatagacatttaagatagaatagatatcattttgcacccgtaccgacaaacttgatgacaggacgccaagattgcctcccgaggacccattattcacacaaggctagtatccagactagtttcgaacgacgatcacgcaatccctcatttcagcctttatcgtcgaacctcgtcgcattttgtctcatggtcaatatcatgctaatgtcgcgcatttcataatacaactgactttttgagagacctaacccaagacaccacgcctgatttttcactcctcacgatcgtattcattcctcgctatcggccgtacataatgcaagacgtagagaaagcggcgccgacgccgctgagtagcggctcattggagcagctcaataagcccaatgcgacctcttccagtttcctcgccaggttctccgatatgttggatcctcggatagtctacattccaatgctagtttgctgcttcgccacgggtttgacggatgggacggtcttcggaggtaggcgcttggcatgaaacgagttcagaccctccgaccgtgactaatatcatcatcagcttatagcacttttgtgtcgatgcaaacgggtatggcgatgattttatggcgtaacaggaagtcgaatcgaactcagtgttgatattcctcgcataggtaataccgtcttcatcgcgcttggagcatcgggacagaacgtgattccattcgcttgggcccgctcattaacatcgctcggtgcctttatcgcgggctgcgtgactttttcgcgatgccatactctcttaggaagtggtcgcaggcgacgaacagcatttctatctttccttgcgcagacaatttttcttgtaatcgccgcggctctgattcagagtggtgtcatcaaagctcattcgaccgccgagaatagcgctagcgatttcacggatctagcaccgatcgcattgatcagcttccaggccgccggacagatcgtaaacagccgggggctgggcgtgagcgaagttcccagcgtggtcataacgacgcttctgtgcgatttggtcagcgacccatcaatccttgttccattgccggccaatgcaaagcggaataagcgtgctgttgcattcacgctcactcttctgggtgcgatcgtcggtggctttgtgtttaaagctaccggtggattggaatggtacgtatagaaagatcccatccgagttattttttgattgtattcctaagacaagttattaacttctttatagtaagtgacctaatctgtcaactatcagattttagccctttgttttaagaccggcggccccgcaaatagtcgtgaaaaataactaactcaatacctttctggctaccagacagtctgtggattgttgccgggctcaagggcttaattacactattttgggtggtcgctcccagcgaagaggagaaagcgtaggaagttctttcggtacagacctgataatcggcatcattgcaatcatagaagagaagaacaataaagaaatttagatagacatagatagactagacggctgagaagctgatagaaggtgcaaagacatggactaatgtacgcctaaacgcctctcaatatccccatagcaatgatgggatggcctggttgcagaagacagataattgacagagctctgtccagtgtatctatactcggaaaatgccggacaataatgttgcaacgtttcaacaaataaattcaagtcaacctttcattttccgttttccatgtgagttgtctcgtccgcgacccgtcatgaatatttgtggttgccttatac

SEQ ID NO: 26465 - DNA, 381 bp, Muscodor strobelii
  misc_feature: SGI cDNA ID NO. 569052
  misc_feature: Encodes the peptide sequence at SEQ ID NO 26466
atggtgtacacagtaataatgaaagcttatcgaaagccaagcatcacgatgcaggagttcaaggactactacgaaaacaagcacatgcctctggtctacgaaatggcagggtctttgtttccactttcgcacaaacgacactatgtccacaaagatacagagggcggggcttcgatcattgttggaaagcaggaagacttcgattacgacgccatggtcgtgatgacgtttacggacgaggctcacttccaagcatccacggcttccgcgtacgaacctgcgaacgcgaagaggcgtgaggcagacgaagcgaactttatcgatagttcgaagctcgcggctgtgatattagatgacgtttgcgagagtacgaagcattga

SEQ ID NO: 26466 - protein, 126 aa, Muscodor strobelii
  misc_feature: SGI Peptide ID NO. 569052
  misc_feature (1)..(123): Pfam Id: PF07110 Pfam Desc: EthD protein
  misc_feature (1)..(124): NCBI GI: 238499091 Blast Desc: conserved [Aspergillus flavus NRRL3357] gi|220692533|gb|EED48879.1| conserved [Aspergillus flavus NRRL3357]
  misc_feature (17)..(124): NCBI GI: 169778524 Blast Desc: [Aspergillus oryzae RIB40] gi|83772465|dbj|BAE62594.1| protein product [Aspergillus oryzae]
  misc_feature (1)..(120): NCBI GI: 256725421 Blast Desc: NECHADRAFT_83030 [Nectria haematococca mpVI 77-13-4]
  misc_feature (3)..(120): NCBI GI: 89212418 Blast Desc: E [Aspergillus parasiticus]
  misc_feature (3)..(125): NCBI GI: 238497409 Blast Desc: aflMa/ hypE/ [Aspergillus flavus NRRL3357] gi|220694820|gb|EED51164.1| aflMa/ hypE/ [Aspergillus flavus NRRL3357]
  misc_feature (11)..(125): NCBI GI: 237870955 Blast Desc: E protein [Aspergillus flavus] gi|237870965|gb|ACR25924.1| E protein [Aspergillus flavus] gi|237871019|gb|ACR25951.1| E protein [Aspergillus flavus]
  misc_feature (11)..(125): NCBI GI: 237870953 Blast Desc: E protein [Aspergillus flavus] gi|237870957|gb|ACR25920.1| E protein [Aspergillus flavus] gi|237870959|gb|ACR25921.1| E protein [Aspergillus flavus] E E E
  misc_feature (11)..(125): NCBI GI: 237870949 Blast Desc: E protein [Aspergillus flavus]
  misc_feature (11)..(125): NCBI GI: 237871041 Blast Desc: E protein [Aspergillus flavus] gi|237871043|gb|ACR25963.1| E protein [Aspergillus flavus] gi|237871049|gb|ACR25966.1| E protein [Aspergillus flavus]
  misc_feature (11)..(125): NCBI GI: 237870997 Blast Desc: E protein [Aspergillus flavus]
MVYTVIMKAYRKPSITMQEFKDYYENKHMPLVYEMAGSLFPLSHKRHYVHKDTEGGASIIVGKQEDFDYDAMVVMTFTDEAHFQASTASAYEPANAKRREADEANFIDSSKLAAVILDDVCESTKH

SEQ ID NO: 26467 - DNA, 3821 bp, Muscodor strobelii
  misc_feature: SGI EST ID NO. CUFF.62652.1
  misc_feature: Variant of the nucleotide sequence at SEQ ID NO 26465
gtataaggcaaccacaaatattcatgacgggtcgcggacgagacaactcacatggaaaacggaaaatgaaaggttgacttgaatttatttgttgaaacgttgcaacattattgtccggcattttccgagtatagatacactggacagagctctgtcaattatctgtcttctgcaaccaggccatcccatcattgctatggggatattgagaggcgtttaggcgtacattagtccatgtctttgcaccttctatcagcttctcagccgtctagtctatctatgtctatctaaatttctttattgttcttctcttctatgattgcaatgatgccgattatcaggtctgtaccgaaagaacttcctacgctttctcctcttcgctgggagcgaccacccaaaatagtgtaattaagcccttgagcccggcaacaatccacagactgtctggtagccagaaagttgacagattaggtcacttactataaagaagttaataacttgtcttaggaatacaatcaaaaaataactcggatgggatctttctatacgtaccattccaatccaccggtagctttaaacacaaagccaccgacgatcgcacccagaagagtgagcgtgaatgcaacagcacgcttattccgctttgcattggccggcaatggaacaaggattgatgggtcgctgaccaaatcgcacagaagcgtcgttatgaccacgctgggaacttcgctcacgcccagcccccggctgtttacgatctgtccggcggcctggaagctgatcaatgcgatcggtgctagatccgtgaaatcgctagcgctattctcggcggtcgaatgagctttgatgacaccactctgaatcagagccgcggcgattacaagaaaaattgtctgcgcaaggaaagatagaaatgctgttcgtcgcctgcgaccacttcctaagagagtatggcatcgcgaaaaagtcacgcagcccgcgataaaggcaccgagcgatgttactatatccacaatcagcagggcgtcgtactacatgaggacgacagtagacttgtctatacgtgagagaatatcgaaggcacgcaacaatctgcttagggcaacttacatgagcgggcccaagcgaatggaatcacgttctgtcccgatgctccaagcgcgatgaagacggtattacctatgcgaggaatatcaacactgagttcgattcgacttcctgttacgccataaaatcatcgccatacccgtttgcatcgacacaaaagtgctataagctgatgatgatattagtcacggtcggagggtctgaactcgtttcatgccaagcgcctacctccgaagaccgtcccatccgtcaaacccgtggcgaagcagcaaactagcattggaatgtagactatccgaggatccaacatatcggagaacctggcgaggaaactggaagaggtcgcattgggcttattgagctgctccaatgagccgctactcagcggcgtcggcgccgctttctctacgtcttgcattatgtacggccgatagcgaggaatgaatacgatcgtgaggagtgaaaaatcaggcgtggtgtcttgggttaggtctctcaaaaagtcagttgtattatgaaatgcgcgacattagcatgatattgaccatgagacaaaatgcgacgaggttcgacgataaaggctgaaatgagggattgcgtgatcgtcgttcgaaactagtctggatactagccttgtgtgaataatgggtcctcgggaggcaatcttggcgtcctgtcatcaagtttgtcggtacgggtgcaaaatgatatctattctatcttaaatgtctattgagatgactgtgttgatgataggaggttcggcgtccgtctcgagtttgtcggatttgaatcctcctgcatctcgtgcacgtccttcaaaagaaaatttcatcccttggcaaaatagatcccttgtcatatgaggcgtcacagatctcacgtcaattcctccttgggaataaccggttgaagactccattatacgttttatgccttggaattgtgaaaagctcaccatgtacgatcaggaaatctgataatggttccagctggagatcctcgtggcattctgttgtttgacgtatgatcgcgcacctgcactggcaaggattcaccctagttaagcccgactgcgaatcagattggcgccggagcccgataaggcgacagctgaagatctacggaataggtgtatggcgttcgatactcagcagcgcgtttcgcccgtttcagtttgtaacgttgagtgcaactgtcgggtgcagcatgagaagtcttcgccccgcaggacatggaataatgacaacccacgctagaacttcagaaattgccatgttcaacatagcgtctcttttgtcatgacgtaagaccatcccttagttcaatccgtggaaacgaaacattctgtcgaaatggcaacgcaggtcttccgagtggtctttaacaaactacgcccatcacaggctgtatagacttcgtcctctccaagtctttcgtactttcagtcttaagatggtgtacacagtaataatgaaagcttatcgaaagccaagcatcacgatgcaggagttcaaggactactacgaaaacaagcacatgcctctggtctacgaaatggcagggtctttgtttccactttcgcacaaacgacactatgtccacaaagatacagagggcggggcttcgatcattgttggaaagcaggaagacttcgattacgacgccatggtcgtgatgacgtttacggacgaggctcacttccaagcatccacggcttccgcgtacgaacctgcgaacgcgaagaggcgtgaggcagacgaagcgaactttatcgatagttcgaagctcgcggctgtgatattagatgacgtttgcgagagtacgaagcattgataacactaagctgaacatttattctcggcaccattgacgaactttcagctacggcggattaatcgagaatagccggcatatcatgtaaagagtgacaagatctcgaactcaaacgcacttggagactcgacggctcgagggtttgttgaggcgaattatccggaagcctaatcatcttcttgctaggatagaggtcacgctttaggcacgatcaatctgtaatcgcttccaattttgtctcattcacttcttactcctgattctcgcccttggtcaagtctgcggtctcagcagccctttcgtcaatttcatcgcccgtagtccatcgggcgtagaatcgtaaaatccataacgtttgtataaagcttgcccctcgttggttgccatcaaatttacggtaggttgtccctcagctgcgttctccgcgatgtattgcaacaagtttcccaatatcgcattacctagtcctcgcctttggtgttcgacaacgacgccaatatcggcaatatggaagtaccagcccccatcactaatgatgcgtccggctccgacgacaagctcagtatcgcggttggactcgccttccgtaggatcggtatagacaatgtgacaaccataccagcttccacgtacgactgcggtggcttgctctttagtcttcactgacataccgctcgcgattcggactctgagatagtcatcggcggagggtaatccctgacgcagtgcgtatccgggtgggagacttggtggccgttgcagtattgacattatcaagttcaattacgcggtcgtttcgatcgagcagttgtgcagttggggataaacataggccaatctgtatgcatctcaacggttgaaaatgctgtatagtcgcg

SEQ ID NO: 26468 - DNA, 750 bp, Muscodor strobelii
  misc_feature: SGI cDNA ID NO. 569053
  misc_feature: Reduced expression when VOC is produced
  misc_feature: Encodes the peptide sequence at SEQ ID NO 26469
atgcaagacgtagagaaagcggcgccgacgccgctgagtagcggctcattggagcagctcaataagcccaatgcgacctcttccagtttcctcgccaggttctccgatatgttggatcctcggatagtctacattccaatgctagtttgctgcttcgccacgggtttgacggatgggacggtcttcggagcttatagcacttttgtgtcgatgcaaacgggtaataccgtcttcatcgcgcttggagcatcgggacagaacgtgattccattcgcttgggcccgctcattaacatcgctcggtgcctttatcgcgggctgcgtgactttttcgcgatgccatactctcttaggaagtggtcgcaggcgacgaacagcatttctatctttccttgcgcagacaatttttcttgtaatcgccgcggctctgattcagagtggtgtcatcaaagctcattcgaccgccgagaatagcgctagcgatttcacggatctagcaccgatcgcattgatcagcttccaggccgccggacagatcgtaaacagccgggggctgggcgtgagcgaagttcccagcgtggtcataacgacgcttctgtgcgatttggtcagcgacccatcaatccttgttccattgccggccaatgcaaagcggaataagcgtgctgttgcattcacgctcactcttctgggtgcgatcgtcggtggctttgtgtttaaagctaccggtggattggaatggtacgtatag

SEQ ID NO: 26469 - protein, 249 aa, Muscodor strobelii
  misc_feature: SGI Peptide ID NO. 569053
  misc_feature (21)..(245): NCBI GI: 121711002 Blast Desc: DUF1275 domain protein [Aspergillus clavatus NRRL 1] gi|119401267|gb|EAW11691.1| DUF1275 domain protein [Aspergillus clavatus NRRL 1]
  misc_feature (50)..(242): NCBI GI: 159128603 Blast Desc: DUF1275 domain protein [Aspergillus fumigatus A1163]
  misc_feature (50)..(242): NCBI GI: 70988661 Blast Desc: DUF1275 domain protein [Aspergillus fumigatus Af293] gi|66846820|gb|EAL87151.1| DUF1275 domain protein [Aspergillus fumigatus Af293]
  misc_feature (1)..(238): NCBI GI: 156049025 Blast Desc: SS1G_08219 [Sclerotinia sclerotiorum 1980] gi|154692618|gb|EDN92356.1| SS1G_08219 [Sclerotinia sclerotiorum 1980]
  misc_feature (38)..(242): NCBI GI: 255951212 Blast Desc: Pc22g24850 [Penicillium chrysogenum Wisconsin 54-1255] gi|211593390|emb|CAP99773.1| Pc22g24850 [Penicillium chrysogenum Wisconsin 54-1255]
  misc_feature (45)..(245): NCBI GI: 145256251 Blast Desc: An10g00830 [Aspergillus niger CBS 513.88] gi|85720871|gb|ABC75847.1| DUF1275 domain protein [Aspergillus niger] gi|89888451|gb|ABD78718.1| conserved [Aspergillus niger]
  misc_feature (34)..(242): NCBI GI: 119497693 Blast Desc: NFIA_032720 [Neosartorya fischeri NRRL 181] gi|119413768|gb|EAW23707.1| conserved [Neosartorya fischeri NRRL 181]
  misc_feature (29)..(245): NCBI GI: 115437810 Blast Desc: [Aspergillus terreus NIH2624] gi|114188720|gb|EAU30420.1| [Aspergillus terreus NIH2624]
  misc_feature (31)..(245): NCBI GI: 169777427 Blast Desc: [Aspergillus oryzae RIB40] gi|83771916|dbj|BAE62046.1| protein product [Aspergillus oryzae]
  misc_feature (71)..(245): NCBI GI: 238494562 Blast Desc: DUF1275 domain protein [Aspergillus flavus NRRL3357] gi|220695167|gb|EED51510.1| DUF1275 domain protein [Aspergillus flavus NRRL3357]
  misc_feature: Useful for introducing or modulating the production of volatile compounds
MQDVEKAAPTPLSSGSLEQLNKPNATSSSFLARFSDMLDPRIVYIPMLVCCFATGLTDGTVFGAYSTFVSMQTGNTVFIALGASGQNVIPFAWARSLTSLGAFIAGCVTFSRCHTLLGSGRRRRTAFLSFLAQTIFLVIAAALIQSGVIKAHSTAENSASDFTDLAPIALISFQAAGQIVNSRGLGVSEVPSVVITTLLCDLVSDPSILVPLPANAKRNKRAVAFTLTLLGAIVGGFVFKATGGLEWYV

SEQ ID NO: 26470 - DNA, 3787 bp, Muscodor strobelii; identical to SEQ ID NO: 26464
  misc_feature: SGI EST ID NO. CUFF.62651.0
  misc_feature: Variant of the nucleotide sequence at SEQ ID NO 26468

SEQ ID NO: 26471 - DNA, 1086 bp, Muscodor strobelii
  misc_feature: SGI cDNA ID NO. 569054
  misc_feature: Reduced expression when VOC is produced
  misc_feature: Encodes the peptide sequence at SEQ ID NO 26472
atggatgaatatgttaccacctccaatgttattaataaaagtgtttctgactccagtaacggcctactcaactatccatttgctacaacgtcatggtcttcaagtgacccattttcttctcttattgcgtcgtctcatttagcagattatggagccagacataaactacatcatgatggttttagcggtttcgctaaagaatcgaacattagcaaagacaaaatccaggaatccgcagaactcgaccgagatacgatgctgtatcagagtcatcggaagttaggagtgccgtgcgacaacatgttacctcgagcctttctctacagcgcaaatactatagacatacaacaaccgatattagtagatcatttgaaggatgctaatagtgtttcacctcctgtatacgaggacttgtatgcacattctttgtcttcagccgaacacatagactcggttgagaattcaacacaacagagctgcaacttgagcagacaatggagttccttgactcgacacgaaagctacgattgtatagactcgccgctcagcaactccgatacattatcacataatgtcgactacgatacacttctgtcagacgcgactcgacctgcctctcaacctaacctacataatcttcccatacacccgaccataccgttaccttatgctggcgttgagttctaccatccggcgacgggccaaaatataggcgttttggacctgaaagacgcccacattatgccaaagcccagccagacgcttgaatcatcatcgtcaacgactgaagtttccacgcagcaagacgatagaaagacgcggaaatatcaatgcatttactcagactgtccttatacagcagatgcaaagaaggatatcgatcggcaccttgaaaccgaaaagcattccaatcgttcctcagatcaagcgcactctcgaaagaaattctcatgcgactccccaggatgcgaatactcgtgttcccgaaaagataatctcacaagacacaccctatcagtgcataaagtacgggtccacggcgagaaacgggctcgcaagaaacggcgtcgagaagaaatcgattag

SEQ ID NO: 26472 - protein, 361 aa, Muscodor strobelii
  misc_feature: SGI Peptide ID NO. 569054
  misc_feature (242)..(344): NCBI GI: 85079127 Blast Desc: NCU05024 [Neurospora crassa OR74A] gi|28917350|gb|EAA27057.1| [Neurospora crassa OR74A]
  misc_feature: Useful for introducing or modulating the production of volatile compounds
MDEYVTTSNVINKSVSDSSNGLLNYPFATTSWSSSDPFSSLIASSHLADYGARHKLHHDGFSGFAKESNISKDKIQESAELDRDTMLYQSHRKLGVPCDNMLPRAFLYSANTIDIQQPILVDHLKDANSVSPPVYEDLYAHSLSSAEHIDSVENSTQQSCNLSRQWSSLTRHESYDCIDSPLSNSDTLSHNVDYDTLLSDATRPASQPNLHNLPIHPTIPLPYAGVEFYHPATGQNIGVLDLKDAHIMPKPSQTLESSSSTTEVSTQQDDRKTRKYQCIYSDCPYTADAKKDIDRHLETEKHSNRSSDQAHSRKKFSCDSPGCEYSCSRKDNLTRHTLSVHKVRVHGEKRARKKRRREEID

SEQ ID NO: 26473 - DNA, 1982 bp, Muscodor strobelii
  misc_feature: SGI EST ID NO. CUFF.62659.1
  misc_feature: Variant of the nucleotide sequence at SEQ ID NO 26471
atctactcatgtagcctgctgtggcctgaggttgtctatgatgcttcattcgtctattataaatttcggaccatccgttgggcgagattcctttctcgatatggacatattaatgcagccaattgccagtctcctttgacattgcggacgtcgaacatgaagatggatgaatatgttaccacctccaatgttattaataaaagtgtttctgactccagtaacggcctactcaactatccatttgctacaacgtcatggtcttcaagtgacccattttcttctcttattgcgtcgtctcatttagcagattatggagccagacataaactacatcatgatggttttagcggtttcgctaaagaatcgaacattagcaaagacaaaatccaggaatccgcagaactcgaccgagatacgatgctgtatcagagtcatcggaagttaggagtgccgtgcgacaacatgttacctcgagcctttctctacagcgcaaatactatagacatacaacaaccgatattagtagatcatttgaaggatgctaatagtgtttcacctcctgtatacgaggacttgtatgcacattctttgtcttcagccgaacacatagactcggttgagaattcaacacaacagagctgcaacttgagcagacaatggagttccttgactcgacacgaaagctacgattgtatagactcgccgctcagcaactccgatacattatcacataatgtcgactacgatacacttctgtcagacgcgactcgacctgcctctcaacctaacctacataatcttcccatacacccgaccataccgttaccttatgctggcgttgagttctaccatccggcgacgggccaaaatataggcgttttggacctgaaagacgcccacattatgccaaagcccagccagacgcttgaatcatcatcgtcaacgactgaagtttccacgcagcaagacgatagaaagacgcggaaatatcaatgcatttactcagactgtccttatacagcagatgcaaagaaggatatcgatcggcaccttgaaaccgaaaagcattccaatcgttcctcagatcaagcgcactctcgaaagaaattctcatgcgactccccaggatgcgaatactcgtgttcccgaaaagataatctcacaagacacaccctatcagtgcataaagtacgggtccacggcgagaaacgggctcgcaagaaacggcgtcgagaagaaatcgattagaatctgatagacgaggacccccacaattcgagatgccgatgagagtgcaacacaagacttgagacagatgtaggtgccgaagttggatgtcccttgttatagagcgagaggaaattcgatcgatacgtgtgtgctttagaggaactaatatacttatattccacctcctattgcctatggtagtgtcagttgcctctgagtgaaaactgtacctgcgtattccttcttagcacgcttgatgtcgggttgagtgcgtttagttagatatgatgagatatctcagtgtggaatagaagtgcgaagtgatatgtctatgtcgacgcgacttatacgggttctgctgaagtaaagcgattgataattctcaaatcctgcatttcaacaatgttccggacgggtggttgattagatttatggtgtttcggtccgtatccgaaatacgtacgaaatgcgtgcgcattcgaccctcctctcgcatacagtaggtgactatacactaggttaggggcgggtggtcgattagataaagctgcttgatcgtcattttgttccatcgtcagggctcaaagttgtcggagtatctggcggggtgagcttggtttatctattgatcaaaaaaaatacagcatatccaactttcaagtggatttactacgtgggccttatgaggcagagatgaggttcttatgtgggcatcgctacgggctttgttagtggggatctacgaacaaagc

SEQ ID NO: 26474 - DNA, 1014 bp, Muscodor strobelii
  misc_feature: SGI cDNA ID NO. 569055
  misc_feature: Encodes the peptide sequence at SEQ ID NO 26475
atggatgagataacacagaagcaacaatatgaatttctcaacggcaaatattttgagctagcccccatccatgcaggtagatttcttccaccgctgaactatgctgcggcggtgggcaagctcgaatttgttaagcttcttgctgtagagcagccccaagggctagacttcaccacgcttcgatctcgtgtatggcagaccttgtataaggactttcaaccagacatggagccgcaattagaaccactttccaactgtgaaacatcattcggagaagaagaatggagggtcccctatcgagggcatcattcgtgtctcattcatgagaagagtggcgggtccaaccggtgcatggatgccttggatatggctctcgcagctggacgtgacgatgtcgcttgctatctgatcgaagagaaaattattgacatctggagtcctaccccggatggggaccgaccaaaacagatattgttcaaggcttgccgttaccacctgatcgaaactatagtgtgcttacttcagagccatagattcagcgtacaagaattagaagaggcactgcgcaatgtcagcagttcggttcaaaaacacacggatgtttctgagaatttcattcatttcgcgtgcgaattaggcgaaaagctgaatcgagacggagctcagggtacggtgaactcactcgtgcatcttgatactctcagactaggctgcaaagtggttcagtccaggcccgagcttgcaatacctagcggtgatgaagcattcttctttgacatctcaatacaacgctatgcatgtcgaaaggaagcaattttttggaaagagttcttgattataaatatcttgctagccgcaggggtcagtttgtattcatatgggaaaactctaaagcaccttattgagttgatgatcgagtatgagaggaatacgaagggtgctgtcggtaatcatgcggaatacctgaatttggacgagtacggacggctgcgagataagctgtttcgtcgctag

SEQ ID NO: 26475 - protein, 337 aa, Muscodor strobelii
  misc_feature: SGI Peptide ID NO. 569055
MDEITQKQQYEFLNGKYFELAPIHAGRFLPPLNYAAAVGKLEFVKLLAVEQPQGLDFTTLRSRVWQTLYKDFQPDMEPQLEPLSNCETSFGEEEWRVPYRGHHSCLIHEKSGGSNRCMDALDMALAAGRDDVACYLIEEKIIDIWSPTPDGDRPKQILFKACRYHLIETIVCLLQSHRFSVQELEEALRNVSSSVQKHTDVSENFIHFACELGEKLNRDGAQGTVNSLVHLDTLRLGCKVVQSRPELAIPSGDEAFFFDISIQRYACRKEAIFWKEFLIINILLAAGVSLYSYGKTLKHLIELMIEYERNTKGAVGNHAEYLNLDEYGRLRDKLFRR

SEQ ID NO: 26476 - DNA, 2029 bp, Muscodor strobelii
  misc_feature: SGI EST ID NO. CUFF.62558.0
  misc_feature: Variant of the nucleotide sequence at SEQ ID NO 26474
tgcaaatacacccgagcaccgcatgctttcggcacactgcatttgacagcaacatcaggccattgctcaaaaggagtgccgaagcccaatgccatgcacctttcattatcaagttcttggaggtgcttgatcctaatgatccactgcagctcgaatactttaagtcattgctttattggtatcgcaaaatggatgagataacacagaagcaacaatatgaatttctcaacggcaaatattttgagctagcccccatccatgcaggtagatttcttccaccgctgaactatgctgcggcggtgggcaagctcgaatttgttaagcttcttgctgtagagcagccccaagggctagacttcaccacgcttcgatctcgtgtatggcagaccttgtataaggactttcaaccagacatggagccgcaattagaaccactttccaactgtgaaacatcattcggagaagaagaatggagggtcccctatcgagggcatcattcgtgtctcattcatgagaagagtggcgggtccaaccggtgcatggatgccttggatatggctctcgcagctggacgtgacgatgtcgcttgctatctgatcgaagagaaaattattgacatctggagtcctaccccggatggggaccgaccaaaacagatattgttcaaggcttgccgttaccacctgatcgaaactatagtgtgcttacttcagagccatagattcagcgtacaagaattagaagaggcactgcgcaatgtcagcagttcggttcaaaaacacacggatgtttctgagaatttcattcatttcgcgtgcgaattaggcgaaaagctgaatcgagacggagctcagggtacggtgaactcactcgtgcatcttgatactctcagactaggctgcaaagtggttcagtccaggcccgagcttgcaatacctagcggtgatgaagcattcttctttgacatctcaatacaacgctatgcatgtcgaaaggaagcaattttttggaaagagttcttgattataaatatcttgctagccgcaggggtcagtttgtattcatatgggaaaactctaaagcaccttattgagttgatgatcgagtatgagaggaatacgaagggtgctgtcggtaatcatgcggaatacctgaatttggacgagtacggacggctgcgagataagctgtttcgtcgctaggttgtcgttcaattagccatataacgaactcaagagcgaaggactacttgtcaactctttactgtcgatggttatttcgattcattcgctaatcgtttcttctcatgctttacgcattagaccatctacagcaaaatttcgaggaaaacgcaggcttactgtcctgaaaatgaatatgactagatcgctgtgaggttttacataaaatctcatagttgccaaaaactcactcaaccttacgttttctattatcgaaagctcagacatgtgcctgcaatatctagttgcattggttgttcagctagtgagtgaaatcggcgtcgaggtgaccacccctcgattgcactcttctttaagcaatcaacgcgattattatgaggataggcagatgccgaaaacatgtcgcaatttaattctgctatattcatgtacatttagcagtgaacttcgagtgatctgcgacagacaggaactctggtcgtcggctactctagtgaagcagcacgagttttggacattgaccatcgcggcaatctcacaagattgaggaggaatctaggaaggtcaaatctagaaccgacgaatttacgcaaacataagtactaaactaagatcacctgacaggagacgcgagcaattgtgccaatattgaaacacccattatgtgcgttatggtgtatcccacttgactatcgatgcctcttccagagggtacactagcgtcatagagctgacacgttccgctaatatcatgcgcggaactcctcttataattactgtattcttctgttttggacttgatcatttcgatccgcgtgcatgaaaac

SEQ ID NO: 26477 - DNA, 1500 bp, Muscodor strobelii
  misc_feature: SGI cDNA ID NO. 569056
  misc_feature: Encodes the peptide sequence at SEQ ID NO 26478
atggcccctacacatctaggcgggccagtcaatttggccatgcttggcctatcactttgcgttctttacgtagtaggaagcgccttctataacgttttcctacatcctctgcgaaaatatccaggcccgctacttaacaaattgtctccaatacctcgtaactgggcatttgcaagaggacgactgtcttttgacctactcgagctacataaacgctatggcacggctgttcgggttggccctaacgaggtcgttttcagtagcccggaagcttggcaagatatctatggacatcggaaagccggcgaggaggaattcccaaagtttgaagggttctacagattatttaagcaccagccagcaagcctccttgccgaaaagcgccacgaacacggcttaatccgtcgtcagatgtcacacggtttcagtgacaaaaccatgcgcgcacaagagcccataattggagcgtatgtcaacttgttgatccagcgccttcatgaagctctagatagaaacccagcgacatcggtggacctgagcaagtactataactggaccactttcgacgtaatcggtgatcttgcatttggttcacccggcggattcggatgcctcgagcagaatgcctaccacccgtgggttcagctgataactgacactattttacaaggagcttacttcttcgccttggctggagttggatttaagaagcccatacaattcttcgccgagtggctcaaaacggcagataacgatcaccaggccatcgtgagagagaaagtggcgcagaggatggaacttggtgccgatgtacgacccgacttcatcggaggtctgctgaagaaagaaaaggaattaaatatcgactttggtcgcttgtgccagaatgcctcattactcattatcgctggctctgaaacgactgccactctgctgtccggagccacgttcctactcacaacacaccctgaggtcctccacaagctagaggcggaagtgcgttctagcttcagaagtgaagaagagatcacactgactagtgttggcaacctgtcatacatgctcgccgtcttaaacgagtctctgcgccggtatccacctgttgttacagggttgccgagagttgggcctcgcggtggtgcggtagttgatggtcatgctgtgccggaaggtactgttgtttccgtcttccagtggccagtcaaccataacgagaaatattggaccgatcctcttgatttccggccggagcgctggttaggcgatgaaaagtataagaacgatcgccacgatgcgatgcaaccattcagtgttggtccacgtaattgcatcggccgcaaccttgcgtatgccgagatgcgactcatactatcgaaacttattttcaactttgacatggccttggcggatagcgcgaaggactggctacacaaccaaaaggcttatgtcctctggaacaagcctgagctgcccatatacctcaagcgtgttgttcgataa

SEQ ID NO: 26478 - protein, 499 aa, Muscodor strobelii
  misc_feature: SGI Peptide ID NO. 569056
  misc_feature (43)..(496): Pfam Id: PF00067 Pfam Desc: Cytochrome P450
  misc_feature (295)..(465): Pfam Id: PF00067 Pfam Desc: Cytochrome P450
  misc_feature (8)..(499): NCBI GI: 224969386 Blast Desc: cytochrome P450 ClCP1 [Glomerella lindemuthiana]
  misc_feature (18)..(499): NCBI GI: 164423577 Blast Desc: NCU08128 [Neurospora crassa OR74A] gi|157070153|gb|EAA30435.2| conserved [Neurospora crassa OR74A]
  misc_feature (6)..(499): NCBI GI: 261202730 Blast Desc: cytochrome P450 monooxygenase [Ajellomyces dermatitidis SLH14081] gi|239590676|gb|EEQ73257.1| cytochrome P450 monooxygenase [Ajellomyces dermatitidis SLH14081]
  misc_feature (16)..(497): NCBI GI: 255933153 Blast Desc: Pc12g12330 [Penicillium chrysogenum Wisconsin 54-1255] gi|211582666|emb|CAP80860.1| Pc12g12330 [Penicillium chrysogenum Wisconsin 54-1255]
  misc_feature (6)..(499): NCBI GI: 239612397 Blast Desc: cytochrome P450 monooxygenase [Ajellomyces dermatitidis ER-3]
  misc_feature (11)..(494): NCBI GI: 212545779 Blast Desc: cytochrome P450 monooxygenase, [Penicillium marneffei ATCC 18224] gi|210064563|gb|EEA18658.1| cytochrome P450 monooxygenase, [Penicillium marneffei ATCC 18224]
  misc_feature (17)..(497): NCBI GI: 240277542 Blast Desc: trichothecene C-15 hydroxylase [Ajellomyces capsulatus H143]
  misc_feature (30)..(497): NCBI GI: 154285174 Blast Desc: [Ajellomyces capsulatus NAm1] gi|150407023|gb|EDN02564.1| [Ajellomyces capsulatus NAm1]
  misc_feature (10)..(494): NCBI GI: 242801842 Blast Desc: cytochrome P450, [Talaromyces stipitatus ATCC 10500] gi|218717197|gb|EED16618.1| cytochrome P450, [Talaromyces stipitatus ATCC 10500]
  misc_feature (14)..(494): NCBI GI: 242777790 Blast Desc: cytochrome P450 monooxygenase, [Talaromyces stipitatus ATCC 10500] gi|218722724|gb|EED22142.1| cytochrome P450 monooxygenase, [Talaromyces stipitatus ATCC 10500]
  misc_feature (37)..(466): SWISSPROT Homolog: EC 1.14.13.12 Benzoate 4-monooxygenase
MAPTHLGGPVNLAMLGLSLCVLYVVGSAFYNVFLHPLRKYPGPLLNKLSPIPRNWAFARGRLSFDLLELHKRYGTAVRVGPNEVVFSSPEAWQDIYGHRKAGEEEFPKFEGFYRLFKHQPASLLAEKRHEHGLIRRQMSHGFSDKTMRAQEPIIGAYVNLLIQRLHEALDRNPATSVDLSKYYNWTTFDVIGDLAFGSPGGFGCLEQNAYHPWVQLITDTILQGAYFFALAGVGFKKPIQFFAEWLKTADNDHQAIVREKVAQRMELGADVRPDFIGGLLKKEKELNIDFGRLCQNASLLIIAGSETTATLLSGATFLLTTHPEVLHKLEAEVRSSFRSEEEITLTSVGNLSYMLAVLNESLRRYPPVVTGLPRVGPRGGAVVDGHAVPEGTVVSVFQWPVNHNEKYWTDPLDFRPERWLGDEKYKNDRHDAMQPFSVGPRNCIGRNLAYAEMRLILSKLIFNFDMALADSAKDWLHNQKAYVLWNKPELPIYLKRVVR

SEQ ID NO: 26479 - DNA, 2068 bp, Muscodor strobelii
  misc_feature: SGI EST ID NO. CUFF.62606.0
  misc_feature: Variant of the nucleotide sequence at SEQ ID NO 26477
cttctgttctttatacattccatacacgacctgaacctagcaactacagcttgaccaataattctgaagttatatcacactcgatattgtttcgatatcgcataataacatcagagatactggagtgttcctaagactgcggtgaagctcccgaaacgccatcatggcccctacacatctaggcgggccagtcaatttggccatgcttggcctatcactttgcgttctttacgtagtaggaagcgccttctataacgttttcctacatcctctgcgaaaatatccaggcccgctacttaacaaattgtctccaatacctcgtaactgggcatttgcaagaggacgactgtcttttgacctactcgagctacataaacgctatggcacggctgttcgggttggccctaacgaggtcgttttcagtagcccggaagcttggcaagatatctatggacatcggaaagccggcgaggaggaattcccaaagtttgaagggttctacagattatttaagcaccagccagcaagcctccttgccgaaaagcgccacgaacacggcttaatccgtcgtcagatgtcacacggtttcagtgacaaaaccatgcgcgcacaagagcccataattggagcgtatgtcaacttgttgatccagcgccttcatgaagctctagatagaaacccagcgacatcggtggacctgagcaagtactataactggaccactttcgacgtaatcggtgatcttgcatttggttcacccggcggattcggatgcctcgagcagaatgcctaccacccgtgggttcagctgataactgacactattttacaaggagcttacttcttcgccttggctggagttggatttaagaagcccatacaattcttcgccgagtggctcaaaacggcagataacgatcaccaggccatcgtgagagagaaagtggcgcagaggatggaacttggtgccgatgtacgacccgacttcatcggaggtctgctgaagaaagaaaaggaattaaatatcgactttggtcgcttgtgccagaatgcctcattactcattatcgctggctctgaaacgactgccactctgctgtccggagccacgttcctactcacaacacaccctgaggtcctccacaagctagaggcggaagtgcgttctagcttcagaagtgaagaagagatcacactgactagtgttggcaacctgtcatacatgctcgccgtcttaaacgagtctctgcgccggtatccacctgttgttacagggttgccgagagttgggcctcgcggtggtgcggtagttgatggtcatgctgtgccggaaggtgtaagtctctttccagtctcatctatatcatggcaatcgttcttcgcagctttattaacttcaaatggcttagactgttgtttccgtcttccagtggccagtcaaccataacgagaaatattggaccgatcctcttgatttccggccggagcgctggttaggcgatgaaaagtataagaacgatcgccacgatgcgatgcaaccattcagtgttggtccacgtaattgcatcggccgcaaccttgcgtatgccgagatgcgactcatactatcgaaacttattttcaactttgacatggccttggcggatagcgcgaaggactggctacacaaccaaaaggcttatgtcctctggaacaagcctgagctgcccatatacctcaagcgtgttgttcgataagtgtatagttttcattagtgaaaggacatgctccggggcagggactttgtgccatgatgagtcggttcggagttgtgcgacgaaggaatctggaggagaggcgaggcccagcatgtggattgtataagaagtatgaattccgagagccttgagccgttaccaactccgcacagatcttggcgttgcttgttattgcggtaatggttgtattatgggaaggaacatttgagcattgggttaggtatccgttgagacgcgagccatgaattgaccatcacgtttgctctctacttcgccttcgaactatatctgctgtatcaagattaacaaat

SEQ ID NO: 26480 - DNA, 1944 bp, Muscodor strobelii
  misc_feature: SGI cDNA ID NO. 569057
  misc_feature: Reduced expression when VOC is produced
  misc_feature: Encodes the peptide sequence at SEQ ID NO 26481
atgaccagcaaagccgcgacgagacaggcgccgcatgagcggagaaaaggcgaagccgcacttagcgacttcgccgaatttgtcgagaagcagcaggctctgcgattccctagcgccaaaccgtctgcgcccaccactaagactgggcaaccagtggttgagcaccatgaggagctcgacattttagactcgcttaacctgaacgaccccgagccccagatcgccttgcgccagctcttgcttgcaccagccgaagacgaagatagccgagccaagttgggaacccacattgccgagcggttagcagaaggacatggcgagaccgtcttcgatcttggcttcgagaatagtggcgactcgatgcgcctcaatcgcgacgagtgggaccttgccttgaccagattaaaagacacagctaagagccagaacgctgattgtgatatattactcaccaagaacgttggtggcgacgcggaggccgagtcaactgccgctggtgatcacaaagaaaaagactgcacaggcaagatactgatccgctgccaccctgcgacagtagaaaacgtcattgagactcgcattgcagttgtcgggaatgttgatgcgggtaaaagctctatgcttggcgtgttagtcaagggtgaccttgacgatggccgtggaaaggctcgagtgaacctcttccgtcacaagcatgagattgagacggggcgaactagctctgtggggatggagatcatgggcttcgacaccatgggcaatgtcgtcacttcagataccccaggcagaaaattgtcgtgggaggagattggaaaacgtagtgccaaagtaatcactttcactgatcttgccggccacgaacggtatcttagaaccactgtctttggaatgctctccagcagccccaattattgtctccttatggtggctgccaacaacgggcttatcggtatgagcaaagagcaccttggtatcgctctggctttgaacgtccccatcatggtcgtcatcaccaaaatcgatatctgcccacctaatatcttggagcagactattcagcagatcacgaaaatcctcaaaagcccgggcgcgaaaaaaatgcccatctttatcaacaaccgggaggattgcatcaacacagcgacacagtttgttagccagagaatatgtcctgtgttccaagtctctaatgtcacaggcaagaacctggaccttgtccgaacgttcttgaatattttacctcaccatgggcgctacgattctgatgcgccattcgaatttcatgtcaatgatactttctcggttcctcacaccggaacggttgttagtggcatcgtcaaatccggtgtagctcatcaaggagatagtgtattaattggcccagactctcttggacagttcattcagacaagcatcaagtccatcgagcgcaagaggatcggtgtgccggctgcgtctgcaggacagtccgctagtttcgcactgaggagagtgaaaaggaaagaggtcagaaaaggcatggtgatgttacctaaaattgaggggcaaccattaccgcaagtttaccaggagtttgttgcggaggtgctcattctctcacacgcgacaactatcaaaacgaaataccaagccatgttacacgtcggaccagtctcacagacatgcgctatcatcgatgttgatcgtccattcatacggacaggtgaccgtgctaccgtcgcattccgctttgtacaacgccctgagtacttggcaccgggagatcggttactgtttcgtgagggtcgcacgaaaggacttggtattgtcaagtctgtcggttacgacaaaacgaaacctttgtcaggcaaacctctagatggcgactccaacaaaccagagggcccaaaagaacccgccgattcgaatttacaagcagcaccgagcgttagagtcggagcgtaa

SEQ ID NO: 26481 - protein, 647 aa, Muscodor strobelii
  misc_feature: SGI Peptide ID NO. 569057
  misc_feature (439)..(510): Pfam Id: PF03144 Pfam Desc: Elongation factor Tu domain 2
  misc_feature (192)..(415): Pfam Id: PF00009 Pfam Desc: Elongation factor Tu GTP binding domain
  misc_feature (519)..(607): Pfam Id: PF03143 Pfam Desc: Elongation factor Tu C-terminal domain
  misc_feature (6)..(616): NCBI GI: 85090629 Blast Desc: GTP-binding protein 1 [Neurospora crassa OR74A] gi|28919877|gb|EAA29272.1| GTP-binding protein 1 [Neurospora crassa OR74A]
  misc_feature (1)..(620): NCBI GI: 171680904 Blast Desc: protein product [Podospora anserina] gi|170940410|emb|CAP65636.1| protein product [Podospora anserina]
  misc_feature (1)..(636): NCBI GI: 156042121 Blast Desc: SS1G_11611 [Sclerotinia sclerotiorum 1980] gi|154695994|gb|EDN95732.1| SS1G_11611 [Sclerotinia sclerotiorum 1980]
  misc_feature (3)..(622): NCBI GI: 145602260 Blast Desc: MGG_12949 [Magnaporthe grisea 70-15] gi|145010696|gb|EDJ95352.1| MGG_12949 [Magnaporthe grisea 70-15]
  misc_feature (5)..(629): NCBI GI: 46111709 Blast Desc: FG02736.1 [Gibberella zeae PH-1]
  misc_feature (13)..(615): NCBI GI: 259489766 Blast Desc: TPA: GTP binding protein (GTPBP1), (AFU_orthologue; AFUA_5G12580) [Aspergillus nidulans FGSC A4]
  misc_feature (13)..(615): NCBI GI: 67515531 Blast Desc: AN0047.2 [Aspergillus nidulans FGSC A4] gi|40746210|gb|EAA65366.1| AN0047.2 [Aspergillus nidulans FGSC A4]
  misc_feature (121)..(634): NCBI GI: 116191557 Blast Desc: conserved [Chaetomium globosum CBS 148.51] gi|88181409|gb|EAQ88877.1| conserved [Chaetomium globosum CBS 148.51]
  misc_feature (13)..(615): NCBI GI: 119478783 Blast Desc: GTP binding protein (GTPBP1), [Neosartorya fischeri NRRL 181] gi|119407594|gb|EAW17543.1| GTP binding protein (GTPBP1), [Neosartorya fischeri NRRL 181]
  misc_feature (13)..(615): NCBI GI: 70997290 Blast Desc: GTP binding protein (GTPBP1) [Aspergillus fumigatus Af293] gi|66851031|gb|EAL91357.1| GTP binding protein (GTPBP1), [Aspergillus fumigatus Af293] gi|159126878|gb|EDP51994.1| GTP
  misc_feature: Useful for introducing or modulating the production of volatile compounds
MTSKAATRQAPHERRKGEAALSDFAEFVEKQQALRFPSAKPSAPTTKTGQPVVEHHEELDILDSLNLNDPEPQIALRQLLLAPAEDEDSRAKLGTHIAERLAEGHGETVFDLGFENSGDSMRLNRDEWDLALTRLKDTAKSQNADCDILLTKNVGGDAEAESTAAGDHKEKDCTGKILIRCHPATVENVIETRIAVVGNVDAGKSSMLGVLVKGDLDDGRGKARVNLFRHKHEIETGRTSSVGMEIMGFDTMGNVVTSDTPGRKLSWEEIGKRSAKVITFTDLAGHERYLRTTVFGMLSSSPNYCLLMVAANNGLIGMSKEHLGIALALNVPIMVVITKIDICPPNILEQTIQQITKILKSPGAKKMPIFINNREDCINTATQFVSQRICPVFQVSNVTGKNLDLVRTFLNILPHHGRYDSDAPFEFHVNDTFSVPHTGTVVSGIVKSGVAHQGDSVLIGPDSLGQFIQTSIKSIERKRIGVPAASAGQSASFALRRVKRKEVRKGMVMLPKIEGQPLPQVYQEFVAEVLILSHATTIKTKYQAMLHVGPVSQTCAIIDVDRPFIRTGDRATVAFRFVQRPEYLAPGDRLLFREGRTKGLGIVKSVGYDKTKPLSGKPLDGDSNKPEGPKEPADSNLQAAPSVRVGA

SEQ ID NO: 26482 - DNA, 3025 bp, Muscodor strobelii
  misc_feature: SGI EST ID NO. CUFF.62720.1
  misc_feature: Variant of the nucleotide sequence at SEQ ID NO 26480
gtcacaggtgagggacgtcaggggttgggatcagacgaatgtacctctaaccgtgttatcaggcggaaagaacatcagtaaggttgggcgaacttaaattggtaaaacgacaatgacagcatcgaaaagacagctttctttgaataacgcgcccctccccgaattactcacaccccaggactcattctctagtggcagtgctgagcctcattaacttgagctgatagtctatgactctgactctgcccatgtttattctacgcatgttccatctaattcagtctctgcaaacgtacaaacttcaactacttaattagtgtgtaacacagctcttaaatccggcgtctcttgcaccatcaacatttcgattctcgctgttcttcaatatcgccatcgctgaacgcgaattcctctgaccaaatgatcactcgaacataacggttcaaagtacttcgctctctgtgtatcaatatcaatcatgaccagcaaagccgcgacgagacaggcgccgcatgagcggagaaaaggcgaagccgcacttagcgacttcgccgaatttgtcgagaagcagcaggctctgcgattccctagcgccaaaccgtctgcgcccaccactaagactgggcaaccagtggttgagcaccatgaggagctcgacattttagactcgcttaacctgaacgaccccgagccccagatcgccttgcgccagctcttgcttgcaccagccgaagacgaagatagccgagccaagttgggaacccacattgccgagcggttagcagaaggacatggcgagaccgtcttcgatcttggcttcgagaatagtggcgactcgatgcgcctcaatcgcgacgagtgggaccttgccttgaccagattaaaagacacagctaagagccagaacgctgattgtgatatattactcaccaagaacgttggtggcgacgcggaggccgagtcaactgccgctggtgatcacaaagaaaaagactgcacaggcaagatactgatccgctgccaccctgcgacagtagaaaacgtcattgagactcgcattgcagttgtcgggaatgttgatgcgggtaaaagctctatgcttggcgtgttagtcaagggtgaccttgacgatggccgtggaaaggctcgagtgaacctcttccgtcacaagcatgagattgagacggggcgaactagctctgtggggatggagatcatgggcttcgacaccatgggcaatgtcgtcacttcagataccccaggcagtatgtgtaccaagtcacacgtagacggcctccagattgactaattcatcaccaggaaaattgtcgtgggaggagattggaaaacgtagtgccaaagtaatcactttcactgatcttgccggccacgaacggtatcttagaaccactgtctttggaatgctctccagcagccccaattattgtctccttatggtggctgccaacaacgggcttatcggtatgagcaaagagcaccttggtatcgctctggctttgaacgtccccatcatggtcgtcatcaccaaaatcgatatctgcccacctaatatcttggagcagactattcagcagatcacgaaaatcctcaaaagcccgggcgcgaaaaaaatgcccatctttatcaacaaccgggaggattgcatcaacacagcgacacagtttgttagccagagaatatgtcctgtgttccaagtctctaatgtcacaggcaagaacctggaccttgtccgaacgttcttgaatattttacctcaccatgggcgctacgattctgatgcgccattcgaatttcatgtcaatgatactttctcggttcctcacaccggaacggttgttagtggcatcgtcaaatccggtgtagctcatcaaggagatagtgtattaattggcccagactctcttggacagttcattcagacaagcatcaagtccatcgagcgcaagaggatcggtgtgccggctgcgtctgcaggacagtccgctagtttcgcactgaggagagtgaaaaggaaagaggtcagaaaaggcatggtgatgttacctaaaattgaggggcaaccattaccgcaagtttaccaggagtttgttgcggaggtgctcattctctcacacgcgacaactatcaaaacgaaataccaagccatgttacacgtcggaccagtctcacagacatgcgctatcatcgatgttgatcgtccattcatacggacaggtgaccgtgctaccgtcgcattccgctttgtacaacgccctgagtacttggcaccgggagatcggttactgtttcgtgagggtcgcacgaaaggacttggtattgtcaagtctgtcggttacgacaaaacgaaacctttgtcaggcaaacctctagatggcgactccaacaaaccagagggcccaaaagaacccgccgattcgaatttacaagcagcaccgagcgttagagtcggagcgtaagtgcttgtgaggcaacttggacttacaacgtgatcaaggatgatcaagaattggggagtaggttgtatgaaattgacgccaataacattatgattcatgctaagcgttgattgctgtcgtggctggttgacaggtcatgtgtaacttgaggaccacggagcggggtccgcggaatgaagttctcgcggagtcgatgcaagttcccggcgttaggtgttcgttgcaagtgtagcaattcgctcggggtgtcggattttactttggttccgacgcatataggcagttactgagaatttacttgtaccaaggatcggcttcctttggttgtgttcgtgtgtgctctcgtggtccatcgtggcagtgatcgaaggcatgtcattgcacgtaagctcgtatatggtaatcatggcatggggagggcagacgggtaggggtaaaataaactacgcacttgccagttctttgacgagataccaccaaagccaaatatttcaaagcaatcatagtagtggaattcctactacgaaatttaagtagatatataccgc

SEQ ID NO: 26483 - DNA, 1170 bp, Muscodor strobelii
  misc_feature: SGI cDNA ID NO. 569058
  misc_feature: Elevated expression when VOC is produced
  misc_feature: Encodes the peptide sequence at SEQ ID NO 26484
atggctacagcaactgtgtcaactgtgtctctgggagccagccaagggcttacttgggaggcagcagtctcgactgaaaagcctaccttgactatcaaacagatcctagcccagctcgatgggatctttccattggatgaagccattattgaagcgcttcctcctgggagcacctttgtctccgttgatcactttggaacgagcgcttggacaatcactggcagattggtagccctggatgcagatcaagaggagaaactttattttgtgaagattgcatatggagagaccggtcgaatcatgcttggtggcgaatttgagtcatccaaactaatatacgagactatgtccgatttcattcccgagccgtttggatttgggaagtacaaaggcccaggtccggctacctacttttatctatccgaattcgtcgatatggacacgactaccgctccagatcctgctgaatttacaagtaggcttgcacatctgcacaagacaagccagtctccgaccggggaattcgggttccacgtccaaacatgtgatggtgaccgggctcatgtagtagattggcagcaaagctgggcggttttctttcgtaacctgttccttggagtctgcgagctggatatcaagaggagtggctcttggccagaatacgaacaagctatcaagcaagtagcatggaaagtgataccgcgcctcctagagcctctccaggcaaagggccggcagctcaaaccttgcatcatacacggtgatctctgggagggtaacatgggtatcaacatggagattggcgatacgctgctgttcgatgctggctcctacttcgctcataatgagatggagctgggtcattggagatgcgaattcagctctgtatttcgctccaaattgtacttgaggcattacctccaaaattatccagcagcggaaccagcggaagagttcgatgatcgaaatcgcctatacagcctgaagggagcaataaactatgctgctggtcatccaggctctatcttaagaagaactgcttataacaacatgctctacctctgtgagaaatatgctccgctggacggtatagataagtacgacccgttgattgatccatcactcacaggggctcgaatcgtgcctcatttagatgacggcctcatttga

SEQ ID NO: 26484 - protein, 389 aa, Muscodor strobelii
  misc_feature: SGI Peptide ID NO. 569058
  misc_feature (47)..(358): Pfam Id: PF03881 Pfam Desc: Fructosamine kinase
  misc_feature (20)..(389): NCBI GI: 116214451 Blast Desc: CHGG_11066 [Chaetomium globosum CBS 148.51] gi|88175421|gb|EAQ82890.1| CHGG_11066 [Chaetomium globosum CBS 148.51]
  misc_feature (56)..(389): NCBI GI: 171678070 Blast Desc: protein product [Podospora anserina] gi|170937104|emb|CAP61762.1| protein product [Podospora anserina]
  misc_feature (35)..(362): NCBI GI: 145228563 Blast Desc: An01g01490 [Aspergillus niger] gi|134054681|emb|CAK43522.1| protein product [Aspergillus niger]
  misc_feature (38)..(374): NCBI GI: 240110347 Blast Desc: CPC735_063790 [Coccidioides posadasii C735 delta SOWgp]
  misc_feature (38)..(374): NCBI GI: 119180471 Blast Desc: CIMG_08864 [Coccidioides immitis RS]
  misc_feature (45)..(358): NCBI GI: 116206070 Blast Desc: CHGG_02328 [Chaetomium globosum CBS 148.51] gi|88182925|gb|EAQ90393.1| CHGG_02328 [Chaetomium globosum CBS 148.51]
  misc_feature (41)..(345): NCBI GI: 258563734 Blast Desc: [Uncinocarpus reesii 1704] gi|237908119|gb|EEP82520.1| [Uncinocarpus reesii 1704]
  misc_feature (40)..(360): NCBI GI: 261356147 Blast Desc: conserved [Verticillium albo-atrum VaMs.102]
  misc_feature (36)..(336): NCBI GI: 169765035 Blast Desc: [Aspergillus oryzae RIB40] gi|83764843|dbj|BAE54987.1| protein product [Aspergillus oryzae]
  misc_feature (51)..(316): NCBI GI: 258565153 Blast Desc: [Uncinocarpus reesii 1704] gi|237907022|gb|EEP81423.1| [Uncinocarpus reesii 1704]
  misc_feature: Useful for introducing or modulating the production of volatile compounds
MATATVSTVSLGASQGLTWEAAVSTEKPTLTIKQILAQLDGIFPLDEAIIEALPPGSTFVSVDHFGTSAWTITGRLVALDADQEEKLYFVKIAYGETGRIMLGGEFESSKLIYETMSDFIPEPFGFGKYKGPGPATYFYLSEFVDMDTTTAPDPAEFTSRLAHLHKTSQSPTGEFGFHVQTCDGDRAHVVDWQQSWAVFFRNLFLGVCELDIKRSGSWPEYEQAIKQVAWKVIPRLLEPLQAKGRQLKPCIIHGDLWEGNMGINMEIGDTLLFDAGSYFAHNEMELGHWRCEFSSVFRSKLYLRHYLQNYPAAEPAEEFDDRNRLYSLKGAINYAAGHPGSILRRTAYNNMLYLCEKYAPLDGIDKYDPLIDPSLTGARIVPHLDDGLI

SEQ ID NO: 26485 - DNA, 2091 bp, Muscodor strobelii
  misc_feature: SGI EST ID NO. CUFF.62574.0
  misc_feature: Variant of the nucleotide sequence at SEQ ID NO 26483
ccaatacagaattgactcaacaagccgatactcgcatagcatgactactaatacgtatgttttctggagcagatataacgaaacaggcccgtctcaagtcttaagaggagaagttgtgttccaaggtggtcgtaaagcggctccgcccccgctatcccctcatgctcaggtaacaaattggatactaccatcatggggcgggaactacagtagagagaatagcagtatgtatgtatggatgcagacgatgcacaatttaagaaacgtcgcgtccttccagaaaggaaatggcaacactatttaagcgccctctcggaacgacgttattggtcagagacgatgtagttagctgcatatcaccaacttccatcattgatgcattcgcacccttgtccgctcatcctggtcccagacaccatataatcatgaggctcttttactgagttcgtttcacagctggtttataatgctttcatcaagaccaattgcgcattatcgacatcattcttttcttacaaatacgttgatataccaaatggctacagcaactgtgtcaactgtgtctctgggagccagccaagggcttacttgggaggcagcagtctcgactgaaaagcctaccttgactatcaaacagatcctagcccagctcgatgggatctttccattggatgaagccattattgaaggtcgatactcctcgctcactgtttgcctgtcgtattgtaacataatcaagctgacaagacacgcgcagcgcttcctcctgggagcacctttgtctccgttgatcactttggaacgagcgcttggacaatcactggcagattggtagccctggatgcagatcaagaggagaaactttattttgtgaagattgcatatggagagaccggtcgaatcatgcttggtggcgaatttgagtcatccaaactaatatacgagactatgtccgatttcattcccgagccgtttggatttgggaagtacaaaggcccaggtccggctacctacttttatctatccgaattcgtcgatatggacacgactaccgctccagatcctgctgaatttacaagtaggcttgcacatctgcacaagacaagccagtctccgaccggggaattcgggttccacgtccaaacatgtgatggtgaccgggctcatgtagtagattggcagcaaagctgggcggttttctttcgtaacctgttccttggagtctgcgagctggatatcaagaggagtggctcttggccagaatacgaacaagctatcaagcaagtagcatggaaagtgataccgcgcctcctagagcctctccaggcaaagggccggcagctcaaaccttgcatcatacacggtgatctctgggagggtaacatgggtatcaacatggagattggcgatacgctgctgttcgatgctggctcctacttcgctcataatgagatggagctgggtcattggagatgcgaattcagctctgtatttcgctccaaattgtacttgaggcattacctccaaaattatccagcagcggaaccagcggaagagttcgatgatcgaaatcgcctatacagcctgaagggagcaataaactatgctgctggtcatccaggctctatcttaagaagaactgcttataacaacatgctctacctctgtgagaaatatgctccgctggacggtatagataagtacgacccgttgattgatccatcactcacaggggctcgaatcgtgcctcatttagatgacggcctcatttgaacaagacagagacttagggtcaataacttgcatacgcagaatgaatatcgctacctaatggcaaattattccaaacgaaaaaaaatcaatgttcattgcttgccagaaaacgtgtacacagtgcagaagcacaagcagaattgcgctgaaagacatgaggatgcaacgctgcgtaccggtaacccttcacacctaggaacaacatatcgtgaatatgaatgtatctttataaacttcaagaattgtatggatgtgcctgcatgtcggatgacttcagaaatgttggtaaatttaaagtaatgagaatatatcgtgcaa

SEQ ID NO: 26486 - DNA, 1551 bp, Muscodor strobelii
  misc_feature: SGI cDNA ID NO. 569059
  misc_feature: Encodes the peptide sequence at SEQ ID NO 26487
atggccgacgaacgccctgacggtcccgcctccgatgctacaccttccgagaacgacagccctccgaacatcacagagactcatctgtccaagcttaggatccttgcccgcgacttgaatgactctagccagagaattgttgctcccaaatcaagctattcgaaggtcgtgtgcctagttacgtactgggaggagagtgacacgccgcatataaaggagcagggcaaagaactttgggcacttttcaagcaatctgggtttgatgtcggcaacagtccctttgagattccatcagagacgtcattgatcagaacgggaagagaactatcagatgcgatcgttaaggttctaggagagaagaataacacagatcgcaatctcttcgttctctattatgggggccacgctgacacagaggatggaaaaccgatctggcagtcccacggcaacagggaaagggcctgcacgttatcctggaataaccttcaggaatatcttcaggaccttgggtgtgatatagttatcatctttgactgctgctatgcgggatccatggtgaccgaagacccgaaacaatactttaagaaacaatgcgaatttctctgcgcgtctggtgcgaagaagcgagttagtgcgaagaaagagtactcattctccaaagccctcgtcgaagtcttgaaaacggagctggaagatcacgggagctgcgacatcctcagactgtacacgctactgagtgactcccgcgtgaaagccaaatacggatataagttagacttagcaccgcactataagcaattttgtggcataggtcgtaaagagccgtccatatccttggttccactagggcgggaattggcaggtttgcctaacggaacatcacaaccgatgaagacatcggatgcgagagtgctgctcaaggtggccttcaaggacccagaacaggatgatacggacgtaatgagaacgcagttcgaggacttcctccgttggcggccagcgaatctcggcgaggtattgtggcgcgcctgtattgacaagcagtttttagaagcatttcccgaatttcccgaattgattgatattcatggctactttcgcactgaaactcacattatcattgtctcaatgcccgtagccctatggggagctctccagaaccggctagcgtatgagttcatctgcgttgttcacacccccagcttatatccattacagcgtaacattcgcaggccgggcgtggaatcatcaccgtcgatgaaccccacgatgcgatttccaaaaggcgtacttcccgagccctttcaacttagatcttccacggaagtcatccgatccttacgttccggttccaatctcaatgttaatcaagaatctacgccgcaacctaatcttccagtaaggctgcagaacagtccagttgcacagaaaattcaacaagttggagctccgtcttgggaagctgcctttaggaaacaggtcaacaagccttatctcgacctcaggtcccgtcctaagagtctacacaaggtcatggaattagttacttaa

SEQ ID NO: 26487 - protein, 516 aa, Muscodor strobelii
  misc_feature: SGI Peptide ID NO. 569059
  misc_feature (53)..(426): NCBI GI: 46122199 Blast Desc: FG05477.1 [Gibberella zeae PH-1]
  misc_feature (53)..(427): NCBI GI: 256729718 Blast Desc: [Nectria haematococca mpVI 77-13-4]
  misc_feature (8)..(418): NCBI GI: 116208088 Blast Desc: CHGG_03337 [Chaetomium globosum CBS 148.51] gi|88183934|gb|EAQ91402.1| CHGG_03337 [Chaetomium globosum CBS 148.51]
  misc_feature (28)..(227): NCBI GI: 46109974 Blast Desc: FG01869.1 [Gibberella zeae PH-1]
  misc_feature (28)..(368): NCBI GI: 171686520 Blast Desc: protein product [Podospora anserina] gi|170943221|emb|CAP68874.1| protein product [Podospora anserina]
  misc_feature (53)..(395): NCBI GI: 116191399 Blast Desc: CHGG_05417 [Chaetomium globosum CBS 148.51] gi|88181330|gb|EAQ88798.1| CHGG_05417 [Chaetomium globosum CBS 148.51]
  misc_feature (50)..(227): NCBI GI: 46138147 Blast Desc: FG10588.1 [Gibberella zeae PH-1]
  misc_feature (27)..(404): NCBI GI: 39972213 Blast Desc: MGG_07408 [Magnaporthe grisea 70-15] gi|145016580|gb|EDK01010.1| MGG_07408 [Magnaporthe grisea 70-15]
  misc_feature (44)..(333): NCBI GI: 189194673 Blast Desc: conserved [Pyrenophora tritici-repentis Pt-1C-BFP] gi|187979239|gb|EDU45865.1| conserved [Pyrenophora tritici-repentis Pt-1C-BFP]
  misc_feature (38)..(228): NCBI GI: 261358640 Blast Desc: conserved [Verticillium albo-atrum VaMs.102]
MADERPDGPASDATPSENDSPPNITETHLSKLRILARDLNDSSQRIVAPKSSYSKVVCLVTYWEESDTPHIKEQGKELWALFKQSGFDVGNSPFEIPSETSLIRTGRELSDAIVKVLGEKNNTDRNLFVLYYGGHADTEDGKPIWQSHGNRERACTLSWNNLQEYLQDLGCDIVIIFDCCYAGSMVTEDPKQYFKKQCEFLCASGAKKRVSAKKEYSFSKALVEVLKTELEDHGSCDILRLYTLLSDSRVKAKYGYKLDLAPHYKQFCGIGRKEPSISLVPLGRELAGLPNGTSQPMKTSDARVLLKVAFKDPEQDDTDVMRTQFEDFLRWRPANLGEVLWRACIDKQFLEAFPEFPELIDIHGYFRTETHIIIVSMPVALWGALQNRLAYEFICVVHTPSLYPLQRNIRRPGVESSPSMNPTMRFPKGVLPEPFQLRSSTEVIRSLRSGSNLNVNQESTPQPNLPVRLQNSPVAQKIQQVGAPSWEAAFRKQVNKPYLDLRSRPKSLHKVMELVT

SEQ ID NO: 26488 - DNA, 1795 bp, Muscodor strobelii
  misc_feature: SGI EST ID NO. CUFF.62587.0
  misc_feature: Variant of the nucleotide sequence at SEQ ID NO 26486
gccagctgaagtgcgtctgcggataatcttcggcctttagaatgctaccccaagccacttggactcctctcctttcagctggccgcttctatcggccatacctctcagatttctgccatggccagtttgaatgccctttgcccttacttccagtcaaagctggcgcagatcaacatagacttcaatttcgctctgacgggggaatacccaagtgaaatagcctacgctcaagcgaaccatggccgacgaacgccctgacggtcccgcctccgatgctacaccttccgagaacgacagccctccgaacatcacagagactcatctgtccaagcttaggatccttgcccgcgacttgaatgactctagccagagaattgttgctcccaaatcaagctattcgaaggtcgtgtgcctagttacgtactgggaggagagtgacacgccgcatataaaggagcagggcaaagaactttgggcacttttcaagcaatctgggtttgatgtcggcaacagtccctttgagattccatcagagacgtcattgatcagaacgggaagagaactatcagatgcgatcgttaaggttctaggagagaagaataacacagatcgcaatctcttcgttctctattatgggggccacgctgacacagaggatggaaaaccgatctggcagtcccacggcaacagggaaagggcctgcacgttatcctggaataaccttcaggaatatcttcaggaccttgggtgtgatatagttatcatctttgactgctgctatgcgggatccatggtgaccgaagacccgaaacaatactttaagaaacaatgcgaatttctctgcgcgtctggtgcgaagaagcgagttagtgcgaagaaagagtactcattctccaaagccctcgtcgaagtcttgaaaacggagctggaagatcacgggagctgcgacatcctcagactgtacacgctactgagtgactcccgcgtgaaagccaaatacggatataagttagacttagcaccgcactataagcaattttgtggcataggtcgtaaagagccgtccatatccttggttccactagggcgggaattggcaggtttgcctaacggaacatcacaaccgatgaagacatcggatgcgagagtgctgctcaaggtggccttcaaggacccagaacaggatgatacggacgtaatgagaacgcagttcgaggacttcctccgttggcggccagcgaatctcggcgaggtattgtggcgcgcctgtattgacaagcagtttttagaagcatttcccgaatttcccgaattgattgatattcatggctactttcgcactgaaactcacattatcattgtctcaatgcccgtagccctatggggagctctccagaaccggctagcgtatgagttcatctgcgttgttcacacccccagcttatatccattacagcgtaacattcgcaggccgggcgtggaatcatcaccgtcgatgaaccccacgatgcgatttccaaaaggcgtacttcccgagccctttcaacttagatcttccacggaagtcatccgatccttacgttccggttccaatctcaatgttaatcaagaatctacgccgcaacctaatcttccagtaaggctgcagaacagtccagttgcacagaaaattcaacaagttggagctccgtcttgggaagctgcctttaggaaacaggtcaacaagccttatctcgacctcaggtcccgtcctaagagtctacacaaggtcatggaattagttacttaatttttc

SEQ ID NO: 26489 - DNA, 690 bp, Muscodor strobelii
  misc_feature: SGI cDNA ID NO. 569060
  misc_feature: Encodes the peptide sequence at SEQ ID NO 26490
atgatcgactgtttgcgcttcaacctcgaagtttttgcatcgataagaaggttctacgaaaatcttaatgatctgctccgctctcagaaccgggaagactattccaaaagtcatctccccgatgatgttcaagtcttatttttgtttcgcatggtggaactagaaaagcagcttaatgatcttgtatcatgtgcggagaatttgcgcagagagctagcatacgtagtcaatttggagaagaacgagagggataaagctcaggaatggataaatttcaacttgcttaagcttggattcctatcaggcacattttctcgcagcgtgggcactgctatattgatattcgtacctgctatatttgtctcggttagcagcgacaccgctatgctatctgaacttttgactgactggaaacagattttttacagctcatacttcttcttcggcgatgattcctctccggcgtttgatgtcgctggccttaagctttggttcgaaacagctatcccaatcaccgtggtaacattgactatagtgtggctgcaataccgccgcgcagttggagcacctataatagacaaactatctttcttaaagatgggacgttggagaacctcgacgggtcgatctacgctcttgaactcgcgttttgatgctattgatttagaatcaggggcacgagtaccatag

SEQ ID NO: 26490 - protein, 229 aa, Muscodor strobelii
  misc_feature: SGI Peptide ID NO. 569060
MIDCLRFNLEVFASIRRFYENLNDLLRSQNREDYSKSHLPDDVQVLFLFRMVELEKQLNDLVSCAENLRRELAYVVNLEKNERDKAQEWINFNLLKLGFLSGTFSRSVGTAILIFVPAIFVSVSSDTAMLSELLTDWKQIFYSSYFFFGDDSSPAFDVAGLKLWFETAIPITVVTLTIVWLQYRRAVGAPIIDKLSFLKMGRWRTSTGRSTLLNSRFDAIDLESGARVP

SEQ ID NO: 26491 - DNA, 1796 bp, Muscodor strobelii
  misc_feature: SGI EST ID NO. CUFF.62592.0
  misc_feature: Variant of the nucleotide sequence at SEQ ID NO 26489
ttttctacgagtaccagtgcttaccggaatatctatcgttgattttatcttattctgactcgccgcttggcaacactagaaaattctgtgcagttctgaacaattggtcacagccatggctgcaacagtatgaaggtaaccaactcagctcaccgccaattactcgtttccggctttgctataaactctttattttggaagagccacctagtttgctgcgatctcggcggaccagtagtgaaggatacacttgtgattgggaggctctgaggttttctaatgtgtcggtccatagcgaggtatacgttggaagctccagggtttcatcatttttggcaggctcgccgagcttcctggatagattagttatcgaccaactggcgcagtatgtagattttaggggccacacaacactgttcccttttaaagagttgtcatgcatccttcttctctgctcttcctctttggaaagctggggctttacgctgacgagcttgacgtatacccttgaggaaatcaggttcgaaagagataagctatcagagcaatttaaacatggaaacaaccctgcgttggacgagacatctcgaagtctcgacagctttgatcatgtggtcgagaatatgatcgactgtttgcgcttcaacctcgaagtttttgcatcgataagaaggttctacgaaaatcttaatgatctgctccgctctcagaaccgggaagactattccaaaagtcatctccccgatgatgttcaagtcttatttttgtttcgcatggtggaactagaaaagcagcttaatgatcttgtatcatgtgcggagaatttgcgcagagagctagcatacgtagtcaatttggagaagaacgagagggataaagctcaggaatggataaatttcaacttgcttaagcttggattcctatcaggcacattttctcgcagcgtgggcactgctatattgatattcgtacctgctatatttgtctcgattttttacagctcatacttcttcttcggcgatgattcctctccggcgtttgatgtcgctggccttaagctttggttcgaaacagctatcccaatcaccgtggtaacattgactatagtgtggctgcaataccgccgcgcagttggagcacctataatagacaaactatctttcttaaagatgggacgttggagaacctcgacgggtcgatctacgctcttgaactcgcgttttgatgctattgatttagaatcaggggcacgagtaccatagttgctgtattgctatataacggtggtgagacgtgtgcattatagggtggaaggtatgggcaccttggtgtgctaggggttcattatatagtgctgaattcaaatcaacctattgccattaagagaggtatgcctctgtactgtgggatagtctagtgctggtcttccatgtaaattacgtaccgaggtattccgtaccatcctcaagaaagccgcgcagaaagtcatcattaggcttatctccctcgactagaactagattctatcactttacatcctcatcatcaccgtcggtatcatcttcgccgtcatccgagtcgaggtcatcttcatcctcactctctgcatctggcttctcactgtcataagtagatagatccctagtcccttcggcatccggttctccgtatcggtacggcctcatgcgtaaaaactccatcccgtgttgcggatgtacaattctgacatctacaggctctacttcctcctcttcgtctcccgggcccagcttgggatccttttgcttttcctgccg

SEQ ID NO: 26492 - DNA, 1020 bp, Muscodor strobelii
  misc_feature: SGI cDNA ID NO. 569061
  misc_feature: Elevated expression when VOC is produced
  misc_feature: Encodes the peptide sequence at SEQ ID NO 26493
atggcgcaggctgagatattccataagtgtttcaagggccactcggaaggtcatttgctctacaaggaggtttcagcgggagacatgaaaccaggagcatgcggttacttcgaccagcagggagactgggtgtcgattgtccagactagtgacgctacgaagcttagtgatctgaaattgactcaactgaaggggatagagatccaagaacctgaggggtaccgaaccatagggccacgatgtagtaaaggaaccacaggaatgatggtgggtctggatgctaacattacgatccctggagttcctttcaacgccaaagctgctgtcgctttcacgtgcgagaggagccaaggagcggtcgttgtccccggtggccatgttaaatacctcaaagttattaatccaaaaccctaccgaaattggatggaacaaaatctggctcatattcttgagctaccgcgtgcagatgaccaggtcatcgcacagaaggggatatggataatcaccaagacgtactcgacaagccgaagagccatcgccgtgatggagaacagctctgctaaagtcggcttcagcctcgacgtgagcgctgtagatgtcgcgacaacgtcgccatctgcaagctggtggagctctagggagtctgacttcggttgggtcaagtctgagaacactcaagaaggcgtcgttttctcgatgtccggcatttactggaaacagcgcaggtttctatcaaggagaaagtggaagcggcaggaaaagcaaaaggatcccaagctgggcccgggagacgaagaggaggaagtagagcctgtagatgtcagaattgtacatccgcaacacgggatggagtttttacgcatgaggccgtaccgatacggagaaccggatgccgaagggactagggatctatctacttatgacagtgagaagccagatgcagagagtgaggatgaagatgacctcgactcggatgacggcgaagatgataccgacggtgatgatgaggatgtaaagtga

SEQ ID NO: 26493 - protein, 339 aa, Muscodor strobelii
  misc_feature: SGI Peptide ID NO. 569061
  misc_feature (6)..(243): NCBI GI: 121720048 Blast Desc: ACLA_059630 [Aspergillus clavatus NRRL 1] gi|119404934|gb|EAW15296.1| ACLA_059630 [Aspergillus clavatus NRRL 1]
  misc_feature (7)..(244): NCBI GI: 170111840 Blast Desc: [Laccaria bicolor S238N-H82] gi|164637897|gb|EDR02178.1| [Laccaria bicolor S238N-H82]
  misc_feature (6)..(243): NCBI GI: 115388729 Blast Desc: [Aspergillus terreus NIH2624] gi|114195954|gb|EAU37654.1| [Aspergillus terreus NIH2624]
  misc_feature (78)..(248): NCBI GI: 171679092 Blast Desc: protein product [Podospora anserina] gi|170937617|emb|CAP62276.1| protein product [Podospora anserina]
  misc_feature (1)..(208): NCBI GI: 189202056 Blast Desc: conserved [Pyrenophora tritici-repentis Pt-1C-BFP] gi|187984463|gb|EDU49951.1| conserved [Pyrenophora tritici-repentis Pt-1C-BFP]
  misc_feature (17)..(254): NCBI GI: 171681772 Blast Desc: protein product [Podospora anserina] gi|170940845|emb|CAP66495.1| protein product [Podospora anserina]
  misc_feature (15)..(284): NCBI GI: 255935765 Blast Desc: [Penicillium chrysogenum Wisconsin 54-1255] gi|211583529|emb|CAP91543.1| [Penicillium chrysogenum Wisconsin 54-1255]
  misc_feature (5)..(235): NCBI GI: 238507161 Blast Desc: conserved [Aspergillus flavus NRRL3357] gi|220689495|gb|EED45846.1| conserved [Aspergillus flavus NRRL3357]
  misc_feature (5)..(235): NCBI GI: 169786195 Blast Desc: [Aspergillus oryzae RIB40] gi|83776306|dbj|BAE66425.1| protein product [Aspergillus oryzae]
  misc_feature: Useful for introducing or modulating the production of volatile compounds
MAQAEIFHKCFKGHSEGHLLYKEVSAGDMKPGACGYFDQQGDWVSIVQTSDATKLSDLKLTQLKGIEIQEPEGYRTIGPRCSKGTTGMMVGLDANITIPGVPFNAKAAVAFTCERSQGAVVVPGGHVKYLKVINPKPYRNWMEQNLAHILELPRADDQVIAQKGIWIITKTYSTSRRAIAVMENSSAKVGFSLDVSAVDVATTSPSASWWSSRESDFGWVKSENTQEGVVFSMSGIYWKQRRFLSRRKWKRQEKQKDPKLGPGDEEEEVEPVDVRIVHPQHGMEFLRMRPYRYGEPDAEGTRDLSTYDSEKPDAESEDEDDLDSDDGEDDTDGDDEDVK

SEQ ID NO: 26494 - DNA, 1544 bp, Muscodor strobelii
  misc_feature: SGI EST ID NO. CUFF.62593.1
  misc_feature: Variant of the nucleotide sequence at SEQ ID NO 26492
ttagacctcaaaaatcccttgatttccaagtcgattctgcgaaaactaatcccattctttcgcggcactcgatttctggcagaaatggcgcaggctgagatattccataagtgtttcaagggccactcggaaggtcatttgctctacaaggaggtttcagcgggagacatgaaaccaggagcatgcggttacttcgaccagcagggagactgggtgtcgattgtccagactagtgacgctacgaagcttagtgatctgaaattgactcaactgaaggggatagagatccaagaacctgaggggtaccgaaccatagggccacgatgtagtaaaggaaccacaggaatgatggtgggtctggatgctaacattacgatccctggagttcctttcaacgccaaagctgctgtcgctttcacgtgcgagaggagccaaggagcggtcgttgtccccggtggccatgttaaatacctcaaagttattaatccaaaaccctaccgaaattggatggaacaaaatctggctcatattcttgagctaccgcgtgcagatgaccaggtcatcgcacagaaggggatatggataatcaccaagacgtactcgacaagccgaagagccatcgccgtgatggagaacagctctgctaaagtcggcttcagcctcgacgtgagcgctgtagatgtcgcgacaacgtcgccatctgcaagctggtggagctctagggagtctgacttcggttgggtcaagtctgagaacactcaagaaggcgtcgttttctcgatgtccggcatttactggaaacagcgcaggtttctatcaaggagaaagtggaagcggcaggaaaagcaaaaggatcccaagctgggcccgggagacgaagaggaggaagtagagcctgtagatgtcagaattgtacatccgcaacacgggatggagtttttacgcatgaggccgtaccgatacggagaaccggatgccgaagggactagggatctatctacttatgacagtgagaagccagatgcagagagtgaggatgaagatgacctcgactcggatgacggcgaagatgataccgacggtgatgatgaggatgtaaagtgatagaatctagttctagtcgagggagataagcctaatgatgactttctgcgcggctttcttgaggatggtacggaatacctcggtacgtaatttacatggaagaccagcactagactatcccacagtacagaggcatacctctcttaatggcaataggttgatttgaattcagcactatataatgaacccctagcacaccaaggtgcccataccttccaccctataatgcacacgtctcaccaccgttatatagcaatacagcaactatggtactcgtgcccctgattctaaatcaatagcatcaaaacgcgagttcaagagcgtagatcgacccgtcgaggttctccaacgtcccatctttaagaaagatagtttgtctattataggtgctccaactgcgcggcggtattgcagccacactatagtcaatgttaccacgg

SEQ ID NO: 26495 - DNA, 2220 bp, Muscodor strobelii
  misc_feature: SGI cDNA ID NO. 569062
  misc_feature: Encodes the peptide sequence at SEQ ID NO 26496
atgggcacggcgttctcctctggtctgtctaagaacagctcctggtcagaaccagatgctgtcgtgccggtggtgaagcactttgccgctcatggctctcctcaggcgggccataacaccgctcccttcatgggtcatggcaatcgacaagtcctccaggatctcttaacaccgtttaaatcagcgattcagttgggcggcgcgagaggtgttttgatggcatatagcgagttcgatgatattccctgtcatgtccatccgactctctaccaagctttggaagattgggacttcgatggcttcatcatcgctgatgatactggcatgtcggaggtgtacgatgtgcatcgagttgctgattcaccagccgatgccatcaagcaatggttcaacgctggtggcatgattcagttctacgactaccccttagagtcgtatctaaatataacgaaagatcttgttgccaataactctgttgaaatctcaactttacaatctcatatcaagaagatcctcggtgtaaagtatgatcttggcctgtttgataatccatacatatcagcagacatcaatcctcgacaaatcgtacaagatcacagaaacgtttcattggaggccgccagaaagagtgtagtgcttttggagaaccaaaactcaaccctgcctctcaaatcagagactcaaaatatcaagaaaattgcacttataggaccgttttcagatactcttaactacggcgactactccggtcaatggggccaataccctgccgacgtagccaatacgataagacaaggaattctctcatatgcaaatcaaagcaactttgagcttgtgtcggcctggggtaccaattcgtgggagtacaacgctcaatacgtgattcctccctatctgctctccaccaacggaacgatcggtgggctagctgccacatactatgccaacacgaattttaccgagccaatggtccacacagtagagacaccggctctagactggggcatataccctccagacagcctaccatctaacaacttcagtgcaatatgggaaggtcaattaacatctcctgtagacatggacgtcgacggttggatcggcgtagcaatcggtccaaacacgaccgtaaaactgttcataaatgaagacctaatcatctcagatggactctccaccgatggaaacataatgggcaacataatgaaccgcgactacataacgaataacaacacatcccctcccaagggctcagcccctttcacattccacaaagacacaacgtacgacattcgaatcgaataccaaacttacaacaactacaaaaagaccgcaaacgtcaactctcttaattcgcagatgatattattctggaatctcgttagtcgaaacggtgactcaatcttccaagccgtctctctcgcgcaatcttccgacttagtgatcctcgcgcttggcgcagcatggaacagcgatggtgagaatggcgatagaggggatttgggtcttgccccgagccagacaagactagcggaggagatatacaaacttggaaaaccggtggtcctcgtccttgaaggtggtcgaccgtttgcgattcccgagttttacaacaagagtgctgcggtactgagcgctttcttccccggtcaagcgggtggacaggctatcgccgatgttctgttcggcgcttttaatcccggcggaaagatgccggtcacggtcccgaggaatgtcggacagttgccggtgtactataattataaacctacagcgaaattggttgattatctggatatcgactcgacgcctgcttattggtttggatatgggctttcgtatacggagtttgaggtcttggatttctctgcttcaagcggtagcggagagtctgggtttacggccggggatacgatcctgttttctgtgagtgttaagaatatcggggaggtgagtgggagttatgttgctcaggtttatgttctgaatcgggtgtcgagtattacgcagcctgtgagacaacttgttgcgtttgagagggtggcgattgagcctggggaggtggttagtgttgagatggaattggaggttgatatgtatcttgctgttctgaatcggaagtatgagtgggagttggagaagggggagtatacttttgcgttgttggagcatggaggggatacggataatcgctggaatgttactttggactgtgtttaa

SEQ ID NO: 26496 - protein, 739 aa, Muscodor strobelii
  misc_feature: SGI Peptide ID NO. 569062
  misc_feature (211)..(616): Pfam Id: PF01915 Pfam Desc: Glycosyl hydrolase family 3 C terminal domain
  misc_feature (16)..(133): Pfam Id: PF00933 Pfam Desc: Glycosyl hydrolase family 3 N terminal domain
  misc_feature (1)..(729): NCBI GI: 146299801 Blast Desc: glycoside hydrolase family 3 protein [Flavobacterium johnsoniae UW101] gi|146154219|gb|ABQ05073.1| Candidate beta-glycosidase; Glycoside hydrolase family 3 [Flavobacterium
  misc_feature (1)..(721): NCBI GI: 227368727 Blast Desc: beta-glucosidase [Chryseobacterium gleum ATCC 35910] gi|227108205|gb|EEI43197.1| beta-glucosidase [Chryseobacterium gleum ATCC 35910]
  misc_feature (1)..(717): NCBI GI: 251795208 Blast Desc: glycoside hydrolase family 3 domain protein [Paenibacillus sp. JDR-2] gi|247542834|gb|ACS99852.1| glycoside hydrolase family 3 domain protein [Paenibacillus sp. JDR-2]
  misc_feature (1)..(717): NCBI GI: 241890891 Blast Desc: beta-glucosidase [Sphingobacterium spiritivorum ATCC 33861] gi|241869386|gb|EER73137.1| beta-glucosidase [Sphingobacterium spiritivorum ATCC 33861]
  misc_feature (1)..(717): NCBI GI: 227538527 Blast Desc: beta-glucosidase [Sphingobacterium spiritivorum ATCC 33300] gi|227241446|gb|EEI91461.1| beta-glucosidase [Sphingobacterium spiritivorum ATCC 33300]
  misc_feature (19)..(717): NCBI GI: 159041782 Blast Desc: glycoside hydrolase family 3 protein [Caldivirga maquilingensis IC-167] gi|157920617|gb|ABW02044.1| glycoside hydrolase family 3 domain protein [Caldivirga maquilingensis
  misc_feature (17)..(651): NCBI GI: 255015521 Blast Desc: glycoside hydrolase family 3 protein [Bacteroides sp. 2_1_7]
  misc_feature (1)..(727): NCBI GI: 255690202 Blast Desc: beta-glucosidase [Bacteroides finegoldii DSM 17565] gi|260624221|gb|EEX47092.1| beta-glucosidase [Bacteroides finegoldii DSM 17565]
  misc_feature (1)..(737): NCBI GI: 29347188 Blast Desc: beta-glucosidase (gentiobiase) [Bacteroides thetaiotaomicron VPI-5482] gi|29339087|gb|AAO76885.1| beta-glucosidase (gentiobiase) [Bacteroides thetaiotaomicron
  misc_feature (1)..(700): NCBI GI: 160886913 Blast Desc: BACOVA_04927 [Bacteroides ovatus ATCC 8483] gi|156107324|gb|EDO09069.1| BACOVA_04927 [Bacteroides ovatus ATCC 8483]
MGTAFSSGLSKNSSWSEPDAVVPVVKHFAAHGSPQAGHNTAPFMGHGNRQVLQDLLTPFKSAIQLGGARGVLMAYSEFDDIPCHVHPTLYQALEDWDFDGFIIADDTGMSEVYDVHRVADSPADAIKQWFNAGGMIQFYDYPLESYLNITKDLVANNSVEISTLQSHIKKILGVKYDLGLFDNPYISADINPRQIVQDHRNVSLEAARKSVVLLENQNSTLPLKSETQNIKKIALIGPFSDTLNYGDYSGQWGQYPADVANTIRQGILSYANQSNFELVSAWGTNSWEYNAQYVIPPYLLSTNGTIGGLAATYYANTNFTEPMVHTVETPALDWGIYPPDSLPSNNFSAIWEGQLTSPVDMDVDGWIGVAIGPNTTVKLFINEDLIISDGLSTDGNIMGNIMNRDYITNNNTSPPKGSAPFTFHKDTTYDIRIEYQTYNNYKKTANVNSLNSQMILFWNLVSRNGDSIFQAVSLAQSSDLVILALGAAWNSDGENGDRGDLGLAPSQTRLAEEIYKLGKPVVLVLEGGRPFAIPEFYNKSAAVLSAFFPGQAGGQAIADVLFGAFNPGGKMPVTVPRNVGQLPVYYNYKPTAKLVDYLDIDSTPAYWFGYGLSYTEFEVLDFSASSGSGESGFTAGDTILFSVSVKNIGEVSGSYVAQVYVLNRVSSITQPVRQLVAFERVAIEPGEVVSVEMELEVDMYLAVLNRKYEWELEKGEYTFALLEHGGDTDNRWNVTLDCV

SEQ ID NO: 26497 - DNA, 1885 bp, Muscodor strobelii
  misc_feature: SGI EST ID NO. CUFF.62597.0
  misc_feature: Variant of the nucleotide sequence at SEQ ID NO 26495
gttcaacgctggtggcatgattcagttctacgactaccccttagagtcgtatctaaatataacgaaagatcttgttgccaataactctgttgaaatctcaactttacaatctcatatcaagaagatcctcggtgtaaagtatgatcttggcctgtttgataatccatacatatcagcagacatcaatcctcgacaaatcgtacaagatcacagaaacgtttcattggaggccgccagaaagagtgtagtgcttttggagaaccaaaactcaaccctgcctctcaaatcagagactcaaaatatcaagaaaattgcacttataggaccgttttcagatactcttaactacggcgactactccggtcaatggggccaataccctgccgacgtagccaatacgataagacaaggaattctctcatatgcaaatcaaagcaactttgagcttgtgtcggcctggggtaccaattcgtgggagtacaacgctcaatacgtgattcctccctatctgctctccaccaacggaacgatcggtgggctagctgccacatactatgccaacacgaattttaccgagccaatggtccacacagtagagacaccggctctagactggggcatataccctccagacagcctaccatctaacaacttcagtgcaatatgggaaggtcaattaacatctcctgtagacatggacgtcgacggttggatcggcgtagcaatcggtccaaacacgaccgtaaaactgttcataaatgaagacctaatcatctcagatggactctccaccgatggaaacataatgggcaacataatgaaccgcgactacataacgaataacaacacatcccctcccaagggctcagcccctttcacattccacaaagacacaacgtacgacattcgaatcgaataccaaacttacaacaactacaaaaagaccgcaaacgtcaactctcttaattcgcagatgatattattctggaatctcgttagtcgaaacggtgactcaatcttccaagccgtctctctcgcgcaatcttccgacttagtgatcctcgcgcttggcgcagcatggaacagcgatggtgagaatggcgatagaggggatttgggtcttgccccgagccagacaagactagcggaggagatatacaaacttggaaaaccggtggtcctcgtccttgaaggtggtcgaccgtttgcgattcccgagttttacaacaagagtgctgcggtactgagcgctttcttccccggtcaagcgggtggacaggctatcgccgatgttctgttcggcgcttttaatcccggcggaaagatgccggtcacggtcccgaggaatgtcggacagttgccggtgtactataattataaacctacagcgaaattggttgattatctggatatcgactcgacgcctgcttattggtttggatatgggctttcgtatacggagtttgaggtcttggatttctctgcttcaagcggtagcggagagtctgggtttacggccggggatacgatcctgttttctgtgagtgttaagaatatcggggaggtgagtgggagttatgttgctcaggtttatgttctgaatcgggtgtcgagtattacgcagcctgtgagacaacttgttgcgtttgagagggtggcgattgagcctggggaggtggttagtgttgagatggaattggaggttgatatgtatcttgctgttctgaatcggaagtatgagtgggagttggagaagggggagtatacttttgcgttgttggagcatggaggggatacggataatcgctggaatgttactttggactgtgtttaaactggagtagtcggctagctacctattgatcaggtagtaaacctgcatttc

SEQ ID NO: 26498 - DNA, 1770 bp, Muscodor strobelii
  misc_feature: SGI cDNA ID NO. 569063
  misc_feature: Reduced expression when VOC is produced
  misc_feature: Encodes the peptide sequence at SEQ ID NO 26499
atgcctatgctccagaacccttctacgaaatatcggcccttcccaccgatcaacttgcccaaccgtcaatggccctcgaggaccataaagaaccccccgagatggctttctacggatttgcgcgatggaaaccaatcgctcgagaatcccatggacggtgatcagaaatgggactacttcaggatgctggttgagctgggctacaaagaaatcgaagttgccttcccatccgcgagcgacaccgactacaacttcgtgcgccgacttgtcgaaacccccggcgttgtccccgacgatgtctggctccaagtcctcacgccctgccgccccgaactcatccgacgcaccgtgcaatctctcaaaggagccaagaaagccatcctacacatgtacgtggctacatcgccatgcttccagcagatcgtcttcggcatgaacaacgaccagaccaagaacctggccgtcgaatgcacaaagctggttcgtcacttgaccaaagacgacccttcattcgccgacacacaatgggcgtttgaattctcgccagagaccttctcagactccaatatggattttgtggtggagatatgcgaggcggttaaggctgcatgggaacccagtgctgaagtccccatcatcttcaacctgccagccacggtcgagatggcaaccccgaatgtctatgcagatcaaatcgagtacttttgcaccaacatctcggaacgcgagaagattgccgtttctctccacccacacaacgatcgtggttgtgccgttgcagctgcggaactagcccaaatggccggggccgaccgtgttgagggtaccctgttcggtaacggcgagcggactggtaacgtggatctcgtcactcttgccctcaatctctacacacagggtattaacccaggcgtcgatttttcggaaataaacaaggtgatcgatgtggtagagaagagcaacaagataccggtgcatcaacgtgctccatatggtggatcattagtcgtgtgcgctttcagcggatcgcatcaagacgccatcaagaaaggattccagactcgcgaaagatccggtgccaaggttgaagactattggcaaattccctacctcccgcttgaccctgccgatattggtcgcacatacgaagccatcatcagggtcaattctcagtctgggaagggtggtaccgcctggattattcttcgatatcttcaacttgatctcccacgtggtttacagatcgccttttccaaaatcgttcaagaggaggctgatcgtctttcgcgcgagctgaaaccgcaagagatcatttccctctttgagaatagttatcacttgcgagcaactccacgatttgagctcgttgactatgatatcacagctgatcgctcttcttcaccagcacccatacttggccatacaccttcttcaaagaatcagaaacgtctgttcaggggtgtcgttgcggtcgatggcaaggagcaccacattacaggtgtcggaaatggtcctatctcttccatggcaaatgccttaaataagaatttcgggtttgttcttgatgttgcggactataaggagcattccattggtgagggtaaagacgtcaaagctgctacttacatagagtgtacagtaaatgcggacgagaaacagaaggtttggggtgtcggtatccacgaagatgttgtccaggcatctctcatggcacttcttggtgtggcaagctcaatatgtccaccagctcaaaccaatgggcacagttag

SEQ ID NO: 26499 - protein, 589 aa, Muscodor strobelii
  misc_feature: SGI Peptide ID NO. 569063
  misc_feature (41)..(323): Pfam Id: PF00682 Pfam Desc: HMGL-like
  misc_feature (431)..(580): Pfam Id: PF08502 Pfam Desc: LeuA allosteric (dimerisation) domain
  misc_feature (1)..(579): NCBI GI: 154305777 Blast Desc: BC1G_07703 [Botryotinia fuckeliana B05.10] gi|150853222|gb|EDN28414.1| BC1G_07703 [Botryotinia fuckeliana B05.10]
  misc_feature (1)..(579): NCBI GI: 156031194 Blast Desc: SS1G_14205 [Sclerotinia sclerotiorum 1980] gi|154700596|gb|EDO00335.1| SS1G_14205 [Sclerotinia sclerotiorum 1980]
  misc_feature (1)..(579): NCBI GI: 225561577 Blast Desc: 2-isopropylmalate synthase [Ajellomyces capsulatus G186AR]
  misc_feature (1)..(570): NCBI GI: 169598786 Blast Desc: SNOG_02200 [Phaeosphaeria nodorum SN15] gi|160704468|gb|EAT90412.2| SNOG_02200 [Phaeosphaeria nodorum SN15]
  misc_feature (1)..(579): NCBI GI: 226278866 Blast Desc: 2-isopropylmalate synthase [Paracoccidioides brasiliensis Pb01]
  misc_feature (1)..(579): NCBI GI: 145615952 Blast Desc: conserved [Magnaporthe grisea 70-15] gi|145009741|gb|EDJ94397.1| conserved [Magnaporthe grisea 70-15]
  misc_feature (1)..(579): NCBI GI: 261189895 Blast Desc: 2-isopropylmalate synthase [Ajellomyces dermatitidis SLH14081] gi|239591594|gb|EEQ74175.1| 2-isopropylmalate synthase [Ajellomyces dermatitidis SLH14081]
  misc_feature (1)..(569): NCBI GI: 258563230 Blast Desc: 2-isopropylmalate synthase [Uncinocarpus reesii 1704] gi|237907867|gb|EEP82268.1| 2-isopropylmalate synthase [Uncinocarpus reesii 1704]
  misc_feature (1)..(579): NCBI GI: 212533425 Blast Desc: 2-isopropylmalate synthase [Penicillium marneffei ATCC 18224] gi|210072233|gb|EEA26322.1| 2-isopropylmalate synthase [Penicillium marneffei ATCC 18224]
  misc_feature (1)..(579): NCBI GI: 85115436 Blast Desc: 2-isopropylmalate synthase [Neurospora crassa OR74A] gi|28926671|gb|EAA35639.1| 2-isopropylmalate synthase [Neurospora crassa OR74A] gi|38566890|emb|CAE76195.1| 2-isopropylmalalate
  misc_feature (3)..(579): SWISSPROT Homolog: EC 2.3.3.13 2-isopropylmalate synthase
  misc_feature: Useful for introducing or modulating the production of volatile compounds
MPMLQNPSTKYRPFPPINLPNRQWPSRTIKNPPRWLSTDLRDGNQSLENPMDGDQKWDYFRMLVELGYKEIEVAFPSASDTDYNFVRRLVETPGVVPDDVWLQVLTPCRPELIRRTVQSLKGAKKAILHMYVATSPCFQQIVFGMNNDQTKNLAVECTKLVRHLTKDDPSFADTQWAFEFSPETFSDSNMDFVVEICEAVKAAWEPSAEVPIIFNLPATVEMATPNVYADQIEYFCTNISEREKIAVSLHPHNDRGCAVAAAELAQMAGADRVEGTLFGNGERTGNVDLVTLALNLYTQGINPGVDFSEINKVIDVVEKSNKIPVHQRAPYGGSLVVCAFSGSHQDAIKKGFQTRERSGAKVEDYWQIPYLPLDPADIGRTYEAIIRVNSQSGKGGTAWIILRYLQLDLPRGLQIAFSKIVQEEADRLSRELKPQEIISLFENSYHLRATPRFELVDYDITADRSSSPAPILGHTPSSKNQKRLFRGVVAVDGKEHHITGVGNGPISSMANALNKNFGFVLDVADYKEHSIGEGKDVKAATYIECTVNADEKQKVWGVGIHEDVVQASLMALLGVASSICPPAQTNGHS

SEQ ID NO: 26500 - DNA, 2184 bp, Muscodor strobelii
  misc_feature: SGI EST ID NO. CUFF.62626.0
  misc_feature: Variant of the nucleotide sequence at SEQ ID NO 26498
gtcacagcgcgggtgttgaaggcccaatggcggggcaaaattaagaatttattattgcgtcgaccgcgatcgcaggatagtaggcacgccttctcgatgactccccatatagggctgggtacatgtagctctgacgttcccgtctgaattctaaatttttccaattcctctgagctgtaaagtccaacaccatcttcaagatgcctatgctccagaacccttctacgaaatatcggcccttcccaccgatcaacttgcccaaccgtcaatggccctcgaggaccataaagaaccccccgagatggctttctacggatttgcgcgatggaaaccaatcgctcgagaatcccatggacggtgatcagaaatgggactacttcaggatgctggttgagctgggctacaaagaaatcgaagttgccttcccatccgcgagcgacaccgactacaacttcgtgcgccgacttgtcgaaacccccggcgttgtccccgacgatgtctggctccaagtcctcacgccctgccgccccgaactcatccgacgcaccgtgcaatctctcaaaggagccaagaaagccatcctacacatgtacgtggctacatcgccatgcttccagcagatcgtcttcggcatgaacaacgaccagaccaagaacctggccgtcgaatgcacaaagctggttcgtcacttgaccaaagacgacccttcattcgccgacacacaatgggcgtttgaattctcgccagagaccttctcagactccaatatggattttgtggtggagatatgcgaggcggttaaggctgcatgggaacccagtgctgaagtccccatcatcttcaacctgccagccacggtcgagatggcaaccccgaatgtctatgcagatcaaatcgagtacttttgcaccaacatctcggaacgcgagaagattgccgtttctctccacccacacaacgatcgtggttgtgccgttgcagctgcggaactagcccaaatggccggggccgaccgtgttgagggtaccctgttcggtaacggcgagcggactggtaacgtggatctcgtcactcttgccctcaatctctacacacagggtattaacccaggcgtcgatttttcggaaataaacaaggtgatcgatgtggtagagaagagcaacaagataccggtgcatcaacgtgctccatatggtggatcattagtcgtgtgcgctttcagcggatcgcatcaagacgccatcaagaaaggattccagactcgcgaaagatccggtgccaaggttgaagactattggcaaattccctacctcccgcttgaccctgccgatattggtcgcacatacgaagccatcatcagggtcaattctcagtctgggaagggtggtaccgcctggattattcttcgatatcttcaacttgatctcccacgtggtttacagatcgccttttccaaaatcgttcaagaggaggctgatcgtctttcgcgcgagctgaaaccgcaagagatcatttccctctttgagaatagttatcacttgcgagcaactccacgatttgagctcgttgactatgatatcacagctgatcgctcttcttcaccagcacccatacttggccatacaccttcttcaaagaatcagaaacgtctgttcaggggtgtcgttgcggtcgatggcaaggagcaccacattacaggtgtcggaaatggtcctatctcttccatggcaaatgccttaaataagaatttcgggtttgttcttgatgttgcggactataaggagcattccattggtgagggtaaagacgtcaaagctgctacttacatagagtgtacagtaaatgcggacgagaaacagaaggtttggggtgtcggtatccacgaagatgttgtccaggcatctctcatggcacttcttggtgtggcaagctcaatatgtccaccagctcaaaccaatgggcacagttaggtgataccaaaccaaaagtgcgttattggaaaagcaagaaaaggagttatagtgtgttattcctcaagtcgaaatgcgtgtgaaatgcgtgcgcatccgaccctcctcttgtgtaaggggacttcagcgctgtcttattagtaatgaacaaaaagtcgtgtgctcaagttactatgtccaagttgaatactctttctgatgtcgtcgttttctc

SEQ ID NO: 26501 - DNA, 1500 bp, Muscodor strobelii
  misc_feature: SGI cDNA ID NO. 569064
  misc_feature: Encodes the peptide sequence at SEQ ID NO 26502
atgtctgctcactctaaaaaggatcaagtgcatctgcacttggatacaatagatggcgatgtcaaggtcgttgacggaataccgataattgaggatcgagaagagaaggagaagaagcttctccgaagaatcgatctcagaatgatgcctctgatgatgctgatctatattctcaactatctcgaccgcaacaacatcgcaacagccagactcagcacattcgagaaagatctcggactagttggaaaccaatacaatacgatcatcagcgtgttcttcgtcggatacattttgacccaggtcccaacaaacatgatcttggataaagtgagacccagtctcttcctcccgtctatcatgatcgcttgggcgacagtcagtgccgcgactggcgcggtccagaactaccacggcatggttgtgttgcgattctttctcggatttgtcgaagctcctttcttccctggtgccttattcttattcagtagttggtacacgaaaaaggagctcgccgctcgaatctccatcctctacgccgcgggtcaactcgcaggagctttcggtggtctcctaggcgccgccattctaagtggattgaaaggcgccgcgggtctggcagcttggcgatggctcttcatcatcgaaggcacagcgaccgtcccagtagctctaataacaatattcatcatcccagactacccagcaacaaccaagtttctcaccgaagaagagcggaccctcgccgtcctacgaatcgcagaagaagccaacgaagaagacaaacactcccaaacctcgggccgtgaaggtctaaaaatggcctttacagacccagccctctacatgatctggctcatgcaactcggtctcaacaccgcggcagcattcaccaatttcttcccgaccatcgtgcaaaccctcggctacggccaaaccgtgacactcctcctctccgcaccgccctacatcttcgccgcaatcctgggaatatcaaactccctccacagcgacgcgacgaaagagcgatggctgcacgtaacctggccccaaatattctgcagcatcgggttcatcatatccgcgacaaccctaaacatcggagcgcggtacacagcgacattcctaatgatgtccgtatacggttccttcggctgcatcctatcctgggtatccacctccctgccacgcccctccgtaaaacgcgcgatttcctacgccgttgtaaacgctgggtcgaacttcgcgtctatctacgcttcttacttctaccccaagacgcagggaccgcggtactggcaggcaaacgtggctaatgtcgcgttctccgggttttgtatcctcatggctactactttgcatttctacttgaagtggagaaatagaaagttggatgaggcgcaggctgaggatgaacgtattgagggtgtttcggttggtacaaggacattggctttaagcgagaggtggcagtgtcatcctgagtatagatatgctctataa

SEQ ID NO: 26502 - protein, 499 aa, Muscodor strobelii
  misc_feature: SGI Peptide ID NO. 569064
  misc_feature (52)..(420): Pfam Id: PF07690 Pfam Desc: Major Facilitator Superfamily
  misc_feature (12)..(499): NCBI GI: 145607591 Blast Desc: MGG_12221 [Magnaporthe grisea 70-15] gi|145015113|gb|EDJ99681.1| MGG_12221 [Magnaporthe grisea 70-15]
  misc_feature (30)..(484): NCBI GI: 46138333 Blast Desc: FG10681.1 [Gibberella zeae PH-1]
  misc_feature (14)..(499): NCBI GI: 169624373 Blast Desc: SNOG_15445 [Phaeosphaeria nodorum SN15] gi|160705157|gb|EAT77110.2| SNOG_15445 [Phaeosphaeria nodorum SN15]
  misc_feature (31)..(481): NCBI GI: 154302615 Blast Desc: BC1G_09884 [Botryotinia fuckeliana B05.10] gi|150855373|gb|EDN30565.1| BC1G_09884 [Botryotinia fuckeliana B05.10]
  misc_feature (31)..(465): NCBI GI: 145230291 Blast Desc: An01g10360 [Aspergillus niger] gi|134055571|emb|CAK37217.1| protein product [Aspergillus niger]
  misc_feature (31)..(481): NCBI GI: 156055476 Blast Desc: SS1G_05090 [Sclerotinia sclerotiorum 1980] gi|154702874|gb|EDO02613.1| SS1G_05090 [Sclerotinia sclerotiorum 1980]
  misc_feature (31)..(468): NCBI GI: 121700683 Blast Desc: MFS transporter, [Aspergillus clavatus NRRL 1] gi|119396749|gb|EAW07180.1| MFS transporter, [Aspergillus clavatus NRRL 1]
  misc_feature (1)..(476): NCBI GI: 50545269 Blast Desc: YALI0A17666p [Yarrowia lipolytica] gi|49646037|emb|CAG84104.1| YALI0A17666p [Yarrowia lipolytica]
  misc_feature (31)..(471): NCBI GI: 70996562 Blast Desc: MFS transporter [Aspergillus fumigatus Af293] gi|66850671|gb|EAL90998.1| MFS transporter, [Aspergillus fumigatus Af293] gi|159131772|gb|EDP56885.1| MFS transporter,
  misc_feature (31)..(497): NCBI GI: 46124181 Blast Desc: FG06468.1 [Gibberella zeae PH-1]
MSAHSKKDQVHLHLDTIDGDVKVVDGIPIIEDREEKEKKLLRRIDLRMMPLMMLIYILNYLDRNNIATARLSTFEKDLGLVGNQYNTIISVFFVGYILTQVPTNMILDKVRPSLFLPSIMIAWATVSAATGAVQNYHGMVVLRFFLGFVEAPFFPGALFLFSSWYTKKELAARISILYAAGQLAGAFGGLLGAAILSGLKGAAGLAAWRWLFIIEGTATVPVALITIFIIPDYPATTKFLTEEERTLAVLRIAEEANEEDKHSQTSGREGLKMAFTDPALYMIWLMQLGLNTAAAFTNFFPTIVQTLGYGQTVTLLLSAPPYIFAAILGISNSLHSDATKERWLHVTWPQIFCSIGFIISATTLNIGARYTATFLMMSVYGSFGCILSWVSTSLPRPSVKRAISYAVVNAGSNFASIYASYFYPKTQGPRYWQANVANVAFSGFCILMATTLHFYLKWRNRKLDEAQAEDERIEGVSVGTRTLALSERWQCHPEYRYAL

SEQ ID NO: 26503 - DNA, 977 bp, Muscodor strobelii
  misc_feature: SGI EST ID NO. CUFF.62609.0
  misc_feature: Variant of the nucleotide sequence at SEQ ID NO 26501
cgcgggtctggcagcttggcgatggctcttcatcatcgaaggcacagcgaccgtcccagtagctctaataacaatattcatcatcccagactacccagcaacaaccaagtttctcaccgaagaagagcggaccctcgccgtcctacgaatcgcagaagaagccaacgaagaagacaaacactcccaaacctcgggccgtgaaggtctaaaaatggcctttacagacccagccctctacatgatctggctcatgcaactcggtctcaacaccgcggcagcattcaccaatttcttcccgaccatcgtgcaaaccctcggctacggccaaaccgtgacactcctcctctccgcaccgccctacatcttcgccgcaatcctgggaatatcaaactccctccacagcgacgcgacgaaagagcgatggctgcacgtaacctggccccaaatattctgcagcatcgggttcatcatatccgcgacaaccctaaacatcggagcgcggtacacagcgacattcctaatgatgtccgtatacggttccttcggctgcatcctatcctgggtatccacctccctgccacgcccctccgtaaaacgcgcgatttcctacgccgttgtaaacgctgggtcgaacttcgcgtctatctacgcttcttacttctaccccaagacgcagggaccgcggtactggcaggcaaacgtggctaatgtcgcgttctccgggttttgtatcctcatggctactactttgcatttctacttgaagtggagaaatagaaagttggatgaggcgcaggctgaggatgaacgtattgagggtgtttcggttggtacaaggacattggctttaagcgagaggtggcagtgtcatcctgagtatagatatgctctataagatcgaaatacctcttagtagtccggataattaagctcagtgtacctggctgataggaaagctcaatgtagcgagatcaaag

SEQ ID NO: 26504 - DNA, 1038 bp, Muscodor strobelii
  misc_feature: SGI cDNA ID NO. 569065
  misc_feature: Encodes the peptide sequence at SEQ ID NO 26505
atgacttcaaaaccaatcgtgctccatatcggggacccggttgagttcaacccaagcctatacgaagaattctcttctcagttcacagtgattcgaccctcgctagaagagcggcagagagaaccgttcctacaagctctccgagatgggaaatggggcgacttccaagcagtcttccgacccttttggaatacgggtggtgagatgggacgctgggataaagagctaatccctttactacctaaatctatgaaggtttatgcgtctgcaggcgctggctatgactgggccgacaccgatatcatggcagagcatggaatcttgtactgcaatggcgcctcagcttcgtccgaagccgtagcagatatggccctctatcacattctatccgtatttcgaaatatcacatggtcagcgatcgcagcacgatcaggtgactcggctcagtttcttgacgcacacaagaaccagcccattggcgcgcacaaccctaaagagcacatcattggtatcattggactcggaaacattggctatacaattgcgaagaaagcttttgctgcattcggcgcaaagatccactaccacgacatcgtccgcaaatccgcagagcaggagggtgctatcgaagcgacgttcgtagaggagctcgacgatctcttggcgggttcggactgtgtggttctcgctacgccatttggcggaaaggcactcatcgatgccgagagattatcaaagttcaagaagggctcccggttcgtgaatattgcccgcggcacactagtagacgaggatgctctcatagaagcattgaagagcggtcacctacacgctgctggtttggatgtcttccagaacgaacctcatatacacccagaattggtcaagatgcgcaacgtctcgttgacatgccataatgccggcggcgctgaagaaacacgtcatggcttcgagaggttggctatgcagaatattcaagccgtgttgcttgagggcaagccgttaacacctgtcaatgcacacttgataaagaagtaa

SEQ ID NO: 26505 - protein, 345 aa, Muscodor strobelii
  misc_feature: SGI Peptide ID NO. 569065
  misc_feature (7)..(339): Pfam Id: PF00389 Pfam Desc: D-isomer specific 2-hydroxyacid dehydrogenase, catalytic domain
  misc_feature (125)..(307): Pfam Id: PF02826 Pfam Desc: D-isomer specific 2-hydroxyacid dehydrogenase, NAD binding domain
  misc_feature (73)..(339): Pfam Id: PF00389 Pfam Desc: D-isomer specific 2-hydroxyacid dehydrogenase, catalytic domain
  misc_feature (3)..(345): NCBI GI: 212545380 Blast Desc: D-mandelate dehydrogenase, [Penicillium marneffei ATCC 18224] gi|210065813|gb|EEA19907.1| D-mandelate dehydrogenase, [Penicillium marneffei ATCC 18224]
  misc_feature (7)..(344): NCBI GI: 169624377 Blast Desc: SNOG_15447 [Phaeosphaeria nodorum SN15] gi|160705158|gb|EAT77112.2| SNOG_15447 [Phaeosphaeria nodorum SN15]
  misc_feature (1)..(344): NCBI GI: 70988821 Blast Desc: D-mandelate dehydrogenase [Aspergillus fumigatus Af293] gi|66846895|gb|EAL87226.1| D-mandelate dehydrogenase, [Aspergillus fumigatus Af293] gi|159128678|gb|EDP53792.1| A1163]
  misc_feature (1)..(344): NCBI GI: 119497863 Blast Desc: D-mandelate dehydrogenase, [Neosartorya fischeri NRRL 181] gi|119413853|gb|EAW23792.1| D-mandelate dehydrogenase, [Neosartorya fischeri NRRL 181]
  misc_feature (1)..(344): NCBI GI: 121711138 Blast Desc: D-mandelate dehydrogenase, [Aspergillus clavatus NRRL 1] gi|119401335|gb|EAW11759.1| D-mandelate dehydrogenase, [Aspergillus clavatus NRRL 1]
  misc_feature (3)..(344): NCBI GI: 67901352 Blast Desc: AN7663.2 [Aspergillus nidulans FGSC A4] gi|40742659|gb|EAA61849.1| AN7663.2 [Aspergillus nidulans FGSC A4] gi|259484002|tpe|CBF79854.1| TPA: D-mandelate dehydrogenase,
  misc_feature (7)..(345): NCBI GI: 238494742 Blast Desc: D-mandelate dehydrogenase, [Aspergillus flavus NRRL3357] gi|220695257|gb|EED51600.1| D-mandelate dehydrogenase, [Aspergillus flavus NRRL3357]
  misc_feature (7)..(344): NCBI GI: 169777565 Blast Desc: [Aspergillus oryzae RIB40] gi|83771985|dbj|BAE62115.1| protein product [Aspergillus oryzae]
  misc_feature (4)..(343): NCBI GI: 46138331 Blast Desc: FG10680.1 [Gibberella zeae PH-1]
  misc_feature (4)..(345): NCBI GI: 145235495 Blast Desc: An03g05150 [Aspergillus niger] gi|134058081|emb|CAK49167.1| protein product [Aspergillus niger]
  misc_feature (31)..(329): SWISSPROT Homolog: EC 1.1.1.81 Hydroxypyruvate reductase
  misc_feature (31)..(329): SWISSPROT Homolog: EC 1.1.1.79 Glyoxylate reductase (NADP(+))
MTSKPIVLHIGDPVEFNPSLYEEFSSQFTVIRPSLEERQREPFLQALRDGKWGDFQAVFRPFWNTGGEMGRWDKELIPLLPKSMKVYASAGAGYDWADTDIMAEHGILYCNGASASSEAVADMALYHILSVFRNITWSAIAARSGDSAQFLDAHKNQPIGAHNPKEHIIGIIGLGNIGYTIAKKAFAAFGAKIHYHDIVRKSAEQEGAIEATFVEELDDLLAGSDCVVLATPFGGKALIDAERLSKFKKGSRFVNIARGTLVDEDALIEALKSGHLHAAGLDVFQNEPHIHPELVKMRNVSLTCHNAGGAEETRHGFERLAMQNIQAVLLEGKPLTPVNAHLIKK

SEQ ID NO: 26506 - DNA, 1104 bp, Muscodor strobelii
  misc_feature: SGI cDNA ID NO. 569066
  misc_feature: Encodes the peptide sequence at SEQ ID NO 26507
atgtccacaacagcaacatatcgcacgcgcatgcagcgctggtttcctgggacagcgcatccgctagtcatcagtgcgccgatggactttgttacgaatgcgaagcttgcgagtgaggtatcgaaggcaaaggggtttggctttatacaaggcggccgaacctttaagccagactcgcctgttttaccaaaattagagaaagagctttctcaagccgccagcctcctcgaaccctcctctgagagtggcacgctgcctattggcgtgggcttcgtcctctactcagcatgtgccgcgacacactttggccagaccacagtcccccttctagctcggttcaaacctgcagcaatctggttcttcgcgccggacccggaaatgccgcacacactcggccgcgtgatcaaagatgtgcgggaagctagtgaccaaacctggaacccgaagattgttgttcaggtcgggactgtcggccatgcgagagaggccgcgcaattaggcgccgatgttattgtcgcacagggcgtggatgctggtggtcatcagtttgccaaaggcgcggggatcgtgagccttgttcctgaaattagagatatgctgcatcgtgagttttatgagagggatattgcggtttgggctgcgggtggtattgctgatgggaggggtgttgcggctgcgttggctcttggtgctgacgcggcggttttgggcacgaggtatatggttgctgatgaatcagatgctcaagacttcaaaagaaaagccatcctatcgacggtagatggaggtgtgaacacagtcaagtctcaattacatgatcatgttcagagcaatagagagtggccggatctctacgatggtcgagctttattgcatccgtcccaccatgataatgaagcaggcgtgcccatccacgagaacgaagccaagtttaaggctgctaaggagagtggcgatacatcgcgcatggtcacgtgggcgggaacgggcgttggtcttgtggattctgagctactagctcgggatatcacaatatccgtgaggggggaggctatttccagtataagagctctatacgcgtgttcagaggctaccgaatggtga

SEQ ID NO: 26507 - protein, 367 aa, Muscodor strobelii
  misc_feature: SGI Peptide ID NO. 569066
  misc_feature (8)..(350): Pfam Id: PF03060 Pfam Desc: 2-nitropropane dioxygenase
  misc_feature (149)..(258): Pfam Id: PF03060 Pfam Desc: 2-nitropropane dioxygenase
  misc_feature (9)..(360): NCBI GI: 85085859 Blast Desc: 2-nitropropane dioxygenase precursor [Neurospora crassa OR74A] gi|2498094|sp|Q01284.1|2NPD_NEUCR RecName: Full=2-nitropropane dioxygenase; Short=2-NPD; AltName: oxidase;
  misc_feature (9)..(351): NCBI GI: 256731739 Blast Desc: NECHADRAFT_100543 [Nectria haematococca mpVI 77-13-4]
  misc_feature (1)..(357): NCBI GI: 145612625 Blast Desc: MGG_07261 [Magnaporthe grisea 70-15] gi|145019762|gb|EDK03990.1| MGG_07261 [Magnaporthe grisea 70-15]
  misc_feature (9)..(356): NCBI GI: 46137099 Blast Desc: FG10065.1 [Gibberella zeae PH-1]
  misc_feature (11)..(353): NCBI GI: 115390246 Blast Desc: [Aspergillus terreus NIH2624] gi|114195024|gb|EAU36724.1| [Aspergillus terreus NIH2624]
  misc_feature (11)..(357): NCBI GI: 145610298 Blast Desc: oxidoreductase, 2-nitropropane dioxygenase family, [Magnaporthe grisea 70-15] gi|145017630|gb|EDK01993.1| oxidoreductase, 2-nitropropane dioxygenase family, [Magnaporthe
  misc_feature (15)..(353): NCBI GI: 242792288 Blast Desc: oxidoreductase, 2-nitropropane dioxygenase family, [Talaromyces stipitatus ATCC 10500] gi|218718510|gb|EED17930.1| oxidoreductase, 2-nitropropane dioxygenase family, [Talaromyces
  misc_feature (13)..(327): NCBI GI: 255948656 Blast Desc: Pc22g11480 [Penicillium chrysogenum Wisconsin 54-1255] gi|211592112|emb|CAP98436.1| Pc22g11480 [Penicillium chrysogenum Wisconsin 54-1255]
  misc_feature (11)..(358): NCBI GI: 119501705 Blast Desc: 2-nitropropane dioxygenase family oxidoreductase, [Neosartorya fischeri NRRL 181] gi|119415775|gb|EAW25712.1| 2-nitropropane dioxygenase family oxidoreductase, [Neosartorya
  misc_feature (11)..(360): NCBI GI: 169771917 Blast Desc: [Aspergillus oryzae RIB40] gi|83768287|dbj|BAE58426.1| protein product [Aspergillus oryzae]
  misc_feature (9)..(360): SWISSPROT Homolog: EC 1.13.11.32 2-nitropropane dioxygenase
MSTTATYRTRMQRWFPGTAHPLVISAPMDFVTNAKLASEVSKAKGFGFIQGGRTFKPDSPVLPKLEKELSQAASLLEPSSESGTLPIGVGFVLYSACAATHFGQTTVPLLARFKPAAIWFFAPDPEMPHTLGRVIKDVREASDQTWNPKIVVQVGTVGHAREAAQLGADVIVAQGVDAGGHQFAKGAGIVSLVPEIRDMLHREFYERDIAVWAAGGIADGRGVAAALALGADAAVLGTRYMVADESDAQDFKRKAILSTVDGGVNTVKSQLHDHVQSNREWPDLYDGRALLHPSHHDNEAGVPIHENEAKFKAAKESGDTSRMVTWAGTGVGLVDSELLARDITISVRGEAISSIRALYACSEATEW

SEQ ID NO: 26508 - DNA, 2491 bp, Muscodor strobelii
  misc_feature: SGI EST ID NO. CUFF.62624.0
  misc_feature: Variant of the nucleotide sequence at SEQ ID NO 26506
tatagcttgcatcgaccattgctaatattgctggtccgttagtagccgatcgcggaattagttattgacgtttcgcaggatcattaatgttgctcatggcctgccaggttgaatatttgaacgatcaagttacgggataatgaattgcgatctgagtttctcatcttgacctttccgtaaacccgatcagcacgggcgtgggtagttcggactgagtgtggggtgccggttggaatcacggaaaagatatctccttggaacccttacaaatctcaccaccatctactccgtccaccgaggttcatatgtacatttgagcgagaggttccactttgatctccgcagatctgacatttgacgccggtgcttggcgattattttccccggattaagggaggatatatgtattgggacagcttatccgtcttaagtgcacagccctaggtgaggagagcatttgatatttacacgaccgatccagagttttcgggaaatgaagagagcttttagaacagcgatacagacggtgaagatgtccacaacagcaacatatcgcacgcgcatgcagcgctggtttcctgggacagcgcatccgctagtcatcagtgcgccgatggactttgttacgaatgcgaagcttgcgagtgaggtatcgaaggcaaaggggtttggctttatacaaggcggccgaacctttaagccagactcgcctgttttaccaaaattagagaaagagctttctcaagccgccagcctcctcgaaccctcctctgagagtggcacgctgcctattggcgtgggcttcgtcctctactcagcatgtgccgcgacacactttggccagaccacagtcccccttctagctcggttcaaacctgcagcaatctggttcttcgcgccggacccggaaatgccgcacacactcggccgcgtgatcaaagatgtgcgggaagctagtgaccaaacctggaacccgaagattgttgttcaggtcgggactgtcggccatgcgagagaggccgcgcaattaggcgccgatgttattgtcgcacagggcgtggatgctggtggtcatcagtttgccaaaggcgcggggatcgtgagccttgttcctgaaattagagatatgctgcatcgtgagttttatgagagggatattgcggtttgggctgcgggtggtattgctgatgggaggggtgttgcggctgcgttggctcttggtgctgacgcggcggttttgggcacgaggtatatggttgctgatgaatcagatgctcaagacttcaaaagaaaagccatcctatcgacggtagatggaggtgtgaacacagtcaagtctcaattacatgatcatgttcagagcaatagagagtggccggatctctacgatggtcgagctttattgcatccgtcccaccatgataatgaagcaggcgtgcccatccacgagaacgaagccaagtttaaggctgctaaggagagtggcgatacatcgcgcatggtcacgtgggcgggaacgggcgttggtcttgtggattctgagctactagctcgggatatcacaatatccgtgaggggggaggctatttccagtataagagctctatacgcgtgttcagaggctaccgaatggtgacggcagaggtccgatggactgtagatatgacctgaagtctgcgcaaaggcatctgaagcttatgccgatgacgagttgaagccgccgaagtcgactccgatggctgtaatctataggatactggacaatggtcaccaagggcgcgagcgtcttagcaaaatcattgctctctagaggggcatctgaattttcgccctcttcgtctgctcagactttgttgccggatgaatagctgataatccaagagcttatcatttcgagatatcccagtttcagtttgattttcccttctgttcttcgaatttcccagttttcaatatccacaaaagtctcgagtgactatcatgttcttttcagctcaggttctcgatgactgggccatctggcgatagatgaaagctgactgttgaacgcctctcgtggactaataggctattatacacaagatctagaaatcatcgtacgaccctccaaattgtctttcaatagtcaaaaggcgcccggtacattgcacggttcagggtctttcataactcgatgtccttcataactcaatgaccgtccgaactatccaatatgtaactgaggttagcttagccgacgacgtcggctacgctaaggtgggaactcggggtggtgtcaagcgacggggaatatttggggtatgcgggggtcagaagtgtgagctgcggggtggagtggaagatatttgattctcttaggatcgatcactatgatataataattttggactgcatatagtaccgacaggttgcacaggtgtgagtcactgttgcgttggtgttgcgcaatatattgatattgagtaaacgatgttgtgacattcattacttt

SEQ ID NO: 26509 - DNA, 1986 bp, Muscodor strobelii
  misc_feature: SGI cDNA ID NO. 569067
  misc_feature: Encodes the peptide sequence at SEQ ID NO 26510
atgtcttctttcgcggccctgcctcagcactatctcccttaccctccctctccatcctactccgcaggctacccgcggcgagacgtcaattcccatttctcagagttcccaggcagacccgtggcgaaagagactgcccatgccctgggtggtctcgctacgccgccagcagaatacaccatgagtgccgcttatcaccatccagtagttgccccgtccaatacctacgacagccatgttgcgcttgccagacatccaaacgccatggtgccctcatctcgtgggccgagcaacacgctctacgatgcggttgcgcacccatactcgagaccacaagctcatcctccgttaccctcacagcttagttctgtccagacgctcaactcacagccgggctctggtgcatcgcgacattccactcgaccctcgacgcctacgccggctagcagtctaagcagtcactccgaaggaacagtctctagaaaagactcgatcttggtatcacatagtctgcaacttccagacttcataagtcccaatggcgggactctcgatgaattcgctgcctcgatgacctgttttttctggttcgaaacgatggacacgatacaggcagccgagcagatcaacacacgtcgaccgtccgagcctttgcctcctctatccgaatacagcaggccgtcatcaggctacaagaaatgggtccatacgattttgacaacaacccaagtcactcaaaatgtggtcttccttgcgcttctttttgtgtataggctgaaaaagaccaatcctcgagtgcatggcaatcccgggagcgagtatcgactgctcactgtggctctgatgttgggcaacaaattcttagacgacaatacctacacgaataagacctgggcggatgtctcgggcattgctgtcaaggaaatccatgtcatggaagtcgagttcctgagtaacatgagatacggattattgacgtccaaagagcaatggaaggaatggctacagaaactggcttgctatcgccaatatcacgagcgtgcacagatggaggagggcgtacgacaaatgcaagctggggccgtccacatatcgccacagaatcgcagccgttacgcatctcccctgccatctccgacggttgttcttccaccaaacctgcatggagcgccatcagctcttacgtccgcttattcacccgtgtccgctccccaaactggctggaacggtacataccatcatggacctactgtatccccactggctgcgaagccgagtctcgggcatgcactggtgcgcaaaagaagcttcgaggttggagagactattgagccgcctgctaagagggtatctcgacagcctccagtatcaactataccctcgatgcgctccatcccggctgcgactgattctgtacgtctccctgtcccgcagcttactcttgatacgagccaaaatacgctgccgggtgcatatggggcgtcaaattacccgcccccgcaatccatgtctctgcctcctcttgtcccgggtgttcgggctatgtcgactgtgtattccgcaccggtgcctacgacaacgtgggcacagcaagcgccatccatggtaacgacttgtgcaccccagacgccagcttacactctcccgtccaactatgcgacacctaccaaacgacacagtcccccaggaatgccgccgttcggatcatctcccttggcagaggtctacgccacccacacccccatctctaactcaccctcggtctatctgcagcaaagagctagtccctacaagccagtacgccgagtgcatacgttactcaatccaccgccgtcgatgccattgtcagagtatcatcttggctctggtcagatgcactatcagccactcggccgacgaaatgatctccggtctggggtcgtccccgagttcctgtctccatatgactatccgcgtcacccacccacacatcaacgataccagtga

SEQ ID NO: 26510 - protein, 661 aa, Muscodor strobelii
  misc_feature: SGI Peptide ID NO. 569067
  misc_feature (200)..(324): Pfam Id: PF08613 Pfam Desc: Cyclin
  misc_feature (274)..(324): Pfam Id: PF08613 Pfam Desc: Cyclin
  misc_feature (127)..(646): NCBI GI: 261359188 Blast Desc: conserved [Verticillium albo-atrum VaMs.102]
  misc_feature (138)..(661): NCBI GI: 46111697 Blast Desc: FG02730.1 [Gibberella zeae PH-1]
  misc_feature (166)..(658): NCBI GI: 256726117 Blast Desc: NECHADRAFT_61982 [Nectria haematococca mpVI 77-13-4]
  misc_feature (166)..(646): NCBI GI: 116191185 Blast Desc: CHGG_05310 [Chaetomium globosum CBS 148.51] gi|88181223|gb|EAQ88691.1| CHGG_05310 [Chaetomium globosum CBS 148.51]
  misc_feature (146)..(644): NCBI GI: 39940622 Blast Desc: MGG_04929 [Magnaporthe grisea 70-15] gi|145010835|gb|EDJ95491.1| MGG_04929 [Magnaporthe grisea 70-15]
  misc_feature (134)..(644): NCBI GI: 171681184 Blast Desc: protein product [Podospora anserina] gi|170940550|emb|CAP65778.1| protein product [Podospora anserina]
  misc_feature (156)..(647): NCBI GI: 85109428 Blast Desc: NCU05726 [Neurospora crassa OR74A] gi|28924555|gb|EAA33676.1| NCU05726 [Neurospora crassa OR74A]
  misc_feature (170)..(644): NCBI GI: 154309334 Blast Desc: BC1G_07561 [Botryotinia fuckeliana B05.10] gi|150852385|gb|EDN27577.1| BC1G_07561 [Botryotinia fuckeliana B05.10]
  misc_feature (167)..(642): NCBI GI: 189207559 Blast Desc: conserved [Pyrenophora tritici-repentis Pt-1C-BFP] gi|187976206|gb|EDU42832.1| conserved [Pyrenophora tritici-repentis Pt-1C-BFP]
  misc_feature (171)..(642): NCBI GI: 119495568 Blast Desc: mucin, [Neosartorya fischeri NRRL 181] gi|119412728|gb|EAW22669.1| mucin, [Neosartorya fischeri NRRL 181]
MSSFAALPQHYLPYPPSPSYSAGYPRRDVNSHFSEFPGRPVAKETAHALGGLATPPAEYTMSAAYHHPVVAPSNTYDSHVALARHPNAMVPSSRGPSNTLYDAVAHPYSRPQAHPPLPSQLSSVQTLNSQPGSGASRHSTRPSTPTPASSLSSHSEGTVSRKDSILVSHSLQLPDFISPNGGTLDEFAASMTCFFWFETMDTIQAAEQINTRRPSEPLPPLSEYSRPSSGYKKWVHTILTTTQVTQNVVFLALLFVYRLKKTNPRVHGNPGSEYRLLTVALMLGNKFLDDNTYTNKTWADVSGIAVKEIHVMEVEFLSNMRYGLLTSKEQWKEWLQKLACYRQYHERAQMEEGVRQMQAGAVHISPQNRSRYASPLPSPTVVLPPNLHGAPSALTSAYSPVSAPQTGWNGTYHHGPTVSPLAAKPSLGHALVRKRSFEVGETIEPPAKRVSRQPPVSTIPSMRSIPAATDSVRLPVPQLTLDTSQNTLPGAYGASNYPPPQSMSLPPLVPGVRAMSTVYSAPVPTTTWAQQAPSMVTTCAPQTPAYTLPSNYATPTKRHSPPGMPPFGSSPLAEVYATHTPISNSPSVYLQQRASPYKPVRRVHTLLNPPPSMPLSEYHLGSGQMHYQPLGRRNDLRSGVVPEFLSPYDYPRHPPTHQRYQ

SEQ ID NO: 26511 - DNA, 3862 bp, Muscodor strobelii
  misc_feature: SGI EST ID NO. CUFF.62637.0
  misc_feature: Variant of the nucleotide sequence at SEQ ID NO 26509
ccgagagcgagaacgttcgccggactgcgtgtagcttttgtcattctggctcggtgtctctaacacaaccgcctttggcctctgcctgaccgtgtgaaatgttccgtgctggtgtggtgatcatcgtttccttcaaagggatccaattgattccctttccgaacacaaacgggcggcgctttgtggaagtatacagtggtgtgtgcgcttgtcttggctggcttcagcgaggcaatcggtgatagacacggtactagaacatcgtactagaaacatcgtacctctctcgcctctctccacctcatcctctgtttaatcttttttgacataccttgccttgttcgaaaacactgcccgcggggacggagagtcgtccaagaaagagaagtgacacctcggcctgcaatctcatctccaacttcccaccgtctcgtacatacttcccacatgccacgacttacaacctttgttacgccgtccccttactccccttccaagaccccacgacatacttgcttgtaataatagacaaaccttacgttttctcacctgccgaactctcgaattccctacattatacatttaaagtcgaaacagcgaaagaaatcttaccatctctacctctactagcgaacctatcgacaagactcgattctcttcatcgtcttgctcccactctccgtttgcactgctagtgcatatcaaactgctctctgctcaacccggctcgacggcaccataaacgaagtagcacgggcaacggcaagtggacgacgggtcaggtgctcctctccaggctgtcctgactctcgtggtgttgttgcctcttgggacgatatggctcaaccgagttgaccattctttcgatccgatagactctcctgtatacagctttactacgtctccttcgatctgttccattgtaccaatacgttcattcgatcagcacggttcaatgcagctttcacccactgcgattgtcactttggaattggaaagtagcaatctgcctccacagagaccattgtcccgagcaacacgcaacaacacgcatcgtctctgtggtttggaaagccattgacaaaggacgcagcaaccagccctcaacaacagctacagtgactgtgcgacgtcttttctgagcctgacattcagtcagcattcatccaattttctctggagcccatttgttcttgttggggggctaccggcatcgtctgattcaatcgatccctttgaatcactgcttataacgccaacctctcggcactatcttgttggcacccgcactccttttccatatgtcttctttcgcggccctgcctcagcactatctcccttaccctccctctccatcctactccgcaggctacccgcggcgagacgtcaattcccatttctcagagttcccaggcagacccgtggcgaaagagactgcccatgccctgggtggtctcgctacgccgccagcagaatacaccatgagtgccgcttatcaccatccagtagttgccccgtccaatacctacgacagccatgttgcgcttgccagacatccaaacgccatggtgccctcatctcgtgggccgagcaacacgctctacgatgcggttgcgcacccatactcgagaccacaagctcatcctccgttaccctcacagcttagttctgtccagacgctcaactcacagccgggctctggtgcatcgcgacattccactcgaccctcgacgcctacgccggctagcagtctaagcagtcactccgaaggaacagtctctagaaaagactcgatcttggtatcacatagtctgcaacttccagacttcataagtcccaatggcgggactctcgatgaattcgctgcctcgatgacctgttttttctggttcgaaacgatggacacgatacaggcagccgagcagatcaacacacgtcgaccgtccgagcctttgcctcctctatccgaatacagcaggccgtcatcaggctacaagaaatgggtccatacgattttgacaacaacccaagtcactcaaaatgtggtcttccttgcgcttctttttgtgtataggctgaaaaagaccaatcctcgagtgcatggcaatcccgggagcgagtatcgactgctcactgtggctctgatgttgggcaacaaattcttagacgacaatacctacacgaataagacctgggcggatgtctcgggcattgctgtcaaggaaatccatgtcatggaagtcgagttcctgagtaacatgagatacggattattgacgtccaaagagcaatggaaggaatggctacagaaactggcttgctatcgccaatatcacgagcgtgcacagatggaggagggcgtacgacaaatgcaagctggggccgtccacatatcgccacagaatcgcagccgttacgcatctcccctgccatctccgacggttgttcttccaccaaacctgcatggagcgccatcagctcttacgtccgcttattcacccgtgtccgctccccaaactggctggaacggtacataccatcatggacctactgtatccccactggctgcgaagccgagtctcgggcatgcactggtgcgcaaaagaagcttcgaggttggagagactattgagccgcctgctaagagggtatctcgacagcctccagtatcaactataccctcgatgcgctccatcccggctgcgactgattctgtacgtctccctgtcccgcagcttactcttgatacgagccaaaatacgctgccgggtgcatatggggcgtcaaattacccgcccccgcaatccatgtctctgcctcctcttgtcccgggtgttcgggctatgtcgactgtgtattccgcaccggtgcctacgacaacgtgggcacagcaagcgccatccatggtaacgacttgtgcaccccagacgccagcttacactctcccgtccaactatgcgacacctaccaaacgacacagtcccccaggaatgccgccgttcggatcatctcccttggcagaggtctacgccacccacacccccatctctaactcaccctcggtctatctgcagcaaagagctagtccctacaagccagtacgccgagtgcatacgttactcaatccaccgccgtcgatgccattgtcagagtatcatcttggctctggtcagatgcactatcagccactcggccgacgaaatgatctccggtctggggtcgtccccgagttcctgtctccatatgactatccgcgtcacccacccacacatcaacgataccagtgatctttgttgggattctatattgctcccaacatcatctctctttgcttccgtgttttctatccctgctatcatttgcatggccatcggcgtttcagggggcatacagtcggcaacttgctcgacaccacgcggaatctccgttctttatttttccttctctgtctcacatatctggccggtctcgagactattttgcatcaaaagggcgttcttcatagtgcatagagcaatgaagcaaattcagccagaaagtgaaaggctggccaagaagtatattgtctgagtattaacccgaagtggtcatgaggtggaggggacaagctgatcttcaagtgggttttcagatgttgcgatagtgaaaaaaaaaaagagaaggagagcgacgagcaagggacataaggcacttagtggagatagtgcagtgattaaactgcattctagggtttagttcagggcaggcacactaagtatctcgctagttagtcaaatactcgtacaaagctcgtacagacttctcctcaaggaatgtatccaaaagcattttctcatgaacatgtgagaacagttgagatccc

SEQ ID NO: 26512 - DNA, 2223 bp, Muscodor strobelii
  misc_feature: SGI cDNA ID NO. 569068
  misc_feature: Elevated expression when VOC is produced
  misc_feature: Encodes the peptide sequence at SEQ ID NO 26513
atggcgtacgctgaacacgaggagtccggtgcatccatcagagatgcaaccagtctaagcttcccagctatctacagcccaggtaccggccacgacaactacagcaacggtttcgccctgtctgaagaaccggactcaggcaccactccatgggcttcgggcgttcgaggtaacggaataaaacgctacgatacaaggaaagtgaaacttgtacggggcagcgtattatccgtcgaatatccggtcccaagtgctatcaaaaatgctatccaaactaagtattctgatctagagcaagggtccaccgagttctcgcatgttcaatatacggcagtcacatgtgacccgaatgacttcactctcagaaatggctatgacttacgaccacgccgatacaaccgccataccgagatgttagacgggatcatgaaaaaggaagtgaacgggaaggaaacgtcagctcatgtgtttgagtacactacgcaattgtcattcatcctctgcttgaaatcacgcaatcagggcaaaatcaactcgaaccgatggatatatactgcattcggtcgtatactgaacccggagattatagtccatgttgatacaggaaccaaaatcggggaaaattcgctccgacacctctgggctgcgttctataatgacagaaatttaggcggagcatgtggtattataagtcctatacttggaaaaggtggccgtggtctcttgaatcctatagttgcggcacagaactttgagtataaagttgcctgccaactagagcgagccctagagtcaactacagggtatctctcagtacttccaggagcattttctgcttacaggttccgagcagtcatgggaaggccatttgagcggtactgtgtcggcgataagacgcttgcatcaattcaaggcaaagatgtcgtcaatcggatgaatattttcgaagaaaatagatttctcgctgacgatcgcgtgctctccttcgaattaattaccaaagctggctcaaagtggcacacgcgtctggtgacaaaagccgtagccgaaactgatatccccatgtctaccatcgactttattaatcagcgccgccggtggttgaatgggtctatgtcagccgccgtctacagtctacgttccttttacaggttaacctggtccaaccataacgttgtgcgcatggcgctgctctttatccaagcgctttataatctcctctcgttattgctagcctggttctctttggctggatacttactgaccactttcattgttaacgatatcgttggcaacccaccagatgagtcggttaatgggttccccttcggagccgccacccgtattgtcaactcggtgatccagatcgtctatcttattactatcatcttcgtgttcattgttgcattaggcggccgggctaaaagccacacgcatagttacactgcttcgtttctcatcttcgctgtcgtgcagctctaccttgtgatcaatctcatttatcttgccaaacgcctcatcgaccacaaactcgaccatgacggtggcaatagttacagctacatcagcgagtattattctgacgttggatcattaacaatattggttgcagccatttcggtctttggcatctatattgtcgcaggcatactttgtctcgacccgtggcacctatggcatagctgggcgcaatatctctttatatcatcctcctacacgaacattctcaaaacctatgccttcagcaacatacacgatgccacatgggggcataagagcggcaagaagatcattattgtgcagcatccacagccgcatcttacaatcgtaaaggatatcgcacagtccccatatgaccagtccccagatacacagccaggtttacaagaggacatcgacagtacattcgaggcaacggtgaagagagctctcgctccgcacaaagaggaaaagatcatcccaactaaggaccccgaagatgatttcttacggttccgcacgaccctaattgctgtctacctgttttccaactttctcgtctgtattattgtgatgaacgactccctgcaacagctgtggtggctcggagacccttattggcataaagtttggttctttagaatatggctgtggggtaactcggtgcttctcatactgcagttcattggctgtttgtatcaacggctggtggctatatcttacttgcttttgtccagatattga

SEQ ID NO: 26513 - protein, 740 aa, Muscodor strobelii
  misc_feature: SGI Peptide ID NO. 569068
  misc_feature (115)..(217): Pfam Id: PF01644 Pfam Desc: Chitin synthase
  misc_feature (61)..(143): Pfam Id: PF08407 Pfam Desc: Chitin synthase N-terminal
  misc_feature (81)..(504): Pfam Id: PF03142 Pfam Desc: Chitin synthase
  misc_feature (165)..(217): Pfam Id: PF01644 Pfam Desc: Chitin synthase
  misc_feature (140)..(164): Pfam Id: PF01644 Pfam Desc: Chitin synthase
  misc_feature (61)..(137): Pfam Id: PF08407 Pfam Desc: Chitin synthase N-terminal
  misc_feature (141)..(726): NCBI GI: 256722915 Blast Desc: NECHADRAFT_52578 [Nectria haematococca mpVI 77-13-4]
  misc_feature (140)..(726): NCBI GI: 10436182 Blast Desc: AF298189_1 class III chitin synthase [Coccidioides posadasii] gi|240107478|gb|EER25663.1| class III chitin synthase [Coccidioides posadasii C735 delta SOWgp]
  misc_feature (140)..(726): NCBI GI: 119191199 Blast Desc: chitin synthase G [Coccidioides immitis RS]
  misc_feature (140)..(726): NCBI GI: 238841535 Blast Desc: chitin synthase G [Microsporum canis CBS 113480]
  misc_feature (140)..(726): NCBI GI: 258564783 Blast Desc: chitin synthase G [Uncinocarpus reesii 1704] gi|237906837|gb|EEP81238.1| chitin synthase G [Uncinocarpus reesii 1704]
  misc_feature (140)..(726): NCBI GI: 70998925 Blast Desc: chitin synthase ChsG [Aspergillus fumigatus Af293] gi|6166003|sp|P54267.2|CHSG_ASPFU RecName: Full=Chitin synthase G; AltName: Full=Chitin-UDP acetyl-glucosaminyl transferase G; G
  misc_feature (140)..(726): NCBI GI: 1197187 Blast Desc: chitin synthase G [Aspergillus fumigatus]
  misc_feature (140)..(726): NCBI GI: 121706256 Blast Desc: chitin synthase G [Aspergillus clavatus NRRL 1] gi|119399537|gb|EAW09965.1| chitin synthase G [Aspergillus clavatus NRRL 1]
  misc_feature (140)..(726): NCBI GI: 115390352 Blast Desc: chitin synthase G [Aspergillus terreus NIH2624] gi|114195077|gb|EAU36777.1| chitin synthase G [Aspergillus terreus NIH2624]
  misc_feature (140)..(726): NCBI GI: 119490296 Blast Desc: chitin synthase G [Neosartorya fischeri NRRL 181] gi|119411180|gb|EAW21123.1| chitin synthase G [Neosartorya fischeri NRRL 181]
  misc_feature (140)..(726): SWISSPROT Homolog: EC 2.4.1.16 Chitin synthase
  misc_feature: Useful for introducing or modulating the production of volatile compounds
MAYAEHEESGASIRDATSLSFPAIYSPGTGHDNYSNGFALSEEPDSGTTPWASGVRGNGIKRYDTRKVKLVRGSVLSVEYPVPSAIKNAIQTKYSDLEQGSTEFSHVQYTAVTCDPNDFTLRNGYDLRPRRYNRHTEMLDGIMKKEVNGKETSAHVFEYTTQLSFILCLKSRNQGKINSNRWIYTAFGRILNPEIIVHVDTGTKIGENSLRHLWAAFYNDRNLGGACGIISPILGKGGRGLLNPIVAAQNFEYKVACQLERALESTTGYLSVLPGAFSAYRFRAVMGRPFERYCVGDKTLASIQGKDVVNRMNIFEENRFLADDRVLSFELITKAGSKWHTRLVTKAVAETDIPMSTIDFINQRRRWLNGSMSAAVYSLRSFYRLTWSNHNVVRMALLFIQALYNLLSLLLAWFSLAGYLLTTFIVNDIVGNPPDESVNGFPFGAATRIVNSVIQIVYLITIIFVFIVALGGRAKSHTHSYTASFLIFAVVQLYLVINLIYLAKRLIDHKLDHDGGNSYSYISEYYSDVGSLTILVAAISVFGIYIVAGILCLDPWHLWHSWAQYLFISSSYTNILKTYAFSNIHDATWGHKSGKKIIIVQHPQPHLTIVKDIAQSPYDQSPDTQPGLQEDIDSTFEATVKRALAPHKEEKIIPTKDPEDDFLRFRTTLIAVYLFSNFLVCIIVMNDSLQQLWWLGDPYWHKVWFFRIWLWGNSVLLILQFIGCLYQRLVAISYLLLSRY

SEQ ID NO: 26514 - DNA, 5846 bp, Muscodor strobelii
  misc_feature: SGI EST ID NO. CUFF.63084.0
  misc_feature: Variant of the nucleotide sequence at SEQ ID NO 26512
aaatttacatcttcttttatccatgttacacgcatgctgtaagcgttggaaatttcgacatggcgtacgctgaacacgaggagtccggtgcatccatcagagatgcaaccagtctaagcttcccagctatctacagcccaggtaccggccacgacaactacagcaacggtttcgccctgtctgaagaaccggactcaggcaccactccatgggcttcgggcgttcgaggtaacggaataaaacgctacgatacaaggaaagtgaaacttgtacggggcagcgtattatccgtcgaatatccggtcccaagtgctatcaaaaatgctatccaaactaagtattctgatctagagcaagggtccaccgagttctcgcatgttcaatatacggcagtcacatgtgacccgaatgacttcactctcagaaatggctatgacttacgaccacgccgatacaaccgccataccgagatgttagtatgtttaacttactataacgaggacaaggtattttttagtcgatcctatcatagtgtgatgcgaaacatccgcgatattatcaacctaaaaaggtctacgttttggaacaaaggtacagctgcgtggaaaagaatcgttttatgcctagtgatggatggagttgacctatgcgaccctgctgttctcgatactattgcgactgttggggtatatcaggacgggatcatgaaaaaggaagtgaacgggaaggaaacgtcagctcatgtgtttgagtacactacgcaattgtcagtgacgccagatcagcagttactcagaccaacagacgatagccacagacattaccaccagtgcagttcatcctctgcttgaaatcacgcaatcagggcaaaatcaactcgaaccgatggatatatactgcattcggtcgtatactgaacccggagattatagtccatgttgatacaggaaccaaaatcggggaaaattcgctccgacacctctgggctgcgttctataatgacagaaatttaggcggagcatgtggtattataagtcctatacttggaaaaggtggccgtggtctcttgaatcctatagttgcggcacagaactttgagtataaagttgcctgccaactagagcgagccctagagtcaactacagggtatctctcagtacttccaggagcattttctgcttacaggttccgagcagtcatgggaaggccatttgagcggtactgtgtcggcgataagacgcttgcatcaattcaaggcaaagatgtcgtcaatcggatgaatattttcgaagaaaatagatttctcgctgacgatcgcgtgctctccttcgaattaattaccaaagctggctcaaagtggcacacgcgtctggtgacaaaagccgtagccgaaactgatatccccatgtctaccatcgactttattaatcagcgccgccggtggttgaatgggtctatgtcagccgccgtctacagtctacgttccttttacaggttaacctggtccaaccataacgttgtgcgcatggcgctgctctttatccaagcgctttataatctcctctcgttattgctagcctggttctctttggctggatacttactgaccactttcattgttaacgatatcgttggcaacccaccagatgagtcggttaatgggttccccttcggagccgccacccgtattgtcaactcggtgatccagatcgtctatcttattactatcatcttcgtgttcattgttgcattaggcggccgggctaaaagccacacgcatagttacactgcttcgtttctcatcttcgctgtcgtgcagctctaccttgtgatcaatctcatttatcttgccaaacgcctcatcgaccacaaactcgaccatgacggtggcaatagttacagctacatcagcgagtattattctgacgttggatcattaacaatattggttgcagccatttcggtctttggcatctatattgtcgcaggcatactttgtctcgacccgtggcacctatggcatagctgggcgcaatatctctttatatcatcctcctacacgaacattctcaaaacctatgccttcagcaacatacacgatgccacatgggggcataagagcggcaagaagatcattattgtgcagcatccacagccgcatcttacaatcgtaaaggatatcgcacagtccccatatgaccagtccccagatacacagccaggtttacaagaggacatcgacagtacattcgaggcaacggtgaagagagctctcgctccgcacaaagaggaaaagatcatcccaactaaggaccccgaagatgatttcttacggttccgcacgaccctaattgctgtctacctgttttccaactttctcgtctgtattattgtgatgaacgactccctgcaacagctgtggtggctcggagacccttattggcataaagtttggttctttagaatatggctgtggggtaactcggtgcttctcatactgcagttcattggctgtttgtatcaacggctggtggctatatcttacttgcttttgtccagatattgaggaagaaagaggatcgcaggtcatttctatagctacttgtcaaagtgtttttttaaatatgtacacacgtcagatctagacggcggttcaaatcgacggggggtgggctctgcctatatggtatgtaacagctggctcagtggcttaacatttggccaatatccatggaacctcaagcccagaatactaccaaacgacatcgagtaagtccattgatgtatagatagaaatgcacgggtaagacaatggtagaacttgtatggtatgattatatgtacccatgtccagaccggtgtatgtaatgccaacccctattcattcatggttcttggctccttcactctacagtcacctctcgaggcgcccgctggctcttccaaacaagtactccgaccatatgacacatatcgtaccctctacatacgacgttcctgcttcgccaagcaggcagacccagcttcagaccaatttcttgactctacctggtcgatgatctttgctctttggcgggtgtagttttgacagccaacgccaagtgatgcatattttctcctgaacttcatttggcatggacatcaaccaccctatgggctggcccatccgccggcaacgtcgacccattcagccaagcaagaaccctctttgccctctacatcgacaatatctgtgtcacatcggcagcggcagcctacaccgttctccttctcgtcatcccagtgctcccagtagtcgtcttcctcaatgcgttgcctctcatccgtcgttgtcaactcaaggtaagggtcgcgaggaagttgtcgagcaggagcattggcggggcagtgctgaatggttgtgtgtcggtaaccgaagtcacggaagtaatgaatatccttgactcccaatagaacaccagcggcgagagagtgaataggagcatcaccccactgtactcttgattagcaacggccaaatatcaagacttctagccaagacttacccgttccatccagaatccaccacttcggtccatcatttggaagaaggcctcgtattctttgctacggaaccagctcaacttggcaatctcaaagttggaccagaaatgacacatgttgtagttctcgccatccatttcctcggggtgaatttcaggtagacctttgcccgcgaggatctcttcaggcagaggcggcttgtagttgggatcatcttcgggtttcgattgctccgccttgggctcgacaaacatctcccaaaggccttgggaggtgatgttgttgaggcgcttgtaggcagacgcgtaacggaaaatatttggcacggtttctcgaagttccttgactgcgatggtaaagccgtatgtcttgttggcctcgatcattctcaggaaaggatcactttagatgggttagcataaggcaacctcttagaaacgaaagatgcttataggcttactatgtgatgtcgcagaagtacttgatctcgggctccaatcgccagtaccactcgtatttggccaaaagctcatgcttgtagaaaaatctgcagcatgatcagtctcagttcatcaggccgcaaagagacagggtacctacccagagtagaagcgacacatggagtggtagctttccagaccaccgtacatgacggcggcatcaccctgtttagcaataccctcctttgcgaccttgggatcgatccagtcaggataaccccacatctctggtccgaccttgccgaactcgacttcaccggatgtatagttgcggacaacgtctttgaaggtctggttgaagtcgccgtcgttcaggaaaacataggggtaatgataccagcggttgaaatggcgctcaatcgacttgatcgactggatgacaccgtcaagctccttgtttcgggcgagcacgacgaaggcggcattggcacggggcttggaagtatcaggctcgagacagccagacacaaatacacgatcgtggtcttcgctgattttcctgtttgcccacgtggtcagcactcatactgtgaataatgaagtatggaagactaatcaatggcagcataccggatagcaggaggagcaccggcgggaatgagaatcctgccgggtgagcttggatgtctcacaaacagcaccaagatgaggattaggacaatgcatggaaacaaaacaacaacgcccaatggtacagatatgctagagttccccctcaaccggaggggtctgcgcaaaaatgcaaggcgagacttgaggttatgcgagcggccgcctcgtttctcgtcggccgtgggcagctgagcggtgcccaaggtcaccggtatgcgccggtacgcgcgtctgacgatatccatagtcgggctcttgcggaagcttgtcgtgggatgattttcaaacggtacaagtgtcgaaagactaagatgtgcctggtagggaatatgctaagatacaggatatctagacggtgccaaccaacatatactggggcgaagtcgttgggctgggcgcgactgagtagcgaagacggtggggtttgattattagaaatgatctatgtcgatcgcaaagtcaaaggcgaagagaagagaagagaagtctattccaatgccagtcgtctatacgtgatccttcccgtgcaaatgggtagagcgaagagcgcaatagaagggtggtctggcactaccgtccaccgttgtcgccgcagaggcggagcagtaacgagcgacgaggggacgatcccttgatgcgaggcgagcgcacagaatggcgacagctctgtggcagctcaatgacagctctcgggtcgcaggcggaagggcgagggcggatccgacgtgccaaaaggacacacaggcagcagcgacgtcgattagagtccgagcagctgcatgtgggatgggccggcgaaggataggaggtggcgtcgagacgagacgaccgaagatcccaggtcaacccagctggcaagactgaattgaggacaatgggggagaagaagaggaagcctccgtcgacaacgttgagatggaggcccctctagcgagatgatagatggccttatggggggatatggggcagcagatgggatagcgatggagaaaagggtgaggtcaaggcagataagattttctgtttctgggcgttgtcattttctcacgcgcttccaggctaccagggctgtccagggcactccgccagggggtgtcatggtgcgatagctctgtttggcaccatctcagctcgccagcttctcttgtgtcgcccaccctcagtacgtttaaaattgtgcttgggggttct

SEQ ID NO: 26515 - DNA, 1515 bp, Muscodor strobelii
  misc_feature: SGI cDNA ID NO. 569069
  misc_feature: Reduced expression when VOC is produced
  misc_feature: Encodes the peptide sequence at SEQ ID NO 26516
atggatatcgtcagacgcgcgtaccggcgcataccggtgaccttgggcaccgctcagctgcccacggccgacgagaaacgaggcggccgctcgcataacctcaagtctcgccttgcatttttgcgcagacccctccggttgagggggaactctagcatatctgtaccattgggcgttgttgttttgtttccatgcattgtcctaatcctcatcttggtgctgtttgtgagacatccaagctcacccggcaggattctcattcccgccggtgctcctcctgctatccggaaaatcagcgaagaccacgatcgtgtatttgtgtctggctgtctcgagcctgatacttccaagccccgtgccaatgccgccttcgtcgtgctcgcccgaaacaaggagcttgacggtgtcatccagtcgatcaagtcgattgagcgccatttcaaccgctggtatcattacccctatgttttcctgaacgacggcgacttcaaccagaccttcaaagacgttgtccgcaactatacatccggtgaagtcgagttcggcaaggtcggaccagagatgtggggttatcctgactggatcgatcccaaggtcgcaaaggagggtattgctaaacagggtgatgccgccgtcatgtacggtggtctggaaagctaccactccatgtgtcgcttctactctggatttttctacaagcatgagcttttggccaaatacgagtggtactggcgattggagcccgagatcaagtacttctgcgacatcacatatgatcctttcctgagaatgatcgaggccaacaagacatacggctttaccatcgcagtcaaggaacttcgagaaaccgtgccaaatattttccgttacgcgtctgcctacaagcgcctcaacaacatcacctcccaaggcctttgggagatgtttgtcgagcccaaggcggagcaatcgaaacccgaagatgatcccaactacaagccgcctctgcctgaagagatcctcgcgggcaaaggtctacctgaaattcaccccgaggaaatggatggcgagaactacaacatgtgtcatttctggtccaactttgagattgccaagttgagctggttccgtagcaaagaatacgaggccttcttccaaatgatggaccgaagtggtggattctggatggaacggtggggtgatgctcctattcactctctcgccgctggtgttctattgggagtcaaggatattcattacttccgtgacttcggttaccgacacacaaccattcagcactgccccgccaatgctcctgctcgacaacttcctcgcgacccttaccttgagttgacaacgacggatgagaggcaacgcattgaggaagacgactactgggagcactgggatgacgagaaggagaacggtgtaggctgccgctgccgatgtgacacagatattgtcgatgtagagggcaaagagggttcttgcttggctgaatgggtcgacgttgccggcggatgggccagcccatag

SEQ ID NO: 26516 - protein, 504 aa, Muscodor strobelii
  misc_feature: SGI Peptide ID NO. 569069
  misc_feature (58)..(424): Pfam Id: PF01793 Pfam Desc: Glycolipid 2-alpha-mannosyltransferase
  misc_feature (114)..(311): Pfam Id: PF01793 Pfam Desc: Glycolipid 2-alpha-mannosyltransferase
  misc_feature (347)..(424): Pfam Id: PF01793 Pfam Desc: Glycolipid 2-alpha-mannosyltransferase
  misc_feature (1)..(504): NCBI GI: 39973427 Blast Desc: alpha-1,2-mannosyltransferase Kre5 [Magnaporthe grisea 70-15] gi|145017887|gb|EDK02166.1| alpha-1,2-mannosyltransferase Kre5 [Magnaporthe grisea 70-15]
  misc_feature (1)..(504): NCBI GI: 85109183 Blast Desc: NCU05680 [Neurospora crassa OR74A] gi|28924428|gb|EAA33558.1| NCU05680 [Neurospora crassa OR74A]
  misc_feature (1)..(504): NCBI GI: 171681088 Blast Desc: protein product [Podospora anserina] gi|170940502|emb|CAP65730.1| protein product [Podospora anserina]
  misc_feature (1)..(504): NCBI GI: 256725699 Blast Desc: glycosyltransferase family 15 [Nectria haematococca mpVI 77-13-4]
  misc_feature (1)..(504): NCBI GI: 261359267 Blast Desc: glycolipid 2-alpha-mannosyltransferase [Verticillium albo-atrum VaMs.102]
  misc_feature (1)..(504): NCBI GI: 156040926 Blast Desc: SS1G_11441 [Sclerotinia sclerotiorum 1980] gi|154695825|gb|EDN95563.1| SS1G_11441 [Sclerotinia sclerotiorum 1980]
  misc_feature (1)..(504): NCBI GI: 154305195 Blast Desc: BC1G_08892 [Botryotinia fuckeliana B05.10] gi|150853634|gb|EDN28826.1| BC1G_08892 [Botryotinia fuckeliana B05.10]
  misc_feature (1)..(504): NCBI GI: 46111665 Blast Desc: FG02714.1 [Gibberella zeae PH-1]
  misc_feature (1)..(504): NCBI GI: 261191057 Blast Desc: alpha-1,2-mannosyltransferase [Ajellomyces dermatitidis SLH14081] gi|239590981|gb|EEQ73562.1| alpha-1,2-mannosyltransferase [Ajellomyces dermatitidis SLH14081]
  misc_feature (1)..(504): NCBI GI: 240275382 Blast Desc: alpha-1,2 mannosyltransferase [Ajellomyces capsulatus H143]
  misc_feature (92)..(497): SWISSPROT Homolog: EC 2.4.1.131 Glycolipid 2-alpha-mannosyltransferase
  misc_feature: Useful for introducing or modulating the production of volatile compounds
MDIVRRAYRRIPVTLGTAQLPTADEKRGGRSHNLKSRLAFLRRPLRLRGNSSISVPLGVVVLFPCIVLILILVLFVRHPSSPGRILIPAGAPPAIRKISEDHDRVFVSGCLEPDTSKPRANAAFVVLARNKELDGVIQSIKSIERHFNRWYHYPYVFLNDGDFNQTFKDVVRNYTSGEVEFGKVGPEMWGYPDWIDPKVAKEGIAKQGDAAVMYGGLESYHSMCRFYSGFFYKHELLAKYEWYWRLEPEIKYFCDITYDPFLRMIEANKTYGFTIAVKELRETVPNIFRYASAYKRLNNITSQGLWEMFVEPKAEQSKPEDDPNYKPPLPEEILAGKGLPEIHPEEMDGENYNMCHFWSNFEIAKLSWFRSKEYEAFFQMMDRSGGFWMERWGDAPIHSLAAGVLLGVKDIHYFRDFGYRHTTIQHCPANAPARQLPRDPYLELTTTDERQRIEEDDYWEHWDDEKENGVGCRCRCDTDIVDVEGKEGSCLAEWVDVAGGWASP

SEQ ID NO: 26517 - DNA, 4419 bp, Muscodor strobelii
  misc_feature: SGI EST ID NO. CUFF.63085.1
  misc_feature: Variant of the nucleotide sequence at SEQ ID NO 26515
caattttaaacgtactgagggtgggcgacacaagagaagctggcgagctgagatggtgccaaacagagctatcgcaccatgacaccccctggcggagtgccctggacagccctggtagcctggaagcgcgtgagaaaatgacaacgcccagaaacagaaaatcttatctgccttgacctcacccttttctccatcgctatcccatctgctgccccatatccccccataaggccatctatcatctcgctagaggggcctccatctcaacgttgtcgacggaggcttcctcttcttctcccccattgtcctcaattcagtcttgccagctgggttgacctgggatcttcggtcgtctcgtctcgacgccacctcctatccttcgccggcccatcccacatgcagctgctcggactctaatcgacgtcgctgctgcctgtgtgtccttttggcacgtcggatccgccctcgcccttccgcctgcgacccgagagctgtcattgagctgccacagagctgtcgccattctgtgcgctcgcctcgcatcaagggatcgtcccctcgtcgctcgttactgctccgcctctgcggcgacaacggtggacggtagtgccagaccacccttctattgcgctcttcgctctacccatttgcacgggaaggatcacgtatagacgactggcattggaatagacttctcttctcttctcttcgcctttgactttgcgatcgacatagatcatttctaataatcaaaccccaccgtcttcgctactcagtcgcgcccagcccaacgacttcgccccagtatatgttggttggcaccgtctagatatcctgtatcttagcatattccctaccaggcacatcttagtctttcgacacttgtaccgtttgaaaatcatcccacgacaagcttccgcaagagcccgactatggatatcgtcagacgcgcgtaccggcgcataccggtgaccttgggcaccgctcagctgcccacggccgacgagaaacgaggcggccgctcgcataacctcaagtctcgccttgcatttttgcgcagacccctccggttgagggggaactctagcatatctgtaccattgggcgttgttgttttgtttccatgcattgtcctaatcctcatcttggtgctgtttgtgagacatccaagctcacccggcaggattctcattcccgccggtgctcctcctgctatccggaaaatcagcgaagaccacgatcgtgtatttgtgtctggctgtctcgagcctgatacttccaagccccgtgccaatgccgccttcgtcgtgctcgcccgaaacaaggagcttgacggtgtcatccagtcgatcaagtcgattgagcgccatttcaaccgctggtatcattacccctatgttttcctgaacgacggcgacttcaaccagaccttcaaagacgttgtccgcaactatacatccggtgaagtcgagttcggcaaggtcggaccagagatgtggggttatcctgactggatcgatcccaaggtcgcaaaggagggtattgctaaacagggtgatgccgccgtcatgtacggtggtctggaaagctaccactccatgtgtcgcttctactctggatttttctacaagcatgagcttttggccaaatacgagtggtactggcgattggagcccgagatcaagtacttctgcgacatcacatatgatcctttcctgagaatgatcgaggccaacaagacatacggctttaccatcgcagtcaaggaacttcgagaaaccgtgccaaatattttccgttacgcgtctgcctacaagcgcctcaacaacatcacctcccaaggcctttgggagatgtttgtcgagcccaaggcggagcaatcgaaacccgaagatgatcccaactacaagccgcctctgcctgaagagatcctcgcgggcaaaggtctacctgaaattcaccccgaggaaatggatggcgagaactacaacatgtgtcatttctggtccaactttgagattgccaagttgagctggttccgtagcaaagaatacgaggccttcttccaaatgatggaccgaagtggtggattctggatggaacggtggggtgatgctcctattcactctctcgccgctggtgttctattgggagtcaaggatattcattacttccgtgacttcggttaccgacacacaaccattcagcactgccccgccaatgctcctgctcgacaacttcctcgcgacccttaccttgagttgacaacgacggatgagaggcaacgcattgaggaagacgactactgggagcactgggatgacgagaaggagaacggtgtaggctgccgctgccgatgtgacacagatattgtcgatgtagagggcaaagagggttcttgcttggctgaatgggtcgacgttgccggcggatgggccagcccatagggtggttgatgtccatgccaaatgaagttcaggagaaaatatgcatcacttggcgttggctgtcaaaactacacccgccaaagagcaaagatcatcgaccaggtagagtcaagaaattggtctgaagctgggtctgcctgcttggcgaagcaggaacgtcgtatgtagagggtacgatatgtgtcatatggtcggagtacttgtttggaagagccagcgggcgcctcgagaggtgactgtagagtgaaggagccaagaaccatgaatgaataggggttggcattacatacaccggtctggacatgggtacatataatcataccatacaagttctaccattgtcttacccgtgcatttctatctatacatcaatggacttactcgatgtcgtttggtagtattctgggcttgaggttccatggatattggccaaatgttaagccactgagccagctgttacataccatataggcagagcccaccccccgtcgatttgaaccgccgtctagatctgacgtgtgtacatatttaaaaaaacactttgacaagtagctatagaaatgacctgcgatcctctttcttcctcaatatctggacaaaagcaagtaagatatagccaccagccgttgatacaaacagccaatgaactgcagtatgagaagcaccgagttaccccacagccatattctaaagaaccaaactttatgccaataagggtctccgagccaccacagctgttgcagggagtcgttcatcacaataatacagacgagaaagttggaaaacaggtagacagcaattagggtcgtgcggaaccgtaagaaatcatcttcggggtccttagttgggatgatcttttcctctttgtgcggagcgagagctctcttcaccgttgcctcgaatgtactgtcgatgtcctcttgtaaacctggctgtgtatctggggactggtcatatggggactgtgcgatatcctttacgattgtaagatgcggctgtggatgctgcacaataatgatcttcttgccgctcttatgcccccatgtggcatcgtgtatgttgctgaaggcataggttttgagaatgttcgtgtaggaggatgatataaagagatattgcgcccagctatgccataggtgccacgggtcgagacaaagtatgcctgcgacaatatagatgccaaagaccgaaatggctgcaaccaatattgttaatgatccaacgtcagaataatactcgctgatgtagctgtaactattgccaccgtcatggtcgagtttgtggtcgatgaggcgtttggcaagataaatgagattgatcacaaggtagagctgcacgacagcgaagatgagaaacgaagcagtgtaactatgcgtgtggcttttagcccggccgcctaatgcaacaatgaacacgaagatgatagtaataagatagacgatctggatcaccgagttgacaatacgggtggcggctccgaaggggaacccattaaccgactcatctggtgggttgccaacgatatcgttaacaatgaaagtggtcagtaagtatccagccaaagagaaccaggctagcaataacgagaggagattataaagcgcttggataaagagcagcgccatgcgcacaacgttatggttggaccaggttaacctgtaaaaggaacgtagactgtagacggcggctgacatagacccattcaaccaccggcggcgctgattaataaagtcgatggtagacatggggatatcagtttcggctacggcttttgtcaccagacgcgtgtgccactttgagccagctttggtaattaattcgaaggagagcacgcgatcgtcagcgagaaatctattttcttcgaaaatattcatccgattgacgacatctttgccttgaattgatgcaagcgtcttatcgccgacacagtaccgctcaaatggccttcccatgactgctcggaacctattag

SEQ ID NO: 26518 - DNA, 540 bp, Muscodor strobelii
  misc_feature: SGI cDNA ID NO. 569070
  misc_feature: Reduced expression when VOC is produced
  misc_feature: Encodes the peptide sequence at SEQ ID NO 26519
atgtcacagaagataacgtctaaaaacctacactacgacacgaccctcccgcccttcctcgcgcgcctcaagggtcaacaatcctcccacacgggcccagacccaatcctcgcctcccaccgacgaccgggccaaaagcgctccgcgagcgaagaagccgaagatgcgcccttagttgtcgacgaggaggggaatgtcgtggagttgcctaccactcaagagatcactgagagcaaggataagacagacagtggggaggcagaggatgcagagggggagaaagagagagtggcagccatcggcggctcgaggaagcgaaaagtcggacgactaataggcgaggaaacgaagtcgaaggaagagaaggacagagatgctgaggatcagatggcgaaggcttctgcggatgttaggcggttgatgggggagagtgttgctattaccaaagaaaaaggaactgggaaagagggagagaagggaaaagagaagaagaaaaaagctaagaagatcaagctcagttttggtgatgacgcggattga

SEQ ID NO: 26519 - protein, 179 aa, Muscodor strobelii
  misc_feature: SGI Peptide ID NO. 569070
  misc_feature (1)..(177): NCBI GI: 116191291 Blast Desc: CHGG_05363 [Chaetomium globosum CBS 148.51] gi|88181276|gb|EAQ88744.1| CHGG_05363 [Chaetomium globosum CBS 148.51]
  misc_feature (1)..(114): NCBI GI: 256726106 Blast Desc: NECHADRAFT_81680 [Nectria haematococca mpVI 77-13-4]
  misc_feature (1)..(135): NCBI GI: 171681112 Blast Desc: protein product [Podospora anserina] gi|170940514|emb|CAP65742.1| protein product [Podospora anserina]
  misc_feature (2)..(113): NCBI GI: 46111663 Blast Desc: FG02713.1 [Gibberella zeae PH-1]
  misc_feature (4)..(113): NCBI GI: 261359263 Blast Desc: conserved [Verticillium albo-atrum VaMs.102]
  misc_feature (4)..(68): NCBI GI: 85109711 Blast Desc: NCU05688 [Neurospora crassa OR74A] gi|28924700|gb|EAA33814.1| [Neurospora crassa OR74A]
  misc_feature (1)..(65): NCBI GI: 39973435 Blast Desc: [Magnaporthe grisea 70-15] gi|145017892|gb|EDK02171.1| [Magnaporthe grisea 70-15]
  misc_feature (4)..(62): NCBI GI: 156040928 Blast Desc: [Sclerotinia sclerotiorum 1980] gi|154695826|gb|EDN95564.1| [Sclerotinia sclerotiorum 1980]
  misc_feature (5)..(123): NCBI GI: 115399490 Blast Desc: conserved [Aspergillus terreus NIH2624] gi|114192217|gb|EAU33917.1| conserved [Aspergillus terreus NIH2624]
  misc_feature (5)..(118): NCBI GI: 145249566 Blast Desc: An14g04990 [Aspergillus niger] gi|134081804|emb|CAK42060.1| protein product [Aspergillus niger]
  misc_feature: Useful for introducing or modulating the production of volatile compounds
MSQKITSKNLHYDTTLPPFLARLKGQQSSHTGPDPILASHRRPGQKRSASEEAEDAPLVVDEEGNVVELPTTQEITESKDKTDSGEAEDAEGEKERVAAIGGSRKRKVGRLIGEETKSKEEKDRDAEDQMAKASADVRRLMGESVAITKEKGTGKEGEKGKEKKKKAKKIKLSFGDDAD

SEQ ID NO: 26520 - DNA, 999 bp, Muscodor strobelii
  misc_feature: SGI cDNA ID NO. 569071
  misc_feature: Encodes the peptide sequence at SEQ ID NO 26521
atgggaggcttcggggacttcacagacctctgccacacggcgccgctgccgctgtgcgccacggtcgggcccgtcaactccatctcccaaaccgccggcatccaaaccgaatgcttcgcccgcaacatcgagctcgccaacaccatcatcttccagggcgcctcgtccttcctccacatcgtcgccctgaccatgaccgttgtcatgatcctacacatccgcggcaagttcaccgccgtcggcaggaaggagatcttgacgtttttctacctcttcttgactctgaccttcatctcgctgctcgtcgacgccggtgtcgtgcctgtaggctccgatcctttcccgtacttcgtgtcgatacagaacggcttcacttcggctctcgttacgtgtttactcatcaacggcttcgtgggtttccagctgtacgaggatggcacgcctttgtccttatggatgcttcgcctgtcttcattcgtcgcctggatcatctccttcttcgtctctctcgcgaccttcaagggctgggctggacttggccccaccaataccgtaggattattcgtcgtggtgtatctgttgaatggtattcagctcgtcatctacgtagtcctccaagtattgctcgtcgtccagactctggaagaccgctggccgctcggaaacctagctttcggcgtcttcttcttcgtcctcggccaagtcctactttacgccctcagctccaccatttgcaataggacgagccactatatcgatggtctcgtccttgctacagtgggcaacttactcgccgtcatgatggtgtacaagtactgggactccatcaccaaagaagatctcgaattctccgtcggaacccgcatgaacaactgggaagtcaaggagctcctgcccgaagaggaaagacgccagaccatctaccaagatgacccctacggcacggccagcgcctacgaccactcgtattcccccaacaacaggcattctcgctactag

SEQ ID NO: 26521 - protein, 332 aa, Muscodor strobelii
  misc_feature: SGI Peptide ID NO. 569071
  misc_feature (1)..(330): NCBI GI: 74599805 Blast Desc: CHS7_FUSOX RecName: Full=Chitin synthase export chaperone gi|50429189|gb|AAT77184.1| chitin synthase chaperone-like protein Chs7 [Fusarium oxysporum f. sp.
  misc_feature (1)..(332): NCBI GI: 256726116 Blast Desc: [Nectria haematococca mpVI 77-13-4]
  misc_feature (1)..(332): NCBI GI: 46111695 Blast Desc: FG02729.1 [Gibberella zeae PH-1] gi|121816721|sp|Q4IJ79.1|CHS7_GIBZE RecName: Full=Chitin synthase export chaperone
  misc_feature (3)..(332): NCBI GI: 116191193 Blast Desc: CHGG_05314 [Chaetomium globosum CBS 148.51] gi|121787164|sp|Q2H7Q1.1|CHS7_CHAGB RecName: Full=Chitin synthase export chaperone gi|88181227|gb|EAQ88695.1| CHGG_05314 globosum
  misc_feature (4)..(332): NCBI GI: 171681156 Blast Desc: protein product [Podospora anserina] gi|170940536|emb|CAP65764.1| protein product [Podospora anserina]
  misc_feature (1)..(332): NCBI GI: 74617361 Blast Desc: protein product [Podospora anserina] gi|170940536|emb|CAP65764.1| protein product [Podospora anserina]
  misc_feature (14)..(332): NCBI GI: 164424129 Blast Desc: NCU05720 [Neurospora crassa OR74A] gi|157070386|gb|EAA33670.2| conserved [Neurospora crassa OR74A]
  misc_feature (3)..(330): NCBI GI: 145239813 Blast Desc: An08g04350 [Aspergillus niger] gi|134077066|emb|CAK39939.1| protein product [Aspergillus niger]
  misc_feature (3)..(330): NCBI GI: 115491723 Blast Desc: conserved [Aspergillus terreus NIH2624] gi|114197349|gb|EAU39049.1| conserved [Aspergillus terreus NIH2624]
  misc_feature (3)..(330): NCBI GI: 169768814 Blast Desc: [Aspergillus oryzae RIB40] gi|238498154|ref|XP_002380312.1| chitin biosynthesis protein (Chs7), [Aspergillus flavus NRRL3357] RecName: Full=Chitin export
MGGFGDFTDLCHTAPLPLCATVGPVNSISQTAGIQTECFARNIELANTIIFQGASSFLHIVALTMTVVMILHIRGKFTAVGRKEILTFFYLFLTLTFISLLVDAGVVPVGSDPFPYFVSIQNGFTSALVTCLLINGFVGFQLYEDGTPLSLWMLRLSSFVAWIISFFVSLATFKGWAGLGPTNTVGLFVVVYLLNGIQLVIYVVLQVLLVVQTLEDRWPLGNLAFGVFFFVLGQVLLYALSSTICNRTSHYIDGLVLATVGNLLAVMMVYKYWDSITKEDLEFSVGTRMNNWEVKELLPEEERRQTIYQDDPYGTASAYDHSYSPNNRHSRY

SEQ ID NO: 26522 - DNA, 3352 bp, Muscodor strobelii
  misc_feature: SGI EST ID NO. CUFF.62696.0
  misc_feature: Variant of the nucleotide sequence at SEQ ID NO 26520
cgccagactctcccttccagcccatccagccccgacttccaagtcatccgctcgttgatcctgtgtttggcagagcaacggcgtcccaccccctctcttcccgtgcgtgatgccatagcattgtggtgcattgtctattcgttacctctctgatccctggccacctaggctatcgtcgtcattcgtttcttaattgtttgttgcatgccaatctactgctcgtaatactatcacccagttgttgagtcttcgtatccacactctcgctcactcacgccgacatcatcgaccaagtcatcgaccgcctcacacccagtcctttttgtcctcttcgcttgcttcgacagacccaggcgaaccactgtcgtccacccatctaccgatcgttgaactgcatatcgaaacggaaagcacacaacaccctcgctatcgtcgacaccccatcgtcctcaacccatccgagctgtcgaacggggaacagacacgatgggaggcttcggggacttcacagacctctgccacacggcgccgctgccgctgtgcgccacggtcgggcccgtcaactccatctcccaaaccgccggcatccaaaccgaatgcttcgcccgcaacatcgagctcgccaacaccatcatcttccagggcgcctcgtccttcctccacatcgtcgccctgaccatgaccgttgtcatgatcctacacatccgcggcaagttcaccgccgtcggcaggaaggagatcttgacgtttttctacctcttcttgactctgaccttcatctcgctgctcgtcgacgccggtgtcgtgcctgtaggctccgatcctttcccgtacttcgtgtcgatacagaacggcttcacttcggctctcgttacgtgtttactcatcaacggcttcgtgggtttccagctgtacgaggatggcacgcctttgtccttatggatgcttcgcctgtcttcattcgtcgcctggatcatctccttcttcgtctctctcgcgaccttcaagggctgggctggacttggccccaccaataccgtaggattattcgtcgtggtgtatctgttgaatggtattcagctcgtcatctacgtagtcctccaagtattgctcgtcgtccagactctggaagaccgctggccgctcggaaacctagctttcggcgtcttcttcttcgtcctcggccaagtcctactttacgccctcagctccaccatttgcaataggacgagccactatatcgatggtctcgtccttgctacagtgggcaacttactcgccgtcatgatggtgtacaagtactgggactccatcaccaaagaagatctcgaattctccgtcggaacccgcatgaacaactgggaagtcaaggagctcctgcccgaagaggaaagacgccagaccatctaccaagatgacccctacggcacggccagcgcctacgaccactcgtattcccccaacaacaggcattctcgctactagaaagcgggaagccgctgttcgtcgggacctgccccggaggaacagagtttggtgtaagagatagatagaaggacgaaaatggagacgggtacttggacattgcatgggcatcagcatggcgtttttggtggactactatactataggcactgtaataaaggagagggagacttgtgttataaaaaggtgcgggcggtttcgcgctctgagggatatgttagttggcagaaggcccgacagcatttgtattaagcatgggcacgcgcgcgctgcattcgtagggtcgagtaataatagtactgtatatagtatgatatattgataacaaatctttatttatgtgagttctctggaggacaggagagtatggtgtcgacttcgtgtatgattctggataatacattgattgggttgagggattgataatatggtaaattgcggaataagttagcttgttggctggatagttgatacgcgtgaagatcttcgtatggactgccctgactgccgttgatctcagtgcttcgacgcacagggtaccattccttagcaacatagtgtctcttagcaacctcgtgtctatcagctaccatagaatcctaagccgtgtcttgcgcgttgctggtttgttcgtagcggcgtcgagcttgttgataggtgaatcgagcttcgaaagtccgttctgaaactaggtagactatcccggagtatcccgcgcttctgcaccaaatgcagaggtgttgagatatcaggtcgtggggcttgctgtctagcaaggggacgctgtactggctggtggatgtccgttgtatctcaacttctggagatcgcttgggatggtagtgtctcgtcctttagcttgttgatgctgagtccatctgggtgtagtcgcgatatcgctcgacttatcgggatggtgagatgcttgtcttctcgttcttctttcttttcaacccttctggaatctctcaatccgcgtcatcaccaaaactgagcttgatcttcttagcttttttcttcttctcttttcccttctctccctctttcccagttcctttttctttggtaatagcaacactctcccccatcaaccgcctaacatccgcagaagccttcgccatctgatcctcagcatctctgtccttctcttccttcgacttcgtttcctcgcctattagtcgtccgacttttcgcttcctcgagccgccgatggctgccactctctctttctccccctctgcatcctctgcctccccactgtctgtcttatccttgctctcagtgatctcttgagtggtaggcaactccacgacattcccctcctcgtcgacaactaagggcgcatcttcggcttcttcgctcgcggagcgcttttggcccggtcgtcggtgggaggcgaggattgggtctgggcccgtgtgggaggattgttgacccttgaggcgcgcgaggaagggcgggagggtcgtgtcgtagtgtaggtttttagacgttatcttctgtgacatttcgatatagatcgagtagttggtaagggggttgtgagtgtggtagacttgtgaagggactggttttgttcgaagaggtacagcggtagattcgaagcgctgggaagtttgtggcggttttgttgttggttcaaaatcggtacgggtggtgcgagagttccattggagggtcgcaactggattggccgtttctagtagcaaggtggtgttgcgcaaaggagatcggacgagagccggcggcagggtgggataatgaaggctggatcgataacgttgagatgaatggaggtgaagcttcgaggttagtggggcaactaaggtaggtgctaccggagagctggggattaaatgaaacaggg

SEQ ID NO: 26523 - DNA, 1209 bp, Muscodor strobelii
  misc_feature: SGI cDNA ID NO. 569072
  misc_feature: Reduced expression when VOC is produced
  misc_feature: Encodes the peptide sequence at SEQ ID NO 26524
atgcagcttgtcggctccaagtcatcacagcggctggaagaggtgggcgagggcagtttgacgctgctccctacggatccagaagacatgtggcatgcgaacaacctcatcggcgcccaagacgtaatcaaagcccacgccatacgcaaagtcgtcaccgagtccaagacaggcagcaccagctccgagcgcgtccacaccgacctcaccatccgagtcacctcgacattcttcgatcccgccgcctcgtccctccacgtctcaggcaccgtcatcgtcgagaacgccttcgtcaacatcggccagtaccacaccctcgatctcgagctcaaccgacccttcacactctggaagaaatacggctgggactcagtcgccagagacaccctccaagatgccataaaacaggacaaagacggcgccgtcgcagcagtcgtcatgcaagagggcatcgccaacatctgcctgatcaccgagttccgcaccatcctcaagcagcgcgtcgagagcaccatacccaagaagcgatcagccagctcagatcaagactcgggaatgaagcgcttcttcgagaagaccctgtccaccttaatacgcagcatcgacttctccatatcacggcccctccttctagcgagccccggcttcgtggcgggcgacttcaagaaatacatcgcagacgaaggcacgcggagagccgacaagtcgctgatcgccatcgcgaagcaggctacggtggtacactcgagctccggtcacctacacagcctcaacgagatcctcaagagcgcggaggtcctagccacgatgaaggacatgaaattctccaaagagacgagattcatggatgacttcttcaagaggattcgggaggatgacgggcgggcctggtatggaacgaaccctgtggagaaggccgtcaaggagggtgcggtcgggccaggaggcggtgtgctgttggtcaataactcactgtttcgaagtttggatatcgcaacgcggaagcgctatgtggcgatggtagacaaagttaaagaagatggtggggaggtcagaatccttagcagtgaccatgagagcggacagcgtctagatgcattgggtggtatcgctgctttacttacataccccatctttgatttagatgacgacgatgatgaaggggatggtgcaaatggagagacgggcgatcaggaaatgataatatga

SEQ ID NO: 26524 - protein, 402 aa, Muscodor strobelii
  misc_feature: SGI Peptide ID NO. 569072
  misc_feature (6)..(136): Pfam Id: PF03463 Pfam Desc: eRF1 domain 1
  misc_feature (141)..(272): Pfam Id: PF03464 Pfam Desc: eRF1 domain 2
  misc_feature (275)..(378): Pfam Id: PF03465 Pfam Desc: eRF1 domain 3
  misc_feature (12)..(136): Pfam Id: PF03463 Pfam Desc: eRF1 domain 1
  misc_feature (1)..(379): NCBI GI: 46111641 Blast Desc: FG02702.1 [Gibberella zeae PH-1]
  misc_feature (1)..(378): NCBI GI: 261359254 Blast Desc: pelota [Verticillium albo-atrum VaMs.102]
  misc_feature (12)..(382): NCBI GI: 85091784 Blast Desc: NCU09161 [Neurospora crassa OR74A] gi|28920469|gb|EAA29835.1| NCU09161 [Neurospora crassa OR74A]
  misc_feature (10)..(386): NCBI GI: 156047825 Blast Desc: SS1G_09602 [Sclerotinia sclerotiorum 1980] gi|154693997|gb|EDN93735.1| SS1G_09602 [Sclerotinia sclerotiorum 1980]
  misc_feature (10)..(389): NCBI GI: 116191481 Blast Desc: CHGG_05458 [Chaetomium globosum CBS 148.51] gi|88181371|gb|EAQ88839.1| CHGG_05458 [Chaetomium globosum CBS 148.51]
  misc_feature (22)..(381): NCBI GI: 171680970 Blast Desc: protein product [Podospora anserina] gi|170940443|emb|CAP65670.1| protein product [Podospora anserina]
  misc_feature (1)..(378): NCBI GI: 145601665 Blast Desc: MGG_14349 [Magnaporthe grisea 70-15] gi|145010192|gb|EDJ94848.1| MGG_14349 [Magnaporthe grisea 70-15]
  misc_feature (11)..(386): NCBI GI: 255935145 Blast Desc: Pc13g01540 [Penicillium chrysogenum Wisconsin 54-1255] gi|211583219|emb|CAP91223.1| Pc13g01540 [Penicillium chrysogenum Wisconsin 54-1255]
  misc_feature (1)..(382): NCBI GI: 212540418 Blast Desc: translation factor pelota, [Penicillium marneffei ATCC 18224] gi|210067663|gb|EEA21755.1| translation factor pelota, [Penicillium marneffei ATCC 18224]
  misc_feature (1)..(387): NCBI GI: 115442826 Blast Desc: conserved [Aspergillus terreus NIH2624] gi|114188089|gb|EAU29789.1| conserved [Aspergillus terreus NIH2624]
  misc_feature: Useful for introducing or modulating the production of volatile compounds
MQLVGSKSSQRLEEVGEGSLTLLPTDPEDMWHANNLIGAQDVIKAHAIRKVVTESKTGSTSSERVHTDLTIRVTSTFFDPAASSLHVSGTVIVENAFVNIGQYHTLDLELNRPFTLWKKYGWDSVARDTLQDAIKQDKDGAVAAVVMQEGIANICLITEFRTILKQRVESTIPKKRSASSDQDSGMKRFFEKTLSTLIRSIDFSISRPLLLASPGFVAGDFKKYIADEGTRRADKSLIAIAKQATVVHSSSGHLHSLNEILKSAEVLATMKDMKFSKETRFMDDFFKRIREDDGRAWYGTNPVEKAVKEGAVGPGGGVLLVNNSLFRSLDIATRKRYVAMVDKVKEDGGEVRILSSDHESGQRLDALGGIAALLTYPIFDLDDDDDEGDGANGETGDQEMII

SEQ ID NO: 26525 - DNA, 1758 bp, Muscodor strobelii
  misc_feature: SGI EST ID NO. CUFF.62762.0
  misc_feature: Variant of the nucleotide sequence at SEQ ID NO 26523
caatgatctcattcagcgctgcctctgagcgaacgctactgtgatgaactctgtatttccaaagctatctccgacttagatttctgtcgcacatatggcatataactaaacctagtctcgttgtctgtttcgggagattacctattaatcaacctcaagttactgatctgtacataagcacctgcacggatcatagtaggatttgcacggactgcaaactgccatcatgcagcttgtcggctccaagtcatcacagcggctggaagaggtgggcgagggcagtttgacgctgctccctacggatccagaagacatgtggcatgcgaacaacctcatcggcgcccaagacgtaatcaaagcccacgccatacgcaaagtcgtcaccgagtccaagacaggcagcaccagctccgagcgcgtccacaccgacctcaccatccgagtcacctcgacattcttcgatcccgccgcctcgtccctccacgtctcaggcaccgtcatcgtcgagaacgccttcgtcaacatcggccagtaccacaccctcgatctcgagctcaaccgacccttcacactctggaagaaatacggctgggactcagtcgccagagacaccctccaagatgccataaaacaggacaaagacggcgccgtcgcagcagtcgtcatgcaagagggcatcgccaacatctgcctgatcaccgagttccgcaccatcctcaagcagcgcgtcgagagcaccatacccaagaagcgatcagccagctcagatcaagactcgggaatgaagcgcttcttcgagaagaccctgtccaccttaatacgcagcatcgacttctccatatcacggcccctccttctagcgagccccggcttcgtggcgggcgacttcaagaaatacatcgcagacgaaggcacgcggagagccgacaagtcgctgatcgccatcgcgaagcaggctacggtggtacactcgagctccggtcacctacacagcctcaacgagatcctcaagagcgcggaggtcctagccacgatgaaggacatgaaattctccaaagagacgagattcatggatgacttcttcaagaggattcgggaggatgacgggcgggcctggtatggaacgaaccctgtggagaaggccgtcaaggagggtgcggtcgggccaggaggcggtgtgctgttggtcaataactcactgtttcgaagtttggatatcgcaacgcggaagcgctatgtggcgatggtagacaaagttaaagaagatggtggggaggtcagaatccttagcagtgaccatgagagcggacagcgtctagatgcattgggtggtatcgctgctttacttacataccccatctttgatttagatgacgacgatgatgaaggggatggtgcaaatggagagacgggcgatcaggaaatgataatatgaggctatcgtgccattcaatgaaacagttaaagcatcatcattgtttgtgttcacggcactctctgaggtctgtaagatagctcctcatacctactcggccacccatcaaagcatttcaaagcccgcttggctcagtggtagagcgtatcactagtaatgataaggtcgtcagttcaattctggcagtgggcaattacttttgtcgttagagttcccggtattttgctttcatgcttgccttttctcggtctagattctttttggcggcttctcttagaagatctagatcttcaaccgctctgtagggaaacaagacaacaatc

SEQ ID NO: 26526 - DNA, 948 bp, Muscodor strobelii
  misc_feature: SGI cDNA ID NO. 569073
  misc_feature: Encodes the peptide sequence at SEQ ID NO 26527
atgccattcttaggagcacccatagcaacaactcttaatatcaactctaccttcaagctaaatagcgggtatgagattcctcgtttaggctttggtgtttcccaaaccccacctgcatacacgaaggatgtcgttctcgaagccttcgaagtcggctatcgccacatcgactccgctgctgcatatgagaacgaaggcggctgcgccgatgctattggtgctggcggcttcgcccgctcagacgtcttcttaacttctaagatccccgtcagagatatcaagggcggctatgctaccacgaaggccaggatcaacgagagcttaaggttggctggcgtcgactacctcgatctcatgctactccatgccccttacggtggctccgttgcgcgcaagggcgcttggaaggctctggttgagggtgtggaggaggggaaattgaggtctatcggtgttagcaattatggtatccatcatctcgaggagctagagcgacacatcaaggagctcgagtccgagcgaggcggtaaaggtaaaggcggtgtcatctccgtcggtcaatacgaaattcacccctggtgcgcccggaacgacatcatcgactggtgttccaagcgcaacatcgcagtcgaagcctactcgccagtcgtccagggcaagcgatggggtgacaagtccctcgtcaagctcgctagagcccacaagaagaccgaggctcagatcttactccgatggagcttgcagaagggtctcatccctctgccgaagagtgtttctccgtttcgtatccaggagaatgctgatttgtttgattttgaactgagcgaggaggatgtggctgagctggagacggatgagtatgcttatgttacctgggatccggtcaagactagtcttgataacgcctcggtactaccaccccaggggcctcatgccatgaatgagtga

SEQ ID NO: 26527 - protein, 315 aa, Muscodor strobelii
  misc_feature: SGI Peptide ID NO. 569073
  misc_feature (20)..(286): Pfam Id: PF00248 Pfam Desc: Aldo/keto reductase family
  misc_feature (20)..(283): Pfam Id: PF00248 Pfam Desc: Aldo/keto reductase family
  misc_feature (10)..(301): NCBI GI: 116191471 Blast Desc: CHGG_05453 [Chaetomium globosum CBS 148.51] gi|88181366|gb|EAQ88834.1| CHGG_05453 [Chaetomium globosum CBS 148.51]
  misc_feature (10)..(301): NCBI GI: 156047827 Blast Desc: SS1G_09603 [Sclerotinia sclerotiorum 1980] gi|154693998|gb|EDN93736.1| SS1G_09603 [Sclerotinia sclerotiorum 1980]
  misc_feature (8)..(301): NCBI GI: 256725688 Blast Desc: [Nectria haematococca mpVI 77-13-4]
  misc_feature (8)..(301): NCBI GI: 39949783 Blast Desc: aldehyde reductase, [Magnaporthe grisea 70-15] gi|145009366|gb|EDJ94077.1| aldehyde reductase, [Magnaporthe grisea 70-15]
  misc_feature (10)..(303): NCBI GI: 164422959 Blast Desc: NCU09519 [Neurospora crassa OR74A] gi|157069889|gb|EAA29278.2| NCU09519 [Neurospora crassa OR74A]
  misc_feature (8)..(295): NCBI GI: 119189081 Blast Desc: CIMG_04588 [Coccidioides immitis RS]
  misc_feature (8)..(295): NCBI GI: 240111374 Blast Desc: aldo-keto reductase, [Coccidioides posadasii C735 delta SOWgp]
  misc_feature (8)..(301): NCBI GI: 242799234 Blast Desc: aldo-keto reductase (AKR), [Talaromyces stipitatus ATCC 10500] gi|218716681|gb|EED16102.1| aldo-keto reductase (AKR), [Talaromyces stipitatus ATCC 10500]
  misc_feature (12)..(295): NCBI GI: 225562772 Blast Desc: aldo-keto reductase [Ajellomyces capsulatus G186AR]
  misc_feature (8)..(301): NCBI GI: 46111643 Blast Desc: FG02703.1 [Gibberella zeae PH-1]
  misc_feature (13)..(283): SWISSPROT Homolog: EC 1.1.1.283 Methylglyoxal reductase (NADPH-dependent)
MPFLGAPIATTLNINSTFKLNSGYEIPRLGFGVSQTPPAYTKDVVLEAFEVGYRHIDSAAAYENEGGCADAIGAGGFARSDVFLTSKIPVRDIKGGYATTKARINESLRLAGVDYLDLMLLHAPYGGSVARKGAWKALVEGVEEGKLRSIGVSNYGIHHLEELERHIKELESERGGKGKGGVISVGQYEIHPWCARNDIIDWCSKRNIAVEAYSPVVQGKRWGDKSLVKLARAHKKTEAQILLRWSLQKGLIPLPKSVSPFRIQENADLFDFELSEEDVAELETDEYAYVTWDPVKTSLDNASVLPPQGPHAMNE

SEQ ID NO: 26528 - DNA, 708 bp, Muscodor strobelii
  misc_feature: SGI cDNA ID NO. 569074
  misc_feature: Encodes the peptide sequence at SEQ ID NO 26529
atgaagagttttgaggtcccatctatcgcaggtctaaacgcaagggcagcgcgaagagcaatgaactccaagccgacacctgccgagaaggctcaaaacaacacaggcaatactttcgagaatctgatgggaccgctcggatctccgggattaactgccgcccttaacaaaatcaacggtattcactcccgatatcgaccgacggggaagatgtcggacgacgatttgctcttcgtgttgagcctccttctcttggaacctatacgctggatcgagaggtacgagtatcggcgtttgacaccgaaagaacgctgcgcgttggcgacattttggaaatcgataggcgaaaagctgtatatcccatacgatgcactcccgtcccaccgtggtttccgggatgcgttgcagtggcttgatgagctacagcaatggagtctttcatacgaagagaagaacaccagtgccgtgaaaaacgaagacaccgctttcctagccgaccagaagatcgacgactggctgcaacgtgtgccagccctcttgaagcccactgtacgggacatgtttgctgtgctcatcgaaccaggcactcgaacagcgatgggagttgatgagccttcgcctttctcaaaagccgcagttcgcatcatgattcccattcgtaaaattgcccagcattgtttcgtgttcttggtgccttctttgacttga

SEQ ID NO: 26529 - protein, 235 aa, Muscodor strobelii
  misc_feature: SGI Peptide ID NO. 569074
  misc_feature (1)..(234): NCBI GI: 119184205 Blast Desc: CIMG_06926 [Coccidioides immitis RS]
  misc_feature (1)..(222): NCBI GI: 240109808 Blast Desc: CPC735_033130 [Coccidioides posadasii C735 delta SOWgp]
  misc_feature (2)..(200): NCBI GI: 258568978 Blast Desc: conserved [Uncinocarpus reesii 1704] gi|237906679|gb|EEP81080.1| conserved [Uncinocarpus reesii 1704]
  misc_feature (1)..(221): NCBI GI: 261203557 Blast Desc: conserved [Ajellomyces dermatitidis SLH14081] gi|239586777|gb|EEQ69420.1| conserved [Ajellomyces dermatitidis SLH14081] gi|239608189|gb|EEQ85176.1| conserved [Ajellomyces
  misc_feature (1)..(222): NCBI GI: 255937467 Blast Desc: Pc13g13460 [Penicillium chrysogenum Wisconsin 54-1255] gi|211584380|emb|CAP92415.1| Pc13g13460 [Penicillium chrysogenum Wisconsin 54-1255]
  misc_feature (1)..(220): NCBI GI: 240276112 Blast Desc: conserved [Ajellomyces capsulatus H143]
  misc_feature (1)..(220): NCBI GI: 225560020 Blast Desc: conserved [Ajellomyces capsulatus G186AR]
  misc_feature (4)..(226): NCBI GI: 238842420 Blast Desc: conserved [Microsporum canis CBS 113480]
  misc_feature (1)..(222): NCBI GI: 226291376 Blast Desc: conserved [Paracoccidioides brasiliensis Pb18]
  misc_feature (2)..(228): NCBI GI: 238839098 Blast Desc: conserved [Microsporum canis CBS 113480]
MKSFEVPSIAGLNARAARRAMNSKPTPAEKAQNNTGNTFENLMGPLGSPGLTAALNKINGIHSRYRPTGKMSDDDLLFVLSLLLLEPIRWIERYEYRRLTPKERCALATFWKSIGEKLYIPYDALPSHRGFRDALQWLDELQQWSLSYEEKNTSAVKNEDTAFLADQKIDDWLQRVPALLKPTVRDMFAVLIEPGTRTAMGVDEPSPFSKAAVRIMIPIRKIAQHCFVFLVPSLT

SEQ ID NO: 26530 - DNA, 1305 bp, Muscodor strobelii
  misc_feature: SGI EST ID NO. CUFF.62674.0
  misc_feature: Variant of the nucleotide sequence at SEQ ID NO 26528
cttgctatatatgtcgcgatggccgccttctgtattcatcttgtctgaaattcattaaattgcgtacgcggagaattacttgatcgccctgttccagtacaatggactccatgacgtcaatcttgggaaatgcaggtggcctagcagcaagagattggctaccttcgatgatttcttgtttaatattctatgtttctgtgtgtaccactatacacttctggcgatggtttaagaaaatggaccgatcctttcaccctgcgaagatgactctagaagaagcatataccgtcaaagaccacatagcatctcgagactttcctcgagtctttccctttgcgacttcatatgccctagttaaggtagtaccaacaccacctgaatatccaacacctcaagtattttgatgaagaccacaagctgatgaacactatgtaatgaagagttttgaggtcccatctatcgcaggtctaaacgcaagggcagcgcgaagagcaatgaactccaagccgacacctgccgagaaggctcaaaacaacacaggcaatactttcgagaatctgatgggaccgctcggatctccgggattaactgccgcccttaacaaaatcaacggtattcactcccgatatcgaccgacggggaagatgtcggacgacgatttgctcttcgtgttgagcctccttctcttggaacctatacgctggatcgagaggtacgagtatcggcgtttgacaccgaaagaacgctgcgcgttggcgacattttggaaatcgataggcgaaaagctgtatatcccatacgatgcactcccgtcccaccgtggtttccgggatgcgttgcagtggcttgatgagctacagcaatggagtctttcatacgaagagaagaacaccagtgccgtgaaaaacgaagacaccgctttcctagccgaccagaagatcgacgactggctgcaacgtgtgccagccctcttgaagcccactgtacgggacatgtttgctgtgctcatcgaaccaggcactcgaacagcgatgggagttgatgagccttcgcctttctcaaaagccgcagttcgcatcatgattcccattcgtaaaattgcccagcattgtttcgtgttcttggtgccttctttgacttgaccttgagtagtggagcccatgctctaactccggagtcggggggcaggagcaatacgttttgagtctgatgatcagatctggggatgcgcatcttgttcgagtgctcgctacattagaacaaactagtcagatcaataattagacccgaagttttcactgcgaa

SEQ ID NO: 26531 - DNA, 750 bp, Muscodor strobelii
  misc_feature: SGI cDNA ID NO. 569075
  misc_feature: Encodes the peptide sequence at SEQ ID NO 26532
atgcgcagtcttgagcaagaacacactaagggcgaagaaggagaggcttttcttggaacaccatcatcaataatacgagaagatgaaggttggcaagcgagaaatcgggtggagcgacagaaatttggttatctacgcctggctttagaaatcatcgtaggatcacttttcacgatcttattgatccatgacgtccgtgaatggactaagaacaaaccatcgcccgtgccaagatttcctcggaaaacgtacacctttctaccagatccaaactacgtccgcgaagacatgctcttcgacgaacacgacactttgcatagcttacacaattggataccactaagttcagatgcccgaggatatgttcaaatcccaaattacgattcatatgacgtcctcggcaagccctatatagttgcaatcaatcgaacgtccgatggcccagcctacatgaccgccgtatttcatcaacttcactgcttgtcatatatcatagagcactaccaacagggctatgcgggattaaacctgacagaggaggtagcacatcactcatcacactgcttcgattatctccgacagtcgatcatgtgttcagccgacacgaacctagagggagaaacggaagctggaccaggctggggctcgaaacacgaatgtaccgactacgatgcgctattggcctgggcaaataaacaatcagctatgaaatggaggaatagtcttttacctggcgagtcgatactttag

SEQ ID NO: 26532 - protein, 249 aa, Muscodor strobelii
  misc_feature: SGI Peptide ID NO. 569075
  misc_feature (7)..(249): NCBI GI: 169605259 Blast Desc: SNOG_05652 [Phaeosphaeria nodorum SN15] gi|111065596|gb|EAT86716.1| SNOG_05652 [Phaeosphaeria nodorum SN15]
  misc_feature (33)..(249): NCBI GI: 116191763 Blast Desc: CHGG_05599 [Chaetomium globosum CBS 148.51] gi|88181512|gb|EAQ88980.1| CHGG_05599 [Chaetomium globosum CBS 148.51]
  misc_feature (44)..(239): NCBI GI: 242770533 Blast Desc: conserved [Talaromyces stipitatus ATCC 10500] gi|218725196|gb|EED24613.1| conserved [Talaromyces stipitatus ATCC 10500]
  misc_feature (44)..(243): NCBI GI: 212545174 Blast Desc: conserved [Penicillium marneffei ATCC 18224] gi|210065710|gb|EEA19804.1| conserved [Penicillium marneffei ATCC 18224]
  misc_feature (40)..(244): NCBI GI: 145236771 Blast Desc: An06g02120 [Aspergillus niger] gi|134075494|emb|CAK48055.1| protein product [Aspergillus niger]
  misc_feature (111)..(239): NCBI GI: 164425482 Blast Desc: NCU05766 [Neurospora crassa OR74A] gi|157070942|gb|EAA30505.2| conserved [Neurospora crassa OR74A]
  misc_feature (76)..(236): NCBI GI: 39966819 Blast Desc: MGG_01932 [Magnaporthe grisea 70-15] gi|145009574|gb|EDJ94230.1| MGG_01932 [Magnaporthe grisea 70-15]
  misc_feature (111)..(230): NCBI GI: 238500169 Blast Desc: conserved [Aspergillus flavus NRRL3357] gi|220693072|gb|EED49418.1| conserved [Aspergillus flavus NRRL3357]
  misc_feature (64)..(226): NCBI GI: 189192689 Blast Desc: conserved [Pyrenophora tritici-repentis Pt-1C-BFP] gi|187978247|gb|EDU44873.1| conserved [Pyrenophora tritici-repentis Pt-1C-BFP]
  misc_feature (76)..(241): NCBI GI: 189204510 Blast Desc: conserved [Pyrenophora tritici-repentis Pt-1C-BFP] gi|187985689|gb|EDU51177.1| conserved [Pyrenophora tritici-repentis Pt-1C-BFP]
MRSLEQEHTKGEEGEAFLGTPSSIIREDEGWQARNRVERQKFGYLRLALEIIVGSLFTILLIHDVREWTKNKPSPVPRFPRKTYTFLPDPNYVREDMLFDEHDTLHSLHNWIPLSSDARGYVQIPNYDSYDVLGKPYIVAINRTSDGPAYMTAVFHQLHCLSYIIEHYQQGYAGLNLTEEVAHHSSHCFDYLRQSIMCSADTNLEGETEAGPGWGSKHECTDYDALLAWANKQSAMKWRNSLLPGESIL

SEQ ID NO: 26533 - DNA, 972 bp, Muscodor strobelii
  misc_feature: SGI EST ID NO. CUFF.62678.0
  misc_feature: Variant of the nucleotide sequence at SEQ ID NO 26531
tttttaatcagtcaatcgtcagtcatgctgctggatcacgatgcgcagtcttgagcaagaacacactaagggcgaagaaggagaggcttttcttggaacaccatcatcaataatacgagaagatgaaggttggcaagcgagaaatcgggtggagcgacagaaatttggttatctacgcctggctttagaaatcatcgtaggatcacttttcacgatcttattgatccatgacgtccgtgaatggactaagaacaaaccatcgcccgtgccaagatttcctcggaaaacgtacacctttctaccagatccaaactacgtccgcgaagacatgctcttcgacgaacacgacactttgcatagcttacacaattggataccactaagttcagatgcccgaggatatgttcaaatcccaaattacgattcatatgacgtcctcggcaagccctatatagttgcaatcaatcgaacgtccgatggcccagcctacatgaccgccgtatttcatcaacttcactgcttgtcatatatcatagagcactaccaacagggctatgcgggattaaacctgacagaggaggtagcacatcactcatcacactgcttcgattatctccgacagtcgatcatgtgttcagccgacacgaacctagagggagaaacggaagctggaccaggctggggctcgaaacacgaatgtaccgactacgatgcgctattggcctgggcaaataaacaatcagctatgaaatggaggaatagtcttttacctggcgagtcgatactttagtacagagttttggttcgagggcatctaaaatcaccataaagcgttaatacatcaaatgttcaagaagcgagtgcaagagaatgtccgcctctttcctacgttctcaacgtcgatgacattcggaaaggtgtctcgacggtgaattcaagactcggcttatcaagcggagaactcaacattct

SEQ ID NO: 26534 - DNA, 840 bp, Muscodor strobelii
  misc_feature: SGI cDNA ID NO. 569076
  misc_feature: Encodes the peptide sequence at SEQ ID NO 26535
atggagaaccgtagatacgcgccctgcagatttcttctcgagcaatctatccccagtctactgtggtttgaggatgcgatcgccatatatggtgtgcccaccgtggtctttgacctgtacctaattgtacctgacattgatcttgctgccgctgttttcagccagaaaggatggcaaccagagcctccaggaccttacagttttttagttccaccatgtgcgatccaattctgtcaactaaaagaaccgccacttcaagacaactgcagcccggcgcgagacgattactatatgcatcctcaagactcagaaccaccacgtgaacgtatggtcattatcctcatgtctgctactgagtggggcgtctcgaccgaagtattccatgatgcgtcaaagaacaaccattcttttccagcgctgcccgttttggcggacagtctaatcagaaaattgctggatgttccagaagactgtcgggttgagcagcatctcttactgatgttagcctatctctacggccattcaccggaattgaaggcagaagggttcgaataccagctggatattgagcatcgacagttccatttagactgcatatcagggcagctgagactctggaccatcccatttgcacgacatgaaaggcaggtccgggaagccataagagcaggggactatacgtttcgggaatgttcgacgagccggacggaagagaacaaactactgtttgacgacttcttcgcttgggttaagagccagaataatcacctaaacaccggaggagaccattcagatgttctgacagaggactcagacgatactaaagaattgctgaaataa

SEQ ID NO: 26535 - protein, 279 aa, Muscodor strobelii
  misc_feature: SGI Peptide ID NO. 569076
  misc_feature (5)..(244): NCBI GI: 115400249 Blast Desc: conserved [Aspergillus terreus NIH2624] gi|114191379|gb|EAU33079.1| conserved [Aspergillus terreus NIH2624]
  misc_feature (5)..(239): NCBI GI: 240279258 Blast Desc: conserved [Ajellomyces capsulatus H143]
  misc_feature (5)..(239): NCBI GI: 225555036 Blast Desc: conserved [Ajellomyces capsulatus G186AR]
  misc_feature (5)..(246): NCBI GI: 145234947 Blast Desc: An03g02240 [Aspergillus niger] gi|134057798|emb|CAK38193.1| [Aspergillus niger]
  misc_feature (5)..(244): NCBI GI: 238500093 Blast Desc: AFLA_094610 [Aspergillus flavus NRRL3357] gi|220693034|gb|EED49380.1| AFLA_094610 [Aspergillus flavus NRRL3357]
  misc_feature (5)..(239): NCBI GI: 258576989 Blast Desc: [Uncinocarpus reesii 1704] gi|237902942|gb|EEP77343.1| [Uncinocarpus reesii 1704]
  misc_feature (2)..(204): NCBI GI: 238840737 Blast Desc: conserved [Microsporum canis CBS 113480]
MENRRYAPCRFLLEQSIPSLLWFEDAIAIYGVPTVVFDLYLIVPDIDLAAAVFSQKGWQPEPPGPYSFLVPPCAIQFCQLKEPPLQDNCSPARDDYYMHPQDSEPPRERMVIILMSATEWGVSTEVFHDASKNNHSFPALPVLADSLIRKLLDVPEDCRVEQHLLLMLAYLYGHSPELKAEGFEYQLDIEHRQFHLDCISGQLRLWTIPFARHERQVREAIRAGDYTFRECSTSRTEENKLLFDDFFAWVKSQNNHLNTGGDHSDVLTEDSDDTKELLK

SEQ ID NO: 26536 - DNA, 394 bp, Muscodor strobelii
  misc_feature: SGI EST ID NO. CUFF.62683.0
  misc_feature: Variant of the nucleotide sequence at SEQ ID NO 26534
ttctcgagcaatctatccccagtctactgtggtttgaggatgcgatcgccatatatggtgtgcccaccgtggtctttgacctgtacctaattgtacctgacattgatcttgctgccgctgttttcagccagaaaggatggcaaccagagcctccaggaccttacagttttttagttccaccatgtgcgatccaattctgtcaactaaaagaaccgccacttcaagacaactgcagcccggcgcgagacgattactatatgcatcctcaagactcagaaccaccacgtgaacgtatggtcattatcctcatgtctgctactgagtggggcgtctcgaccgaagtattccatgatgcgtcaaagaacaaccattcttttccagcgctgcccgtttt

SEQ ID NO: 26537 - DNA, 1002 bp, Muscodor strobelii
  misc_feature: SGI cDNA ID NO. 569077
  misc_feature: Encodes the peptide sequence at SEQ ID NO 26538
atgttgcagaataagatacaagccgaaatggcaccagccgtgaccatcgacattgtagaaccaaccactctcccacacaagggaggcgtgcctattggcaatggcaatgcggcagtgagccaacctgaggtcctggatgggaaatggaaggactttaccttccagccaattcgtgaatcgcaggttgctcgagctatggctcgtcgttactttgatgatttggataagtacgccgaatccgacattgtcgttgttggtgctggctcttgcgggctgagcactgcctataagctcgccaaaagtcgccccgacttgaagattgcaattatcgaggctggtgttgcacctggtggcggagcgtggcttggcggtcaactattcagtgctatggtgatgcgcaagccagctgatgagtttctcacggaaattggagtgcctttcgaagacgagggatctcacgttatcgtcaagcatgcggcacttttcacatcgacactattgtcgaaggtcttggagttccccaacgttaagctcttcaatgcgacatccgtggaggatctgattacgcgtcgcgatgctgaaaattttggcaatggcggtatccgcgtggcgggcgttgtcacgaactggactctcgtcgccatgcatcatgatgaccagtcatgcatggatccaagcactatcaatgcgcctgtcattgttagcactactgggcacgatggaccgtttggtgctttcagcgtcaagcgccttgttagtatgcaagctcttgaaaagcttggtggcatgcgtggtttggacatgaacatggcagaggatgctattgtcaagggcacgcgagagatcgtgcctggcttgattgtaggaggcatggagctctcagaggttgatggcgcgaaccggatgggtccaacattcggagccatggtcctctctggcgtgaaggccgctgaggaagctttaaaggttttcgaattgcgcaagaagcagaatgctgtctag

SEQ ID NO: 26538 - protein, 333 aa, Muscodor strobelii
  misc_feature: SGI Peptide ID NO. 569077
  misc_feature (54)..(306): Pfam Id: PF01946 Pfam Desc: Thi4 family
  misc_feature (81)..(120): Pfam Id: PF01266 Pfam Desc: FAD dependent oxidoreductase
  misc_feature (81)..(119): Pfam Id: PF00890 Pfam Desc: FAD binding domain
  misc_feature (80)..(113): Pfam Id: PF00732 Pfam Desc: GMC oxidoreductase
  misc_feature (81)..(118): Pfam Id: PF05834 Pfam Desc: Lycopene cyclase protein
  misc_feature (81)..(119): Pfam Id: PF07992 Pfam Desc: Pyridine nucleotide-disulphide oxidoreductase
  misc_feature (30)..(331): NCBI GI: 1351122 Blast Desc: THI4_FUSOX RecName: Full=Thiazole biosynthetic enzyme, mitochondrial; AltName: Full=Stress-inducible protein sti35; Flags: Precursor gi|168164|gb|AAA33341.1| STI35 protein [Fusarium
  misc_feature (49)..(331): NCBI GI: 50543504 Blast Desc: YALI0A09768p [Yarrowia lipolytica] gi|49645783|emb|CAG83845.1| YALI0A09768p [Yarrowia lipolytica]
  misc_feature (43)..(331): NCBI GI: 46111175 Blast Desc: THI4_FUSOX Thiazole biosynthetic enzyme, mitochondrial precursor (Stress-inducible protein sti35) [Gibberella zeae PH-1]
  misc_feature (30)..(332): NCBI GI: 134940 Blast Desc: THI4_FUSSH RecName: Full=Thiazole biosynthetic enzyme, mitochondrial; AltName: Full=Stress-inducible protein sti35; Flags: Precursor gi|168162|gb|AAA33340.1| STI35 protein [Fusarium
  misc_feature (30)..(332): NCBI GI: 154298358 Blast Desc: thiazole biosynthetic enzyme [Botryotinia fuckeliana B05.10] gi|150858087|gb|EDN33279.1| thiazole biosynthetic enzyme [Botryotinia fuckeliana B05.10]
  misc_feature (45)..(333): NCBI GI: 109809905 Blast Desc: mitochondrial thiazole biosynthetic enzyme [Hypocrea lixii]
  misc_feature (48)..(332): NCBI GI: 156045077 Blast Desc: thiazole biosynthetic enzyme [Sclerotinia sclerotiorum 1980] gi|154694122|gb|EDN93860.1| thiazole biosynthetic enzyme [Sclerotinia sclerotiorum 1980]
  misc_feature (40)..(333): NCBI GI: 125601827 Blast Desc: thiazole biosynthetic enzyme variant 1 [Epichloe typhina] gi|125601828|gb|ABN45969.1| thiazole biosynthetic enzyme variant 2 [Epichloe typhina] gi|125601829|gb|ABN45970.1| thiazole
  misc_feature (40)..(333): NCBI GI: 224178631 Blast Desc: thiazole synthase [Epichloe festucae]
  misc_feature (45)..(332): NCBI GI: 172052425 Blast Desc: thiazole biosynthetic enzyme [Trichoderma aureoviride]
MLQNKIQAEMAPAVTIDIVEPTTLPHKGGVPIGNGNAAVSQPEVLDGKWKDFTFQPIRESQVARAMARRYFDDLDKYAESDIVVVGAGSCGLSTAYKLAKSRPDLKIAIIEAGVAPGGGAWLGGQLFSAMVMRKPADEFLTEIGVPFEDEGSHVIVKHAALFTSTLLSKVLEFPNVKLFNATSVEDLITRRDAENFGNGGIRVAGVVTNWTLVAMHHDDQSCMDPSTINAPVIVSTTGHDGPFGAFSVKRLVSMQALEKLGGMRGLDMNMAEDAIVKGTREIVPGLIVGGMELSEVDGANRMGPTFGAMVLSGVKAAEEALKVFELRKKQNAV

SEQ ID NO: 26539 - DNA, 1666 bp, Muscodor strobelii
  misc_feature: SGI EST ID NO. CUFF.62725.0
  misc_feature: Variant of the nucleotide sequence at SEQ ID NO 26537
cgactttgtatgacacttctctatccctcatcactcagaattcattctcaactattagctagcttccagtagcactgaggaatctcttgcttatcaaccaatcgtgaggacattcattacaatagtgatatgatcacgacccggttactattgggcatattgactaattgttttgtcacagaaaacctccttcggtatgcgacgggcgctcagctctgacctagaagaaggcatggtacctgacgggctttatcctggagagatcatgtcgatcacatgacgagtatcagtcagaatgtcatcagaataagatacaagccgaaatggcaccagccgtgaccatcgacattgtagaaccaaccactctcccacacaagggaggcgtgcctattggcaatggcaatgcggcagtgagccaacctgaggtcctggatgggaaatggaaggactttaccttccagccaattcgtgaatcgcaggttgctcgagctatggctcgtcgttactttgatgatttggataagtacgccgaatccgacattgtcgttgttggtgctggctcttgcgggctgagcactgcctataagctcgccaaaagtcgccccgacttgaagattgcaattatcgaggctggtgttgcacctggtggcggagcgtggcttggcggtcaactattcagtgctatggtgatgcgcaagccagctgatgagtttctcacggaaattggagtgcctttcgaagacgagggatctcacgttatcgtcaagcatgcggcacttttcacatcgacactattgtcgaaggtcttggagttccccaacgttaagctcttcaatgcgacatccgtggaggatctgattacgcgtcgcgatgctgaaaattttggcaatggcggtatccgcgtggcgggcgttgtcacgaactggactctcgtcgccatgcatcatgatgaccagtcatgcatggatccaagcactatcaatgcgcctgtcattgttagcactactgggcacgatggaccgtttggtgctttcagcgtcaagcgccttgttagtatgcaagctcttgaaaagcttggtggcatgcgtggtttggacatgaacatggcagaggatgctattgtcaagggcacgcgagagatcgtgcctggcttgattgtaggaggcatggagctctcagaggttgatggcgcgaaccggatgggtccaacattcggagccatggtcctctctggcgtgaaggccgctgaggaagctttaaaggttttcgaattgcgcaagaagcagaatgctgtctagttcgaccaatttgcttcaaccatacgcgactctcctacattctttacacattataggagggatttctgtctaattcataaacccgccgctctttacaccttgaggaaatcagaacaatatcgtgggacacttcggtgctagacgagccagattgtattaatgctcatcgactaccacctatgtctgtcattttaaatgagatgatcaatgaaatgttgagataaatgtccagacacagttaactctgcgaatcgggtatgatatacgttcctttaggagtgtagtatctatggagcgctgctaatgcgatatttgtctgtattgtttcgattgatgtgcttctgtttgtttaagaagagagaatatca

SEQ ID NO: 26540 - DNA, 687 bp, Muscodor strobelii
  misc_feature: SGI cDNA ID NO. 569078
  misc_feature: Encodes the peptide sequence at SEQ ID NO 26541
atgtccagcacttctcctattgctctcatttttggagccggtgccaacgttgggcaacatgttggccgggcctttacagctaaaggttacagagttgctctcgtagcgcgcagtctcaaggcagaagacagcactgatagcgagttgcacatcaagggcgacttaactcagcccagcacaattcctgagatatttgcaaatgtcacgtctcactttggttctccacacgtcgtcgtctacaatgctggcgcagtctctccgagtgctgccaacgaccctcttagtgttccattggaaaatttcactcgcaacctcgctatcaacacaaccagtgcttttgctgtggctcaacaagcggctcttgccttcggagaactgccagaatcagcatcgcgaacgttcatctacacagggaatcgcacaaacgtcactcccatacctgcagtcatggatcttggtgtcggcaaatccgccacggcacatattatccaatgcgctgccgcaggctatgcagacaaaggattcaaattctactatgccgacgaacgcacagagacaggcgagcccgtgtataacgacgtcgatggaccagcccatgccaaacattatgttgagcttgctgagggagccaaacaaggaccttggctgcaaacatttgtgaaaggaattggatataagaaattctga

SEQ ID NO: 26541 - protein, 228 aa, Muscodor strobelii
  misc_feature: SGI Peptide ID NO. 569078
  misc_feature (6)..(171): Pfam Id: PF00106 Pfam Desc: short chain dehydrogenase
  misc_feature (1)..(228): NCBI GI: 256723611 Blast Desc: NECHADRAFT_52180 [Nectria haematococca mpVI 77-13-4]
  misc_feature (1)..(228): NCBI GI: 242797822 Blast Desc: short-chain dehydrogenase, [Talaromyces stipitatus ATCC 10500] gi|218716386|gb|EED15807.1| short-chain dehydrogenase, [Talaromyces stipitatus ATCC 10500]
  misc_feature (1)..(228): NCBI GI: 116214433 Blast Desc: CHGG_11057 [Chaetomium globosum CBS 148.51] gi|88175412|gb|EAQ82881.1| CHGG_11057 [Chaetomium globosum CBS 148.51]
  misc_feature (4)..(228): NCBI GI: 212529432 Blast Desc: short-chain dehydrogenases/reductase, [Penicillium marneffei ATCC 18224] gi|210074271|gb|EEA28358.1| short-chain dehydrogenases/reductase, [Penicillium marneffei ATCC 18224]
  misc_feature (5)..(228): NCBI GI: 46111007 Blast Desc: FG02385.1 [Gibberella zeae PH-1]
  misc_feature (1)..(228): NCBI GI: 256720872 Blast Desc: NECHADRAFT_50337 [Nectria haematococca mpVI 77-13-4]
  misc_feature (6)..(228): NCBI GI: 256723813 Blast Desc: NECHADRAFT_92268 [Nectria haematococca mpVI 77-13-4]
  misc_feature (3)..(228): NCBI GI: 169604885 Blast Desc: SNOG_05458 [Phaeosphaeria nodorum SN15] gi|160706660|gb|EAT86522.2| SNOG_05458 [Phaeosphaeria nodorum SN15]
  misc_feature (1)..(228): NCBI GI: 46126551 Blast Desc: FG07653.1 [Gibberella zeae PH-1]
  misc_feature (4)..(228): NCBI GI: 212545000 Blast Desc: short chain type dehydrogenase, [Penicillium marneffei ATCC 18224] gi|210065623|gb|EEA19717.1| short chain type dehydrogenase, [Penicillium marneffei ATCC 18224]
MSSTSPIALIFGAGANVGQHVGRAFTAKGYRVALVARSLKAEDSTDSELHIKGDLTQPSTIPEIFANVTSHFGSPHVVVYNAGAVSPSAANDPLSVPLENFTRNLAINTTSAFAVAQQAALAFGELPESASRTFIYTGNRTNVTPIPAVMDLGVGKSATAHIIQCAAAGYADKGFKFYYADERTETGEPVYNDVDGPAHAKHYVELAEGAKQGPWLQTFVKGIGYKKF

SEQ ID NO: 26542 - DNA, 1200 bp, Muscodor strobelii
  misc_feature: SGI EST ID NO. CUFF.62698.0
  misc_feature: Variant of the nucleotide sequence at SEQ ID NO 26540
tcttgatcatttgccaagccaatagacttttccaatacctgcattgcgcaaccaattacctgggcctttcttatgatgtccagcacttctcctattgctctcatttttggagccggtgccaacgttgggcaacatgttggccgggcctttacagctaaaggttacagagttgctctcgtagcgcgcagtctcaaggcagaagacagcactgatagcgagttgcacatcaagggcgacttaactcagcccagcacaattcctgagatatttgcaaatgtcacgtctcactttggttctccacacgtcgtcgtctacaatgctggcgcagtctctccgagtgctgccaacgaccctcttagtgttccattggaaaatttcactcgcaacctcgctatcaacacaaccagtgcttttgctgtggctcaacaagcggctcttgccttcggagaactgccagaatcagcatcgcgaacgttcatctacacagggaatcgcacaaacgtcactcccatacctgcagtcatggatcttggtgtcggcaaatccgccacggcacatattatccaatgcgctgccgcaggctatgcagacaaaggattcaaattctactatgccgacgaacgcacagagacaggcgagcccgtgtataacgacgtcgatggaccagcccatgccaaacattatgttgagcttgctgagggagccaaacaaggaccttggctgcaaacatttgtgaaaggaattggatataagaaattctgaatgtgatccttgtaaacgaacctaccgggcaggacacaaaacaaacagcggtacggaataaggcaatgctcaaaacttcgaattctgcaccaacgtattatccgataatcattcgaataatcattggatttgtttttgagtgatttctatatattatctatagataacgcttaattaagcaatgtatgttctacgaaatcacttgctggcgttgttagcaataccgaggaatatatcgatgattttgtcaacgacctgcacacttaacttggcaatgtgctacgagtaaaaataatgtcagcttcccgtccacaagtataagattgttagtttatgatcacgaccctacgcgacctgctgctattccgtgaacttctaagaaaatgatattatggaaaaggaaggatcgaatttcaacgaaagtaaaaacaagtcaaa

SEQ ID NO: 26543 - DNA, 1707 bp, Muscodor strobelii
  misc_feature: SGI cDNA ID NO. 569079
  misc_feature: Encodes the peptide sequence at SEQ ID NO 26544
atgtcactttacccccatctcacaaacaagaaaaccaaggcggccagctgggtaaataagcatcttgtgcgagctcaaagtaccgaattaatgcataacagacttgcatatatacgagaactggaaacgaagatacaagatatggaaactcgtctgcagggtgttatagcgcgggactattctgacaaagaattctacccatcttacgacattagtaggcttaatcaaggcgaccagaccatgacattgcatcgaggcgcagaaaatctacaagaaactatctcagctctcttcaatgatcctagctgggatgtagatgatgttatatggtctggagcacctgtattagctttccccctcaaatctttgtcacttgatgatgattatcaggccacgacctttgcaccatgtcagagctttccatctaaagcagccgccctagagctgattaaagatgcattccaagatttcttttactacatacccctttttgacgaggatgaatttgtgcagctgttctaccagcgctactcacaaccaacgattcgagaccccgcttggtacgcttgcctcaacgtcgtcttgtcaatcgcacatcttttcagagcgatgcggatgccagatccaagattcgagaatgacgaagcgtttaaatatctcaataatgcactggaggttgtctcgcagcttgcggtgctacaaaatagcatgcctgccattcaagctttggtgtgcatgtcaatcatactgcagggtactccaagtccgcatgtggcatctgcccttattgctgctgctattcgcctggcgcaagctgcgggccttcacagaaatgtatatgatagttctttctcagaagctcaaattgagcagcggaggcgtgttttctggatggcttacattctggacaaggacattagcttgcggacgaagcaaccctttgcccaagacgatgacgatatggacgttgagctgccaaagggtatagcgactgcgctaacatcctctacgggcgatcagcagttcattaacgtgattaactctcgaatcagtctagccataattcagggccaaatttacaagaagctttactcagttcgagcatcgcgtcaatcaccagttgagaaagcaattgtggcgcaagaactgaaatcgattctatcttactggagagatggtgtgccagtatatttcgaagacgactttgaaacacctacgagtccgcctctcagacctgaatatcacttcctattcgtcctgaggttcacctacatgaactgtctaattatgatcagtcatcatttgaaccctgttcagccagtctttccaatcgagcaggttccatcagaagtaccatatcctcttgcatactccgatagcatttgtgttcaagaagcacgcaaagccctccgtcttctacaagtaacgcctcagggtgattatgccgtcgtttggatgctgctccaccctttcttcacgaccgtcacagttatattatgttatgtgcttcgaaatcccgaatcagctacggcacatgatgatttgcagctggttaaaccttttcagcagctcatgcttgtcttagctgagaagggcagcagacggttctactccgaggaagtgaacatgatgtgcaggacgtgcactacgttgtttcagggatgcgtcgaggctaccaatcgtgtgactatgcgagtagagttgtag

SEQ ID NO: 26544 - protein, 568 aa, Muscodor strobelii
  misc_feature: SGI Peptide ID NO. 569079
  misc_feature (236)..(333): Pfam Id: PF04082 Pfam Desc: Fungal specific transcription factor domain
  misc_feature (37)..(564): NCBI GI: 256723612 Blast Desc: NECHADRAFT_86641 [Nectria haematococca mpVI 77-13-4]
  misc_feature (76)..(518): NCBI GI: 255943195 Blast Desc: Pc18g05390 [Penicillium chrysogenum Wisconsin 54-1255] gi|211587099|emb|CAP94763.1| Pc18g05390 [Penicillium chrysogenum Wisconsin 54-1255]
  misc_feature (39)..(519): NCBI GI: 238496233 Blast Desc: fungal specific transcription factor, [Aspergillus flavus NRRL3357] gi|220694232|gb|EED50576.1| fungal specific transcription factor, [Aspergillus flavus NRRL3357]
  misc_feature (39)..(519): NCBI GI: 169775145 Blast Desc: [Aspergillus oryzae RIB40] gi|83769903|dbj|BAE60038.1| protein product [Aspergillus oryzae]
  misc_feature (39)..(519): NCBI GI: 119498161 Blast Desc: fungal specific transcription factor, [Neosartorya fischeri NRRL 181] gi|119414002|gb|EAW23941.1| fungal specific transcription factor, [Neosartorya fischeri NRRL 181]
  misc_feature (138)..(519): NCBI GI: 242785350 Blast Desc: fungal specific transcription factor, [Talaromyces stipitatus ATCC 10500] gi|218720723|gb|EED20142.1| fungal specific transcription factor, [Talaromyces stipitatus ATCC
  misc_feature (138)..(516): NCBI GI: 212542975 Blast Desc: fungal specific transcription factor, [Penicillium marneffei ATCC 18224] gi|210066549|gb|EEA20642.1| fungal specific transcription factor, [Penicillium marneffei ATCC 18224]
  misc_feature (39)..(519): NCBI GI: 145238264 Blast Desc: An07g07050 [Aspergillus niger] gi|134076262|emb|CAK39547.1| protein product [Aspergillus niger]
  misc_feature (76)..(519): NCBI GI: 121710644 Blast Desc: fungal specific transcription factor domain protein [Aspergillus clavatus NRRL 1] gi|119401088|gb|EAW11512.1| fungal specific transcription factor domain protein [Aspergillus NRRL 1]
  misc_feature (138)..(533): NCBI GI: 85081614 Blast Desc: NCU01478 [Neurospora crassa OR74A] gi|28917831|gb|EAA27519.1| NCU01478 [Neurospora crassa OR74A]
MSLYPHLTNKKTKAASWVNKHLVRAQSTELMHNRLAYIRELETKIQDMETRLQGVIARDYSDKEFYPSYDISRLNQGDQTMTLHRGAENLQETISALFNDPSWDVDDVIWSGAPVLAFPLKSLSLDDDYQATTFAPCQSFPSKAAALELIKDAFQDFFYYIPLFDEDEFVQLFYQRYSQPTIRDPAWYACLNVVLSIAHLFRAMRMPDPRFENDEAFKYLNNALEVVSQLAVLQNSMPAIQALVCMSIILQGTPSPHVASALIAAAIRLAQAAGLHRNVYDSSFSEAQIEQRRRVFWMAYILDKDISLRTKQPFAQDDDDMDVELPKGIATALTSSTGDQQFINVINSRISLAIIQGQIYKKLYSVRASRQSPVEKAIVAQELKSILSYWRDGVPVYFEDDFETPTSPPLRPEYHFLFVLRFTYMNCLIMISHHLNPVQPVFPIEQVPSEVPYPLAYSDSICVQEARKALRLLQVTPQGDYAVVWMLLHPFFTTVTVILCYVLRNPESATAHDDLQLVKPFQQLMLVLAEKGSRRFYSEEVNMMCRTCTTLFQGCVEATNRVTMRVEL

SEQ ID NO: 26545 - DNA, 2544 bp, Muscodor strobelii
  misc_feature: SGI EST ID NO. CUFF.62701.0
  misc_feature: Variant of the nucleotide sequence at SEQ ID NO 26543
cgcgaccgtctagatatctgtttcgataaactctcattttctcgaactagttttccagcttccaatcccattatcaatgctattctcaaaatcagttgatacttatacggtgtacacagtcgaataacatagaggtgaacatcaaaaaattgggctcactaaattcgttctgagcgacacaagacgcgtacaccttcacacacggaatacttgatagaaactatctttttcgctacactatagcgtttccgcaatgggtcacgatggcgcagcgaatacctcgtcatctcgagagcccgtaacgaaggtgctattttgtttcacccctcttcttcccagtagcgattgatcactgtatgctgatcaatgaaggcatgtgatatgtgccgcaagaaaaaaatacggtgttgtccgagtgggaatggctgtattcagtgtactaaatcaaacacaaaatgtcactttacccccatctcacaaacaagaaaaccaaggcggccagctggacttgcatatatacgagaactggaaacgaagatacaagatatggaaactcgtctgcagggtgttatagcgcgggactattctgacaaagaattctacccatcttacgacattagtaggcttaatcaaggcgaccagaccatgacattgcatcgaggcgcagaaaatctacaagaaactatctcagctctcttcaatgatcctagctgggatgtagatgatgttatatggtctggagcacctgtattagctttccccctcaaatctttgtcacttgatgatgattatcaggccacgacctttgcaccatgtcagagctttccatctaaagcagccgccctagagctgattaaagatgcattccaagatttcttttactacatacccctttttgacgaggatgaatttgtgcagctgttctaccagcgctactcacaaccaacgattcgagaccccgcttggtacgcttgcctcaacgtcgtcttgtcaatcgcacatcttttcagagcgatgcggatgccagatccaagattcgagaatgacgaagcgtttaaatatctcaataatgcactggaggttgtctcgcagcttgcggtgctacaaaatagcatgcctgccattcaagctttggtgtgcatgtcaatcatactgcagggtactccaagtccgcatgtggcatctgcccttattgctgctgctattcgcctggcgcaagctgcgggccttcacagaaatgtatatgatagttctttctcagaagctcaaattgagcagcggaggcgtgttttctggatggcttacattctggacaaggacattagcttgcggacgaagcaaccctttgcccaagacgatgacgatatggacgttgagctgccaaagggtatagcgactgcgctaacatcctctacgggcgatcagcagttcattaacgtgattaactctcgaatcagtctagccataattcagggccaaatttacaagaagctttactcagttcgagcatcgcgtcaatcaccagttgagaaagcaattgtggcgcaagaactgaaatcgattctatcttactggagagatggtgtgccagtatatttcgaagacgactttgaaacacctacgagtccgcctctcagacctgaatatcacttcctattcgtcctgaggttcacctacatgaactgtctaattatgatcagtcatcatttgaaccctgttcagccagtctttccaatcgagcaggttccatcagaagtaccatatcctcttgcatactccgatagcatttgtgttcaagaagcacgcaaagccctccgtcttctacaagtaacgcctcagggtgattatgccgtcgtttggatgctgctccaccctttcttcacgaccgtcacagttatattatgttatgtgcttcgaaatcccgaatcagctacggcacatgatgatttgcagctggttaaaccttttcagcagctcatgcttgtcttagctgagaagggcagcagacggttctactccgaggaagtgaacatgatgtgcaggacgtgcactacgttgtttcagggatgcgtcgaggctaccaatcgtgtgactatgcgagtagagttgtagtcatatggtctgttgttcgagcgatattaagcaacttgccatttgcagcgtgggaaacctgccgtctaaagtcaaaaaaaatagagaggtcgcagcgcatagtctcagagctataattgagtgctacgtatttagctacctgatgctatcagccaggtacatgtcaattcggtgctattcttacgagaccggcgaataacgctagtatatatatactcgaatccgtgtatcatgtttcgagcagcgtatcgtatcagctcaaagccaatccgaataagcggaccgcttcgtgacagccatcctttcttctcattacggggaagatcgttcgcacgtgtaggatccgttgcaaagctatatcctgctcaaatccagtcccaggtaacctggacacgtccaagatccggattatcgagctgagcaaagacagca

SEQ ID NO: 26546 - DNA, 435 bp, Muscodor strobelii
  misc_feature: SGI cDNA ID NO. 569080
  misc_feature: Encodes the peptide sequence at SEQ ID NO 26547
atgataagcctcctatctcaagtccttctggtcgtcgccgccatcataggtggcacggctgatgcagccacgattcggttggtccctgaggacctcaccgtccgagccgctgccatcaacggagatatgacttattatcccaccggcctgggagcttgtggtatggtcaacggcgagggtgatacaattgtcgccatctctagcgccatctttgaccccctgactcctaacggcaatcccaatctcaatccactgtgtggacgacaggtgattcgcattagtcgtaatgacaagtccgttgtcgtcactgtgaaggatagatgcgagggctgcggagccaatgacacgttcagcgtcgacgttcccattgctgtctttgctcagctcgataatccggatcttggacgtgtccaggttacctgggactggatttga

SEQ ID NO: 26547 - protein, 144 aa, Muscodor strobelii
  misc_feature: SGI Peptide ID NO. 569080
  misc_feature (63)..(141): Pfam Id: PF03330 Pfam Desc: Rare lipoprotein A (RlpA)-like double-psi beta-barrel
  misc_feature (95)..(141): Pfam Id: PF03330 Pfam Desc: Rare lipoprotein A (RlpA)-like double-psi beta-barrel
  misc_feature (40)..(144): NCBI GI: 149237018 Blast Desc: conserved [Lodderomyces elongisporus NRRL YB-4239] gi|146451921|gb|EDK46177.1| conserved [Lodderomyces elongisporus NRRL YB-4239]
  misc_feature (38)..(144): NCBI GI: 255954507 Blast Desc: Pc21g09700 [Penicillium chrysogenum Wisconsin 54-1255] gi|211589717|emb|CAP95867.1| Pc21g09700 [Penicillium chrysogenum Wisconsin 54-1255]
  misc_feature (42)..(143): NCBI GI: 260943472 Blast Desc: CLUG_03275 [Clavispora lusitaniae ATCC 42720] gi|238849683|gb|EEQ39147.1| CLUG_03275 [Clavispora lusitaniae ATCC 42720]
  misc_feature (33)..(144): NCBI GI: 212536624 Blast Desc: riboflavin aldehyde-forming enzyme [Penicillium marneffei ATCC 18224] gi|210070867|gb|EEA24957.1| riboflavin aldehyde-forming enzyme [Penicillium marneffei ATCC 18224]
  misc_feature (8)..(144): NCBI GI: 226279489 Blast Desc: riboflavin aldehyde-forming enzyme [Paracoccidioides brasiliensis Pb01]
  misc_feature (4)..(144): NCBI GI: 115401264 Blast Desc: [Aspergillus terreus NIH2624] gi|114190161|gb|EAU31861.1| [Aspergillus terreus NIH2624]
  misc_feature (40)..(144): NCBI GI: 255720661 Blast Desc: [Candida tropicalis MYA-3404] gi|240135754|gb|EER35307.1| [Candida tropicalis MYA-3404]
  misc_feature (33)..(144): NCBI GI: 121713458 Blast Desc: riboflavin aldehyde-forming enzyme [Aspergillus clavatus NRRL 1] gi|119402493|gb|EAW12914.1| riboflavin aldehyde-forming enzyme [Aspergillus clavatus NRRL 1]
  misc_feature (9)..(144): NCBI GI: 225678183 Blast Desc: PABG_06554 [Paracoccidioides brasiliensis Pb03]
  misc_feature (9)..(144): NCBI GI: 226287681 Blast Desc: riboflavin aldehyde-forming enzyme [Paracoccidioides brasiliensis Pb18]
MISLLSQVLLVVAAIIGGTADAATIRLVPEDLTVRAAAINGDMTYYPTGLGACGMVNGEGDTIVAISSAIFDPLTPNGNPNLNPLCGRQVIRISRNDKSVVVTVKDRCEGCGANDTFSVDVPIAVFAQLDNPDLGRVQVTWDWI

SEQ ID NO: 26548 - DNA, 1485 bp, Muscodor strobelii
  misc_feature: SGI cDNA ID NO. 569081
  misc_feature: Elevated expression when VOC is produced
  misc_feature: Encodes the peptide sequence at SEQ ID NO 26549
atggatcctttccataagcttcctgcagagctccagattcagatccttgtttgcacgagatccagacgctcactgtcttgtctaattcaagcctcacctaccatgctcagagcatatgcgtcatcaaaaccatacattcttagaaaccgtcttgcgatcgagctcgatgacgaaatggtgcaagacgcgatggccgttcttctgttcccctcacgagatcaaattacctcctctccgtcagttcttcatactcattaccggctgtgggagacacgtcaattcacaaaccctctcaatcttggcttccaagaactctgcgataagttggacagatattgtaatcggatgctgatttttgtcgaagattacctcacgaaggcattggcagtctgtccatcacgagaatacaaatgtctgtcaggcatgtcgctgcacggccagcttacttttcgagatcggacagtctgcgcaagattcgacgctgctagccttaacgccgctgaaagacaacgattgattagagcttttctccgatatgagctgctctgcaagatgtactattccgatggtattcgtaggagtagtaggtggcggcgcaagtttccctctctttgtaagtaccatggctggactttcaacccttctgaggccgaagctttaagatgcgtacagacatatgtccaatcgcttcatagtgctatagactatcagtctctcactagtgaagctgattgcgaagattttcttcgaaactacacgatcgatctacgtgtcagcgcctggcgttcggattacgatttctatgactacgacgacgacgacaacgacgaacatgatgataaggacgaagaccatttgacacagaaggaaaataagcttaatgctgatcgaaaattactccaatattacttaaaattcgatggctcagagctctatcacggggaccactgtttcggcttcgaacttgtcatggctctcattcgaatagtcaccaacagaaggtatgggtcagacatgcctgtcgagtaccgtgcatcaagatcaggagcatacggagcatacagaaggggtgttatgacgtttcaattcatgcactttgtaatcgggccgggtcctccacaagaggaatcggaacatattaaagacagtccaggtatttacaaaatgttatatcctcgacttacacattccgacaagcttgtgggtgtctggaatccacgtacgatggacgacatacacacaagtagcaacaagtatcgtcacgttttatatcataggcgagcgtgggcatttctggataatgggcgcctctatccgcctgcttcgatggagggaggaccccgttttccaactcaggacgtcttctttcaggccttttactgccatcagttctttgacgaatatcgatctggtggacaagaactagatcaggtacaggaagttctccaggagggcgccccgtcggaacacaaggtctcgagctag

SEQ ID NO: 26549 - protein, 494 aa, Muscodor strobelii
  misc_feature: SGI Peptide ID NO. 569081
  misc_feature (1)..(450): NCBI GI: 256731205 Blast Desc: NECHADRAFT_85216 [Nectria haematococca mpVI 77-13-4]
  misc_feature (1)..(439): NCBI GI: 256726791 Blast Desc: NECHADRAFT_76140 [Nectria haematococca mpVI 77-13-4]
  misc_feature (1)..(234): NCBI GI: 46127567 Blast Desc: FG08161.1 [Gibberella zeae PH-1]
  misc_feature (1)..(234): NCBI GI: 256729979 Blast Desc: NECHADRAFT_82510 [Nectria haematococca mpVI 77-13-4]
  misc_feature (2)..(234): NCBI GI: 46111471 Blast Desc: FG02617.1 [Gibberella zeae PH-1]
  misc_feature (1)..(234): NCBI GI: 256730757 Blast Desc: NECHADRAFT_25455 [Nectria haematococca mpVI 77-13-4]
  misc_feature (1)..(453): NCBI GI: 256721661 Blast Desc: NECHADRAFT_44838 [Nectria haematococca mpVI 77-13-4]
  misc_feature (1)..(234): NCBI GI: 256720277 Blast Desc: NECHADRAFT_56194 [Nectria haematococca mpVI 77-13-4]
  misc_feature (1)..(186): NCBI GI: 256727530 Blast Desc: NECHADRAFT_76459 [Nectria haematococca mpVI 77-13-4]
  misc_feature (1)..(234): NCBI GI: 46126703 Blast Desc: FG07729.1 [Gibberella zeae PH-1]
  misc_feature: Useful for introducing or modulating the production of volatile compounds
MDPFHKLPAELQIQILVCTRSRRSLSCLIQASPTMLRAYASSKPYILRNRLAIELDDEMVQDAMAVLLFPSRDQITSSPSVLHTHYRLWETRQFTNPLNLGFQELCDKLDRYCNRMLIFVEDYLTKALAVCPSREYKCLSGMSLHGQLTFRDRTVCARFDAASLNAAERQRLIRAFLRYELLCKMYYSDGIRRSSRWRRKFPSLCKYHGWTFNPSEAEALRCVQTYVQSLHSAIDYQSLTSEADCEDFLRNYTIDLRVSAWRSDYDFYDYDDDDNDEHDDKDEDHLTQKENKLNADRKLLQYYLKFDGSELYHGDHCFGFELVMALIRIVTNRRYGSDMPVEYRASRSGAYGAYRRGVMTFQFMHFVIGPGPPQEESEHIKDSPGIYKMLYPRLTHSDKLVGVWNPRTMDDIHTSSNKYRHVLYHRRAWAFLDNGRLYPPASMEGGPRFPTQDVFFQAFYCHQFFDEYRSGGQELDQVQEVLQEGAPSEHKVSS

SEQ ID NO: 26550 - DNA, 2744 bp, Muscodor strobelii
  misc_feature: SGI EST ID NO. CUFF.62711.0
  misc_feature: Variant of the nucleotide sequence at SEQ ID NO 26548
cacaaagttaaaatcctgacagctaccaaacaccatactgtatcgctcgtaaagcactcgattggatagcactcgcagccattcaagtgcaccaataccaccgccaaaatggatcctttccataagcttcctgcagagctccagattcagatccttgtttgcacgagatccagacgctcactgtcttgtctaattcaagcctcacctaccatgctcagagcatatgcgtcatcaaaaccatacattcttagaaaccgtcttgcgatcgagctcgatgacgaaatggtgcaagacgcgatggccgttcttctgttcccctcacgagatcaaattacctcctctccgtcagttcttcatactcattaccggctgtgggagacacgtcaattcacaaaccctctcaatcttggcttccaagaactctgcgataagttggacagatattgtaatcggatgctgatttttgtcgaagattacctcacgaaggcattggcagtctgtccatcacgagaatacaaatgtctgtcaggcatgtcgctgcacggccagcttacttttcgagatcggacagtctgcgcaagattcgacgctgctagccttaacgccgctgaaagacaacgattgattagagcttttctccgatatgagctgctctgcaagatgtactattccgatggtattcgtaggagtagtaggtggcggcgcaagtttccctctctttgtaagtaccatggctggactttcaacccttctgaggccgaagctttaagatgcgtacagacatatgtccaatcgcttcatagtgctatagactatcagtctctcactagtgaagctgattgcgaagattttcttcgaaactacacgatcgatctacgtgtcagcgcctggcgttcggattacgatttctatgactacgacgacgacgacaacgacgaacatgatgataaggacgaagaccatttgacacagaaggaaaataagcttaatgctgatcgaaaattactccaatattacttaaaattcgatggctcagagctctatcacggggaccactgtttcggcttcgaacttgtcatggctctcattcgaatagtcaccaacagaaggtatgggtcagacatgcctgtcgagtaccgtgcatcaagatcaggagcatacggagcatacagaaggggtgttatgacgtttcaattcatgcactttgtaatcgggccgggtcctccacaagaggaatcggaacatattaaagacagtccaggtatttacaaaatgttatatcctcgacttacacattccgacaagcttgtgggtgtctggaatccacgtacgatggacgacatacacacaagtagcaacaagtatcgtcacgttttatatcataggcgagcgtgggcatttctggataatgggcgcctctatccgcctgcttcgatggagggaggaccccgttttccaactcaggacgtcttctttcaggccttttactgccatcagttctttgacgaatatcgatctggtggacaagaactagatcaggtacaggaagttctccaggagggcgccccgtcggaacacaaggtctcgagctagagattgacccaggggccgaactctgattcgtcactatccggattggaagcaatcgattttcctaattaaaaggcccagaacgatatttagacgtcgtggggttggcatggttttgacccaggtagccaacagaggcaggcagatcaaaggtgctgctagaactgtcgagatggatgggaaactacctataattgtctaaattccctggaaaacgaaaacatttaacaaacataagaattctctccggaattagagacttaggtacgctacacattgtaaatactgatagaactatattttagcgcacagtatacaatattcacatgtacgatataatcaacttgagagcccttcgtagtgctagtctcctctgatagaaccaatggcctcgaatactcgacatttagatcgttcagagtggcaatggcggcggtttatttttcggcggcacgtcgaatatcctgccggttattgtatattgatgcttggtcagatgaagattcccaacagttgtatggatgaggaaaagagtgagcacgacagtcactaatcggttacgatcactggccattctctttataaatcaacatctcataatatcttctttattcgaaatgtgtgcgcatttgaccaccctctcacacatagcgatagtgtatacagttctgacaatctaggttatgcagtagtggattatactctttcgacaggcgatgctctagatgactctccacataaaacccccaagttcacacggtatctgctgacgaggacaatatattcacaaggataatcccaataaatctcctgtgctgctatcaaaccataactatcatggccttcatagtattgtgcggaggcttatgtaaaggattatgcgttctgtttgtcgtcccactacataatccccagaggcggtggtggcggcggatagggcgtaatctaaatttacttccccctgagagccactcactccacaactctgtctgcttcccgaataatctcaccgcattttcatgtcaaaaatgagatgctttgacgtccgcaccgatatgtgcgtgccggaccctctttcatcgaaacctgacaggccactcgtcgccaatgaactgtagatgagattgctggtgcaggaatcaacttactcccag

SEQ ID NO: 26551 - DNA, 1434 bp, Muscodor strobelii
  misc_feature: SGI cDNA ID NO. 569082
  misc_feature: Encodes the peptide sequence at SEQ ID NO 26552
atggcagactattcggtacccattgtcatcgacggcgttgagcgtcgaacatcgagcctctacgacgtgattaatcccagcaacgggcaagtatgccatcgcagcgtcgcggccggtagtggggatgctatcgctgctattgaatcaagcgcagtagcatttaggcaatggcgcaaatccactccctccatgcggagagatattttgcttaaggcagctgatatcatggaaaggagaagcgaggagttggctcagtatatgataactgagacgggcggctcggagggttggacggatttcaacttgaaaaatgccaccgacttgatgagagacatcgcgggaagggtgagtagtattgttggaactgctcctactctggcggatccagagaggagcggtttgattgtgaaggagccttatggagttgtattctccgtggcgccttggaactctccatacatcctcggcgctcgcgcagtgatacaacccatcgcagcaggcaacaccgttgtcctaaagggttcggaactatcaccgcgttctttgtgggccatcgtgtctgtcctaaacgaagccgggcttccgaacggggtcctgaacttcatttccacaaacaagcaatacgccgccgcagttaccaagaccatcgtaacgcatcctcaagtaaagaagatcagtttcaccggtagcacctccgtaggccgaatcatcgctaagctcgctgcggagcatttaaagccactggttttagaattaggcggtcaggcgccggcaattgtatggaaagacgcgaacttggatctcgcagctgccagttgtgcggctggctcatttctttacgcaggacagtgctgtatgtcgaccgagcgacttatcgttcacaaggacatacgtgaagagttcaagaagaaattgattgctgctatcccgacagtatcgccagctaaggacgagtcaaatcttatgatcaatccagtcggggtgaggaagacgagccaactcatccaagacgctgagaagcaaggggcagtcctgacgagacttgatgtgagttcgactggtacagccaacacggagacacggttacagcccgttgtcatcggcgacgtgacacctgctatggaaatataccgcaatgaaaacttcgggccgacagcttacatcatcgaagtgagtagcgaagaagaagcgctggcgatcgcgaatgatacggagtacggtcttgcgtccgcggtcttcaccgaagatctccgagttggtctccggttcgcgcgcgagattgaaactggggccgtgcatatcaataatatgtcaatacatgacgagagtgctttgccgcatggcggttgcaaggcgactgggtatgggaggttcaatacggatgttgggcttgccgagtggtatagaacgaagaatataacgtggaggaactag

SEQ ID NO: 26552 - protein, 477 aa, Muscodor strobelii
  misc_feature: SGI Peptide ID NO. 569082
  misc_feature (13)..(473): Pfam Id: PF00171 Pfam Desc: Aldehyde dehydrogenase family
  misc_feature (13)..(345): Pfam Id: PF00171 Pfam Desc: Aldehyde dehydrogenase family
  misc_feature (362)..(473): Pfam Id: PF00171 Pfam Desc: Aldehyde dehydrogenase family
  misc_feature (4)..(477): NCBI GI: 46107670 Blast Desc: FG00718.1 [Gibberella zeae PH-1]
  misc_feature (6)..(476): NCBI GI: 116180754 Blast Desc: CHGG_01005 [Chaetomium globosum CBS 148.51] gi|88185302|gb|EAQ92770.1| CHGG_01005 [Chaetomium globosum CBS 148.51]
  misc_feature (4)..(477): NCBI GI: 256735478 Blast Desc: NECHADRAFT_90385 [Nectria haematococca mpVI 77-13-4]
  misc_feature (2)..(476): NCBI GI: 171687467 Blast Desc: protein product [Podospora anserina] gi|170943695|emb|CAP69347.1| protein product [Podospora anserina]
  misc_feature (4)..(476): NCBI GI: 85111596 Blast Desc: NCU02056 [Neurospora crassa OR74A] gi|28925770|gb|EAA34776.1| NCU02056 [Neurospora crassa OR74A]
  misc_feature (3)..(476): NCBI GI: 39974403 Blast Desc: MGG_00652 [Magnaporthe grisea 70-15] gi|145018433|gb|EDK02712.1| MGG_00652 [Magnaporthe grisea 70-15]
  misc_feature (5)..(475): NCBI GI: 256724737 Blast Desc: NECHADRAFT_47996 [Nectria haematococca mpVI 77-13-4]
  misc_feature (1)..(475): NCBI GI: 115391041 Blast Desc: conserved [Aspergillus terreus NIH2624] gi|114193949|gb|EAU35649.1| conserved [Aspergillus terreus NIH2624]
  misc_feature (5)..(477): NCBI GI: 115400217 Blast Desc: conserved [Aspergillus terreus NIH2624] gi|114191363|gb|EAU33063.1| conserved [Aspergillus terreus NIH2624]
  misc_feature (6)..(475): NCBI GI: 145255113 Blast Desc: An18g04080 [Aspergillus niger] gi|134084455|emb|CAK43210.1| protein product [Aspergillus niger]
  misc_feature (10)..(474): SWISSPROT Homolog: EC 1.2.1.65 Salicylaldehyde dehydrogenase
  misc_feature: Useful for introducing or modulating the production of volatile compounds
  misc_feature: Useful for fungicidal and/or biocontrol applications
MADYSVPIVIDGVERRTSSLYDVINPSNGQVCHRSVAAGSGDAIAAIESSAVAFRQWRKSTPSMRRDILLKAADIMERRSEELAQYMITETGGSEGWTDFNLKNATDLMRDIAGRVSSIVGTAPTLADPERSGLIVKEPYGVVFSVAPWNSPYILGARAVIQPIAAGNTVVLKGSELSPRSLWAIVSVLNEAGLPNGVLNFISTNKQYAAAVTKTIVTHPQVKKISFTGSTSVGRIIAKLAAEHLKPLVLELGGQAPAIVWKDANLDLAAASCAAGSFLYAGQCCMSTERLIVHKDIREEFKKKLIAAIPTVSPAKDESNLMINPVGVRKTSQLIQDAEKQGAVLTRLDVSSTGTANTETRLQPVVIGDVTPAMEIYRNENFGPTAYIIEVSSEEEALAIANDTEYGLASAVFTEDLRVGLRFAREIETGAVHINNMSIHDESALPHGGCKATGYGRFNTDVGLAEWYRTKNITWRN

SEQ ID NO: 26553 - DNA, 1860 bp, Muscodor strobelii
  misc_feature: SGI cDNA ID NO. 569083
  misc_feature: Encodes the peptide sequence at SEQ ID NO 26554
atgtactatttcactaatagcaaggaacgtcagatacgactgatcgagatagatccagggcgaggcgatcagatagtctgcgctcactcgaaaattacatcgattacgggacctgaagtatcagcttacgagacgatctcgtactgttggggtgatgccgacatacgggatacaatagcactcgacggcacgattatcaacgtcccactgagctcagcgagagccttacgatgtttccgagatccagatagtccgcgaatcgtatggattgacgctttatgcatcaaccaactagaccttgatgaacgaaatcgtcaagtctttatgatgtcgagtatatataggtcgtcacagcacaatctgattcatctcggcaaggaaaatatgcatacaaaggctgcgactgagtcagtccgaagacttacagaagaaatcagagctaagaccgacgggttctcaaacttccactccaagatgacgcagtacatatggggtctagcacactcaaatgatcctattgactgcgagctggactttgacgcactcggttcgctgttctctcgaccctggtttcagcgattatggatcgtacaagaggcggtcttatcgccccgcagcacatgtttctggggaaatacacattcaattgatctcgttgatcttctcagagtagcaatgtggctcagttatcaccgcgactttattcctcgatggctttacgatcacgatggattgcacaatgctgctgatctttggtcactcgtcgacggtgaaagctcatctcgagtcgcaggtggccccctcaagatcgacttcgcgcgtttgatgttcctttctcaacaccgcaaaacaaccgagctcaaagacaagatattcgcgattgttggattattaccgcattttttcgaggagcctggtgttagcccagagaaacagttgctagaaatcgactacgacaaatcctggagacgtatcatttgtgatgccactagatatgcaattcaggagttgaatagcttggtgatcttccagggcgtatctcatcggtctaatggccccctagacttaggtgattttccatcatggcctgccaggattgataaagttttcgaagaagatgaggataccgaatccttgacatggaacttattcaacgcagacaactccattaagattgacagagacgatttgcagttggaatctgccggcaccgaaaaactcagacttttgggttgtcagatctcgacagttattcaagtatctgatgtactgaccccaacaactttgaaaagcaggaaactccttcctctcgcactacggttaattctcaatatgtttgagcgcatatggtacaacgttcccgattgtatcagggggtgggctcagagcgagatgcagaaacaaccgtttccgcccatgctgacgtcggttcttatgacaggcaggaatacttccggccaactgcttagagaagatgagatggaggaatgtcagatatttctgaaagaacttcttagtattgatgcagatgagtcaacagcagtgtttcctcctgtggaaaatagggcgttaggcctctaccggcagcttgtgagctcatgccgaaaccgccgattctttctcacaaacactggtaacgtggcgcttggaccgagatgcttgaagctagcggattctgtatgggtgataaacggtgcatccgtcccttttgccctaagacttgcaggcgtgcagcgccacggcccaatacaatggcattatctgggcgaagtgtacatgcacggagtgatgcaaggagagttcataaggttagcgaaccaagaaggtaccctcgcgcctgaagacgtagtgttagtgtga

SEQ ID NO: 26554 - protein, 619 aa, Muscodor strobelii
  misc_feature: SGI Peptide ID NO. 569083
  misc_feature (43)..(199): Pfam Id: PF06985 Pfam Desc: Heterokaryon incompatibility protein (HET)
  misc_feature (43)..(174): Pfam Id: PF06985 Pfam Desc: Heterokaryon incompatibility protein (HET)
  misc_feature (2)..(619): NCBI GI: 256724990 Blast Desc: NECHADRAFT_77031 [Nectria haematococca mpVI 77-13-4]
  misc_feature (1)..(611): NCBI GI: 256723656 Blast Desc: [Nectria haematococca mpVI 77-13-4]
  misc_feature (6)..(602): NCBI GI: 46121173 Blast Desc: FG04965.1 [Gibberella zeae PH-1]
  misc_feature (3)..(597): NCBI GI: 256721216 Blast Desc: NECHADRAFT_101059 [Nectria haematococca mpVI 77-13-4]
  misc_feature (6)..(599): NCBI GI: 154320400 Blast Desc: BC1G_01672 [Botryotinia fuckeliana B05.10] gi|150853361|gb|EDN28553.1| BC1G_01672 [Botryotinia fuckeliana B05.10]
  misc_feature (12)..(619): NCBI GI: 256730775 Blast Desc: NECHADRAFT_30134 [Nectria haematococca mpVI 77-13-4]
  misc_feature (11)..(573): NCBI GI: 256722966 Blast Desc: NECHADRAFT_86875 [Nectria haematococca mpVI 77-13-4]
  misc_feature (3)..(610): NCBI GI: 256728382 Blast Desc: NECHADRAFT_87764 [Nectria haematococca mpVI 77-13-4]
  misc_feature (12)..(609): NCBI GI: 225683598 Blast Desc: [Paracoccidioides brasiliensis Pb03]
  misc_feature (12)..(609): NCBI GI: 226287224 Blast Desc: conserved [Paracoccidioides brasiliensis Pb18]
MYYFTNSKERQIRLIEIDPGRGDQIVCAHSKITSITGPEVSAYETISYCWGDADIRDTIALDGTIINVPLSSARALRCFRDPDSPRIVWIDALCINQLDLDERNRQVFMMSSIYRSSQHNLIHLGKENMHTKAATESVRRLTEEIRAKTDGFSNFHSKMTQYIWGLAHSNDPIDCELDFDALGSLFSRPWFQRLWIVQEAVLSPRSTCFWGNTHSIDLVDLLRVAMWLSYHRDFIPRWLYDHDGLHNAADLWSLVDGESSSRVAGGPLKIDFARLMFLSQHRKTTELKDKIFAIVGLLPHFFEEPGVSPEKQLLEIDYDKSWRRIICDATRYAIQELNSLVIFQGVSHRSNGPLDLGDFPSWPARIDKVFEEDEDTESLTWNLFNADNSIKIDRDDLQLESAGTEKLRLLGCQISTVIQVSDVLTPTTLKSRKLLPLALRLILNMFERIWYNVPDCIRGWAQSEMQKQPFPPMLTSVLMTGRNTSGQLLREDEMEECQIFLKELLSIDADESTAVFPPVENRALGLYRQLVSSCRNRRFFLTNTGNVALGPRCLKLADSVWVINGASVPFALRLAGVQRHGPIQWHYLGEVYMHGVMQGEFIRLANQEGTLAPEDVVLV

SEQ ID NO: 26555 - DNA, 2325 bp, Muscodor strobelii
  misc_feature: SGI EST ID NO. CUFF.62741.0
  misc_feature: Variant of the nucleotide sequence at SEQ ID NO 26553
gagatgtcagtgtcattgaacgaggcattatcagccgtgataggagcacgactacatcaaaggctttgagtgaaaaagaggctccatcgtcgcgaacagatgatgatgtttcaacttgttactttttgctttttgtagatgcctgggcagctatccggagcctggtcggctgaagtggcgcattcagcggtgtctcatctgccctcgatagggactcagacatcaccccatacattttgttttgctctaacttctgcttctctttggtcttttctctatgtgacgcattgctcagtaccttccgacgttgccacagaccttgcaatgtactatttcactaatagcaaggaacgtcagatacgactgatcgagatagatccagggcgaggcgatcagatagtctgcgctcactcgaaaattacatcgattacgggacctgaagtatcagcttacgagacgatctcgtactgttggggtgatgccgacatacgggatacaatagcactcgacggcacgattatcaacgtcccactgagctcagcgagagccttacgatgtttccgagatccagatagtccgcgaatcgtatggattgacgctttatgcatcaaccaactagaccttgatgaacgaaatcgtcaagtctttatgatgtcgagtatatataggtcgtcacagcacaatctgattcatctcggcaaggaaaatatgcatacaaaggctgcgactgagtcagtccgaagacttacagaagaaatcagagctaagaccgacgggttctcaaacttccactccaagatgacgcagtacatatggggtctagcacactcaaatgatcctattgactgcgagctggactttgacgcactcggttcgctgttctctcgaccctggtttcagcgattatggatcgtacaagaggcggtcttatcgccccgcagcacatgtttctggggaaatacacattcaattgatctcgttgatcttctcagagtagcaatgtggctcagttatcaccgcgactttattcctcgatggctttacgatcacgatggattgcacaatgctgctgatctttggtcactcgtcgacggtgaaagctcatctcgagtcgcaggtggccccctcaagatcgacttcgcgcgtttgatgttcctttctcaacaccgcaaaacaaccgagctcaaagacaagatattcgcgattgttggattattaccgcattttttcgaggagcctggtgttagcccagagaaacagttgctagaaatcgactacgacaaatcctggagacgtatcatttgtgatgccactagatatgcaattcaggagttgaatagcttggtgatcttccagggcgtatctcatcggtctaatggccccctagacttaggtgattttccatcatggcctgccaggattgataaagttttcgaagaagatgaggataccgaatccttgacatggaacttattcaacgcagacaactccattaagattgacagagacgatttgcagttggaatctgccggcaccgaaaaactcagacttttgggttgtcagatctcgacagttattcaagtatctgatgtactgaccccaacaactttgaaaagcaggaaactccttcctctcgcactacggttaattctcaatatgtttgagcgcatatggtacaacgttcccgattgtatcagggggtgggctcagagcgagatgcagaaacaaccgtttccgcccatgctgacgtcggttcttatgacaggcaggaatacttccggccaactgcttagagaagatgagatggaggaatgtcagatatttctgaaagaacttcttagtattgatgcagatgagtcaacagcagtgtttcctcctgtggaaaatagggcgttaggcctctaccggcagcttgtgagctcatgccgaaaccgccgattctttctcacaaacactggtaacgtggcgcttggaccgagatgcttgaagctagcggattctgtatgggtgataaacggtgcatccgtcccttttgccctaagacttgcaggcgtgcagcgccacggcccaatacaatggcattatctgggcgaagtgtacatgcacggagtgatgcaaggagagttcataaggttagcgaaccaagaaggtaccctcgcgcctgaagacgtagtgttagtgtgacgttttctccgacagatatgttgttgtatccaacgaggatactgttagttccatacattagtgtatgacacataatccatctcgtatgcttatgtagcaaaagcattaccagatttaaattcctgtctaccttaggcttgc

SEQ ID NO: 26556 - DNA, 1524 bp, Muscodor strobelii
  misc_feature: SGI cDNA ID NO. 569084
  misc_feature: Encodes the peptide sequence at SEQ ID NO 26557
atgacatcccttcattcgctgcctgtctttggcgctcatggggcgaaagataaatcggctaaacttaaaagcaagtcgacggtccggccgatattgaagaaatggtcgcagtcggagaaagataagaagtctattgaccttgatcgggggtgggatgatcaagatgagcagtttcgcagcgcgtacgcggagcaaggaaccgtgcccgaagtggcctcaggaggaatgacaacaggaggcagcgggataggagcgggaggtgctacgagctcgcgacggttcaaccactcgaggtcgatcagtgccacaagtcacgtctcgatcgcaacgtccaacagcagcaccggcacgcccgcgccgcgacaggccggggcgacattcgtgcaccccttccagcagacgccgcgcacgtcgaccccgccgttgctgtcgtacgcaaactcgctagcatcgatcgccgacggccgcgactactcgcctgcgaccatcaccgaggacgacgacgacgatctggcagacagcgcggggcccgtgttcacgcagcagccagacggcgccctcattcacagcagtcacaatcacaatcacaatgcaaacagcagcggcggcttgcacatccaccacagtgcgcgcacctcgcaccctgtgattaacaatagtcactcgctcgcaggttccaacccgccctcgacctcgaacctgcgccggccgtcactcgccagccagcacacctcgctttctcggaaggctctaacggcgtcgcaaccaaaccccgccgcagtcgcatcgtcgcggctcgtcaacgtctccagccgctcggatctctacctcgaccgcaccctcgactcgcccgcctcgtccaacccggcctcgaccgccgtcatctcgccctcgggctccgtcgcgcccatgtcgccgctgcgcacctccctcgacggcggctttccccgcctgcgcgccaagtccgacctcgacaccgccacccgcgccgaacacctgcgtgctgcacgccgcaagttcgagatgaaggagcgcgccaaggaggagcgctacgctcgcgaggaggtcaagcgccgcgagcgcgccgacaagaagcacgcccaccagctcgagaagcaggtcgccgcgcagcacaaggagcagctggcggcccaggcgcgcgagcaggccgccgagctggaggaggccctgcagcgcggcaagcacaatcgcaagatcagcatcgccagcagcggtcggcacagcttgactctggcccgacccagcctgaacaccggcaggcccagcacctcgcgcaagaacacgacgtcgagccagcttggcgaatccgagaagttgtcgagcaacacttacgacaatacgaacccctactatacttcctcctacggacctgagcccagtgcccaaggagtgcacttctcggcgcccaagcgcaagaacacggccaagcgcaagacccacagcgcctggactgcgtttgtactgtggttcaggacgaagctgctccgtatgggtggaagctga

SEQ ID NO: 26557 - protein, 507 aa, Muscodor strobelii
  misc_feature: SGI Peptide ID NO. 569084
  misc_feature (18)..(505): NCBI GI: 256734756 Blast Desc: NECHADRAFT_98956 [Nectria haematococca mpVI 77-13-4]
  misc_feature (4)..(506): NCBI GI: 171694900 Blast Desc: protein product [Podospora anserina] gi|170947692|emb|CAP59854.1| protein product [Podospora anserina]
  misc_feature (7)..(505): NCBI GI: 46107640 Blast Desc: FG00703.1 [Gibberella zeae PH-1]
  misc_feature (18)..(503): NCBI GI: 261358876 Blast Desc: conserved [Verticillium albo-atrum VaMs.102]
  misc_feature (4)..(506): NCBI GI: 85111198 Blast Desc: NCU00906 [Neurospora crassa OR74A] gi|28925561|gb|EAA34587.1| [Neurospora crassa OR74A] gi|38636457|emb|CAE81992.1| [Neurospora crassa]
  misc_feature (17)..(504): NCBI GI: 145614032 Blast Desc: MGG_01189 [Magnaporthe grisea 70-15] gi|145021017|gb|EDK05146.1| MGG_01189 [Magnaporthe grisea 70-15]
  misc_feature (23)..(505): NCBI GI: 156040611 Blast Desc: [Sclerotinia sclerotiorum 1980] gi|154696378|gb|EDN96116.1| [Sclerotinia sclerotiorum 1980]
  misc_feature (28)..(504): NCBI GI: 116182602 Blast Desc: CHGG_01929 [Chaetomium globosum CBS 148.51] gi|88186226|gb|EAQ93694.1| CHGG_01929 [Chaetomium globosum CBS 148.51]
  misc_feature (301)..(505): NCBI GI: 154295312 Blast Desc: [Botryotinia fuckeliana B05.10] gi|150844104|gb|EDN19297.1| [Botryotinia fuckeliana B05.10]
  misc_feature (307)..(503): NCBI GI: 261361575 Blast Desc: VDBG_10113 [Verticillium albo-atrum VaMs.102]
MTSLHSLPVFGAHGAKDKSAKLKSKSTVRPILKKWSQSEKDKKSIDLDRGWDDQDEQFRSAYAEQGTVPEVASGGMTTGGSGIGAGGATSSRRFNHSRSISATSHVSIATSNSSTGTPAPRQAGATFVHPFQQTPRTSTPPLLSYANSLASIADGRDYSPATITEDDDDDLADSAGPVFTQQPDGALIHSSHNHNHNANSSGGLHIHHSARTSHPVINNSHSLAGSNPPSTSNLRRPSLASQHTSLSRKALTASQPNPAAVASSRLVNVSSRSDLYLDRTLDSPASSNPASTAVISPSGSVAPMSPLRTSLDGGFPRLRAKSDLDTATRAEHLRAARRKFEMKERAKEERYAREEVKRRERADKKHAHQLEKQVAAQHKEQLAAQAREQAAELEEALQRGKHNRKISIASSGRHSLTLARPSLNTGRPSTSRKNTTSSQLGESEKLSSNTYDNTNPYYTSSYGPEPSAQGVHFSAPKRKNTAKRKTHSAWTAFVLWFRTKLLRMGGS

SEQ ID NO: 26558 - DNA, 1380 bp, Muscodor strobelii
  misc_feature: SGI cDNA ID NO. 569085
  misc_feature: Encodes the peptide sequence at SEQ ID NO 26559
atggagatgtcaccgggtttttggctggtgctaatcagcctccttgttggtcaagtgttcggtgctctccaggtgaatctgcaggaccaatcatccatcaaatctgccgccaagttaaaagcccaagacgtcctctccttctacaagggcgacgatcccggctgggtcccgggcattcttcccggacctcctccggatggcgattactactggtggcaaggcggtgccatgtggggagcattgctggactaccgacacgcaacgggggatgatcagttcgacgacactatcttcaaggccctgcagttccaggttggcgagcaccaggactacaacccctcgaactggtccgcgtctatggggaacgacgatcaagccttctgggccttcgcttcgctgctggctgctgagacgggatttcaagatcccccggaagacaagccgcagtggttgactctctcacaagcagtattcaacgaacagtccaacatggatcgacgcgtatcgacgggcggcaattgtcaaggcgggctacgatggcaagtgtatcaaacgaacaacggatgggactacatcaacactgtcgccaatgcctgctacttcaacttgggcactcgacttgcacgttacaccgacaacaccacctacagcgagtatgccgagcgaagctggcagtttcttgagtctgtcggctatataaccgaggactttgatgtctacgatggcgcccacttacctgactgcactgatatcaacaaggcacagttctcgtacaatgccgccatgttgttgcagggctgtgcttacatgtataatttcacaaacggaaactcaacatggaaaacccgactcgacggcctagcaaccggcatccagcgcgtcttctttcaagacggagtagcccacgaaccatcctgcgagccagccccaggatcctgcaactcagacatggagtcctacagaggatacatgcaccgctggatgggcagctccatccaaatggcgccctacctccacgacatcttcatgcccgtactccgctcctccgccgaagcagccgtaaaacagtgcacaggcggctcaaacggccgtatgtgtggattccactggacgacggggaaatacgacgggctgcagagcgcgagtctggagatgaatgtcctgggggctttgaccgcgttgatcatgccgcaggtctcggccccgctgacgaacactaccggaggcacgagtaaaggagatccgaatgcgggtcaggataagacgacgttgcctacgtttagaccgatcactgttggtgataaggcgggtgcgggcgttatcacggttctacttattactggggcgttgtcggcttttgggtggatgagtatggattag

SEQ ID NO: 26559 - protein, 459 aa, Muscodor strobelii
  misc_feature: SGI Peptide ID NO. 569085
  misc_feature (24)..(407): Pfam Id: PF03663 Pfam Desc: Glycosyl hydrolase family 76
  misc_feature (24)..(378): Pfam Id: PF03663 Pfam Desc: Glycosyl hydrolase family 76
  misc_feature (3)..(457): NCBI GI: 171693745 Blast Desc: protein product [Podospora anserina] gi|170946821|emb|CAP73625.1| protein product [Podospora anserina]
  misc_feature (15)..(458): NCBI GI: 164426438 Blast Desc: NCU04262 [Neurospora crassa OR74A] gi|157071335|gb|EAA32017.2| conserved [Neurospora crassa OR74A]
  misc_feature (15)..(458): NCBI GI: 16944622 Blast Desc: DFG5 protein [Neurospora crassa]
  misc_feature (17)..(458): NCBI GI: 256720710 Blast Desc: glycoside hydrolase family 76 [Nectria haematococca mpVI 77-13-4]
  misc_feature (10)..(456): NCBI GI: 46117484 Blast Desc: FG04584.1 [Gibberella zeae PH-1]
  misc_feature (15)..(456): NCBI GI: 256729380 Blast Desc: glycoside hydrolase family 76 [Nectria haematococca mpVI 77-13-4]
  misc_feature (32)..(458): NCBI GI: 85093327 Blast Desc: NCU08127 [Neurospora crassa OR74A] gi|28921118|gb|EAA30434.1| conserved [Neurospora crassa OR74A]
  misc_feature (9)..(443): NCBI GI: 145610715 Blast Desc: MGG_00951 [Magnaporthe grisea 70-15] gi|145018095|gb|EDK02374.1| MGG_00951 [Magnaporthe grisea 70-15]
  misc_feature (12)..(458): NCBI GI: 46137743 Blast Desc: FG10387.1 [Gibberella zeae PH-1]
  misc_feature (4)..(458): NCBI GI: 171678183 Blast Desc: protein product [Podospora anserina] gi|170937161|emb|CAP61818.1| protein product [Podospora anserina]
  misc_feature (11)..(456): SWISSPROT Homolog: EC 3.2.1.101 Mannan endo-1,6-alpha-mannosidase
MEMSPGFWLVLISLLVGQVFGALQVNLQDQSSIKSAAKLKAQDVLSFYKGDDPGWVPGILPGPPPDGDYYWWQGGAMWGALLDYRHATGDDQFDDTIFKALQFQVGEHQDYNPSNWSASMGNDDQAFWAFASLLAAETGFQDPPEDKPQWLTLSQAVFNEQSNMDRRVSTGGNCQGGLRWQVYQTNNGWDYINTVANACYFNLGTRLARYTDNTTYSEYAERSWQFLESVGYITEDFDVYDGAHLPDCTDINKAQFSYNAAMLLQGCAYMYNFTNGNSTWKTRLDGLATGIQRVFFQDGVAHEPSCEPAPGSCNSDMESYRGYMHRWMGSSIQMAPYLHDIFMPVLRSSAEAAVKQCTGGSNGRMCGFHWTTGKYDGLQSASLEMNVLGALTALIMPQVSAPLTNTTGGTSKGDPNAGQDKTTLPTFRPITVGDKAGAGVITVLLITGALSAFGWMSMD

SEQ ID NO: 26560 - DNA, 1888 bp, Muscodor strobelii
  misc_feature: SGI EST ID NO. CUFF.62743.0
  misc_feature: Variant of the nucleotide sequence at SEQ ID NO 26558
tcagaactatccgacttcttacctaacgctttgccggcatagcggtaaaccacctacggaaacaatactgacagcaagaatcgagtagcatccacattaatgtctaagatggactcgtaatggactcagtagcgtcgctctctagacgggagagagagcagcagtggcgcatcagtggatgccgctctacgtgacgatgacgataaggacgatcagtgttcttggtggcgtagccaggctctacgcaggtgtaataagggagccaatagggtcgcctgccagtccatctgtcaggaacaagacgacctatttcgacaacaaggtttggctaatcatccccgttggtccactgtagcttgaacgtcccgtatctgcaaatgcgcagaagggagcctgagatgaattatactctgtcctgcaccatcgttttttgccatccataagaagattcctcggtctgggcattcgatgcgttgctgtgcaccaggatcctctaatgaatgtgccgtgccaccacctactcagtgacgagcacattcactttgagctctaagtcacttatccgccctgtgtttgcccctgagactctaaatgtctgtacgcgtctggccctgaccatgtaactgtaagacacaacacggtactaccacaggaaacctcccgtctaccaccttccggcacaccttcgtttatccttccgacctcgccgcccttgcttcagtgattccatcgttgcgctttccttccagccgaatagcacatgtccgtcgcattcccgtctcgccattcgcaggcttcggtatatttataatcgatcgagaaaacagcatggagatgtcaccgggtttttggctggtgctaatcagcctccttgttggtcaagtgttcggtgctctccaggtgaatctgcaggaccaatcatccatcaaatctgccgccaagttaaaagcccaagacgtcctctccttctacaagggcgacgatcccggctgggtcccgggcattcttcccggacctcctccggatggcgattactactggtggcaaggcggtgccatgtggggagcattgctggactaccgacacgcaacgggggatgatcagttcgacgacactatcttcaaggccctgcagttccaggttggcgagcaccaggactacaacccctcgaactggtccgcgtctatggggaacgacgatcaagccttctgggccttcgcttcgctgctggctgctgagacgggatttcaagatcccccggaagacaagccgcagtggttgactctctcacaagcagtattcaacgaacagtccaacatggatcgacgcgtatcgacgggcggcaattgtcaaggcgggctacgatggcaagtgtatcaaacgaacaacggatgggactacatcaacactgtcgccaatgcctgctacttcaacttgggcactcgacttgcacgttacaccgacaacaccacctacagcgagtatgccgagcgaagctggcagtttcttgagtctgtcggctatataaccgaggactttgatgtctacgatggcgcccacttacctgactgcactgatatcaacaaggcacagttctcgtacaatgccgccatgttgttgcagggctgtgcttacatgtataatttcacaaacggaaactcaacatggaaaacccgactcgacggcctagcaaccggcatccagcgcgtcttctttcaagacggagtagcccacgaaccatcctgcgagccagccccaggatcctgcaactcagacatggagtcctacagaggatacatgcaccgctggatgggcagctccatccaaatggcgccctacctccacgacatcttcatgcccgtactccgctcctccgccgaagcagccg

SEQ ID NO: 26561 - DNA, 3450 bp, Muscodor strobelii
  misc_feature: SGI cDNA ID NO. 569086
  misc_feature: Reduced expression when VOC is produced
  misc_feature: Encodes the peptide sequence at SEQ ID NO 26562
atgtcttctgctgcgttgcaatctgcaccgcaccagccaaacgccgtctctgccttgacaacacactcgccgtcggcatcgtcgaaccgccaatacaccccaactgattctccaaaccacgagggccgttatgctagcagagatcacccgactgcctcgcctgcgccctcttcgcgccgtccgtcgagaagaccaagtgcgaacagtgccaacgccacgatccccaactcggtttatcaagaaacgtcccattcatccccgatgacctcgcgcacagctttggcctcgccgcaacccgcggcaggctcgtcaaaagactatgaccagcaatcctcgagccgtcgaagacacgagccgccggtagcacctcctcggacctcgtcgacacagcagggaagctcaagctcagggggagccaactcgcgccgggccgcgcgagccgaggagcgtgctgcacagtctcccaggcgtactcccggagagagctcgagaagcggtgcaaacgggtactctgatgccgctccgtctcactacgacgagacaagcacgcggaccaaaagagccgcgtcccagcatgttgctcaagaaatggcacacgcggcgaacagcccccgcgaacaccggcagacgatgtcgacgactatgccggtgcggacccgagaacagcaaccgtcgacgtctaaacagccgtcaagggaggcaagcgaggttctcaaccgggtcatagtttctcagccagaggttgacttggaacgcgaacgggagagattaggggaagcgcaaccgaactcgtcgtcagcgcgtcaacccgcaacgaactacgacaatggcgatactgcagcacccccgccggtcattccgatgcacgaagcccaagatgagagccgccgaggcggtcgcagccggcacgatcattctaaacgagaaaagtcgacgaaatttggcgactactatctgggcaacaccattggagaaggcgaatttggcaaggtgaagctaggctggaaacaagacggaggtgttcaagtcgctatcaagctcattcgtcgcgacagcgttggcaacaatccctcgcgccttgccaagatctaccgtgaggtctcgattcttcgaggtctctcccacccaaacattgtccgactgcatgagatgtccgaaacagagcgtcacattggaatcgtcctcgagtatgcatcgggcggcgaactctttgactacattttgaaccatagatatctcaaagaccctgctgccaggagactttttgcgcaattgatatctggtgtaggatatttacataagaagggaattgtccacagagacttgaagctcgaaaatctgcttctggaccgcaaccgcaacatcatcatcaccgactttggattcgcaaacacatttgacgcgcatgacgagctgaccgaggaagacgagctcaaattgtccgatcgcgaatatgttaagcggaaaggtctagacaagacgaacgcagacggcatgcggaggggcgacctgatgcagacgagttgcggaagtccgtgctatgcggcgcctgaattggtcgtcagtgattccctctatacaggccgaaaagtcgacgtttggagttgtggagttatcctgtatgccatgcttgcgggatatctcccattcgacgatgaccccgacaatccggaaggcgataatatcaacctactgtacaagtacatcgttaacactcctctcacattccccgaatacgtaacgccacatgctcgagatctgctccgacgcattctagtcccaagcccacgaaagcgagcagacctgttcgaggtggcccgacatagctggcttagcgaatatgcccatgttgtagagtttattacaagcgctaccacgacctccagtgaaatacagaacaccaccgtaccttctgacgatgttgaagcagccggtttggccaggagcgcttccgttcgagagccggccaagacaaagacacctgtgtcaaccgcagttggtggcttggcaagtaagcaaggcaaactggacggcgacgaagcggcctacgcgaagcagcgaaaggacgacaagcggcgaaccgtacaggttgagtacgttgcgcctactacgcaaacccaaagagggcaagagccggaggctcatgcatcgccccgtggtaaggccagagcaagatcatccagcaggggcccgacggatggtcaaacctcttcacctcacgacaaacctttacctagagacccgccggtcacgaaagatgcatacactgcgtcgcctcgagaccctagaaagccacctagcgcgcatcggcgtgatgcacctcctccgagggcgaatcagcagcggcctacggatgcctatatgacgaccgctactggtgcatcagtatcacgacctgcaactggtggatcgatgcagtctgttgggtccaggggtctcaacccatcttcacgaacgtcgtacggccaacctataccccctaccattgccggtactaacgcgcgaggaagcattcaacaacccaaatcgaagaactacgttatatctaagcctatccctcaggagacgccggacatcggctatggacggcccagtactagtatcaacgtgcctcccaagtttgccgaggtatctggatacgggaacccagttcagaagccaccaggtgaggcgaagggccacagaagatccaacacccttggtgaaatcggaggcaagattttcggccgaagtggatctatctttggcggtcgtaagaaccgaccagagcaggctgagaaaccatctaagaagtacccccctatcagcatgtccaacacaatgcctggcgagtcaagaacgtctatggattcccgtgcgtcgcgcaggtcattttctctgggacttgggaagaagcgcagcggcagcatgactggatcgcaagcatcaaacgagaaaccacctaatcggcggcgcttctccctcatgaaagctatgggattgagcaaggagcctacgacgccgcctgccgacaactctcagccagacctgccgatccaggatcctccagagcccgaggcattcgaccagcgttacccgaatcagcctcagagccgtgggaatgctggccagccacaaaccgatggaatgtatgaactaccccaggaccgctcaagagccgcaccccaagcggggtacgattcgaactctgcccatcgacgatacccgtctcaggcttctgctattccgtcatacttacagcaaggagcagtcctaaactcagattccgaaacccgccagaccggaactggacaaggacagcgcgtgctccaaaagaataagagattcgtggatgcgtacgacgaagaagagtatgggagaccacgcgaccatgctgggagcagcggcgcggcaaaacgagtcatggatttcttccgacggagagggcgagctcgtggtggtgagatctag

SEQ ID NO: 26562 - protein, 1149 aa, Muscodor strobelii
  misc_feature: SGI Peptide ID NO. 569086
  misc_feature (317)..(611): Pfam Id: PF00069 Pfam Desc: Protein kinase domain
  misc_feature (317)..(611): Pfam Id: PF07714 Pfam Desc: Protein tyrosine kinase
  misc_feature (317)..(461): Pfam Id: PF07714 Pfam Desc: Protein tyrosine kinase
  misc_feature (3)..(1149): NCBI GI: 171694910 Blast Desc: protein product [Podospora anserina] gi|170947697|emb|CAP59859.1| protein product [Podospora anserina]
  misc_feature (3)..(1148): NCBI GI: 116182618 Blast Desc: CHGG_01937 [Chaetomium globosum CBS 148.51] gi|88186234|gb|EAQ93702.1| CHGG_01937 [Chaetomium globosum CBS 148.51]
  misc_feature (88)..(1148): NCBI GI: 145614018 Blast Desc: MGG_01196 [Magnaporthe grisea 70-15] gi|145021007|gb|EDK05136.1| MGG_01196 [Magnaporthe grisea 70-15]
  misc_feature (3)..(1148): NCBI GI: 85114710 Blast Desc: NCU00914 [Neurospora crassa OR74A] gi|28926533|gb|EAA35504.1| NCU00914 [Neurospora crassa OR74A] gi|38636452|emb|CAE81987.1| related to ser/thr protein kinase
  misc_feature (1)..(1148): NCBI GI: 256735468 Blast Desc: NECHADRAFT_31235 [Nectria haematococca mpVI 77-13-4]
  misc_feature (1)..(1146): NCBI GI: 46107632 Blast Desc: FG00699.1 [Gibberella zeae PH-1]
  misc_feature (1)..(1146): NCBI GI: 154295292 Blast Desc: BC1G_13227 [Botryotinia fuckeliana B05.10] gi|150844094|gb|EDN19287.1| BC1G_13227 [Botryotinia fuckeliana B05.10]
  misc_feature (342)..(1148): NCBI GI: 261358820 Blast Desc: serine/threonine-protein kinase KIN4 [Verticillium albo-atrum VaMs.102]
  misc_feature (191)..(1146): NCBI GI: 156040633 Blast Desc: SS1G_12333 [Sclerotinia sclerotiorum 1980] gi|154696389|gb|EDN96127.1| SS1G_12333 [Sclerotinia sclerotiorum 1980]
  misc_feature (1)..(1148): NCBI GI: 119494956 Blast Desc: serine/threonine protein kinase (Kin4), [Neosartorya fischeri NRRL 181] gi|119412438|gb|EAW22379.1| serine/threonine protein kinase (Kin4), [Neosartorya fischeri NRRL 181]
  misc_feature: Useful for introducing or modulating the production of volatile compounds
MSSAALQSAPHQPNAVSALTTHSPSASSNRQYTPTDSPNHEGRYASRDHPTASPAPSSRRPSRRPSANSANATIPNSVYQETSHSSPMTSRTALASPQPAAGSSKDYDQQSSSRRRHEPPVAPPRTSSTQQGSSSSGGANSRRAARAEERAAQSPRRTPGESSRSGANGYSDAAPSHYDETSTRTKRAASQHVAQEMAHAANSPREHRQTMSTTMPVRTREQQPSTSKQPSREASEVLNRVIVSQPEVDLERERERLGEAQPNSSSARQPATNYDNGDTAAPPPVIPMHEAQDESRRGGRSRHDHSKREKSTKFGDYYLGNTIGEGEFGKVKLGWKQDGGVQVAIKLIRRDSVGNNPSRLAKIYREVSILRGLSHPNIVRLHEMSETERHIGIVLEYASGGELFDYILNHRYLKDPAARRLFAQLISGVGYLHKKGIVHRDLKLENLLLDRNRNIIITDFGFANTFDAHDELTEEDELKLSDREYVKRKGLDKTNADGMRRGDLMQTSCGSPCYAAPELVVSDSLYTGRKVDVWSCGVILYAMLAGYLPFDDDPDNPEGDNINLLYKYIVNTPLTFPEYVTPHARDLLRRILVPSPRKRADLFEVARHSWLSEYAHVVEFITSATTTSSEIQNTTVPSDDVEAAGLARSASVREPAKTKTPVSTAVGGLASKQGKLDGDEAAYAKQRKDDKRRTVQVEYVAPTTQTQRGQEPEAHASPRGKARARSSSRGPTDGQTSSPHDKPLPRDPPVTKDAYTASPRDPRKPPSAHRRDAPPPRANQQRPTDAYMTTATGASVSRPATGGSMQSVGSRGLNPSSRTSYGQPIPPTIAGTNARGSIQQPKSKNYVISKPIPQETPDIGYGRPSTSINVPPKFAEVSGYGNPVQKPPGEAKGHRRSNTLGEIGGKIFGRSGSIFGGRKNRPEQAEKPSKKYPPISMSNTMPGESRTSMDSRASRRSFSLGLGKKRSGSMTGSQASNEKPPNRRRFSLMKAMGLSKEPTTPPADNSQPDLPIQDPPEPEAFDQRYPNQPQSRGNAGQPQTDGMYELPQDRSRAAPQAGYDSNSAHRRYPSQASAIPSYLQQGAVLNSDSETRQTGTGQGQRVLQKNKRFVDAYDEEEYGRPRDHAGSSGAAKRVMDFFRRRGRARGGEI

SEQ ID NO: 26563 - DNA, 5485 bp, Muscodor strobelii
  misc_feature: SGI EST ID NO. CUFF.62935.1
  misc_feature: Variant of the nucleotide sequence at SEQ ID NO 26561
ggagttttcaatgctctacgctgcacatacgcgagacccgctgaaagaagatacatggtctaaagtgtgcatttgtgctgcaaactaagtactccctgcttccgacccattttcctttgcgcctttgcgaccagcggaaattggaggtagagggtgcgaacagtagtggtggcagtaggtacctaagatatcacgctctgctccttcccttcctcccttactcttgcgtctgtcttccttcaccacgacgcgccagcgacttctctctggattgggaccgtgagctgggaattgagactgtggttgctcacctcgtcgggtctgtctgtctgtctgtctgccacgaagtgttgagattaaattggacatcgcgtctgcatatgcaactcgcctttgcccaggctccgcatgcatcatttcgacccctattaaggcccgcgagcaatagagcaataacactgcaacgcctcaccagagtaatctgcccgcgccgctaggacgaccgccctcccatccgatacacccccaacgacaaatcacctctgcacccgacctgcgcaggtcagacggcatcttcgaagtgcacggagtagtaatactgacctaataacaaaataacacaacacttcctggcggtgttatcagcttgtggcacgccaggcagctgtatttatcctgcatcccctactcgaaataataagcccgtactatacccgcagggtcttacgatatcgcataaacaagccaagctgtggtatatttcgttaggtatccgaagtcataggccacggtgcgctgaccgctgcgagcgcgactcgcaatttctcgctgcgacctgtcagcctaataataatcgactgtcggacaacagaccaagcgtcaagtgctggccagcaatccgcgtgcacgcacagaggccatctcaaacgacagcgagcgggtgcgagcgacgtaacgccaactaataattgcccgataacgaatttctaacagggcggcgggctcattggaggatcaaactgttagaccgctcttggattcccattgtgctattgacccggcgcgcgtcactcagctctgcggcccatctcaccgaccaacacatcttgtttttgtcttggttcgtacacgctatctcgacctgcccagcctgtaaatcaccacgcagccgacgcaccctctccagcctcgcatcggtcttgtaacttgtcgccgatccagtctaaacggtcgtcattttaatattatcgaacgccaaaacgtaaagagacctgtaattttgtgcacacgcttatctcgctggtagatagcagcattgcattcgcatccagaccatatctctacgcgtcttgcgtagaagatgtcttctgctgcgttgcaatctgcaccgcaccagccaaacgccgtctctgccttgacaacacactcgccgtcggcatcgtcgaaccgccaatacaccccaactgattctccaaaccacgagggccgttatgctagcagagatcacccgactgcctcgcctgcgccctcttcgcgccgtccgtcgagaagaccaagtgcgaacagtgccaacgccacgatccccaactcggtttatcaagaaacgtcccattcatccccgatgacctcgcgcacagctttggcctcgccgcaacccgcggcaggctcgtcaaaagactatgaccagcaatcctcgagccgtcgaagacacgagccgccggtagcacctcctcggacctcgtcgacacagcagggaagctcaagctcagggggagccaactcgcgccgggccgcgcgagccgaggagcgtgctgcacagtctcccaggcgtactcccggagagagctcgagaagcggtgcaaacgggtactctgatgccgctccgtctcactacgacgagacaagcacgcggaccaaaagagccgcgtcccagcatgttgctcaagaaatggcacacgcggcgaacagcccccgcgaacaccggcagacgatgtcgacgactatgccggtgcggacccgagaacagcaaccgtcgacgtctaaacagccgtcaagggaggcaagcgaggttctcaaccgggtcatagtttctcagccagaggttgacttggaacgcgaacgggagagattaggggaagcgcaaccgaactcgtcgtcagcgcgtcaacccgcaacgaactacgacaatggcgatactgcagcacccccgccggtcattccgatgcacgaagcccaagatgagagccgccgaggcggtcgcagccggcacgatcattctaaacgagaaaagtcgacgaaatttggcgactactatctgggcaacaccattggagaaggcgaatttggcaaggtgaagctaggctggaaacaagacggaggtgttcaagtcgctatcaagctcattcgtcgcgacagcgttggcaacaatccctcgcgccttgccaagatctaccgtgaggtctcgattcttcgaggtctctcccacccaaacattgtccgactgcatgagatgtccgaaacagagcgtcacattggaatcgtcctcgagtatgcatcgggcggcgaactctttgactacattttgaaccatagatatctcaaagaccctgctgccaggagactttttgcgcaattgatatctggtgtaggatatttacataagaagggaattgtccacagagacttgaagctcgaaaatctgcttctggaccgcaaccgcaacatcatcatcaccgactttggattcgcaaacacatttgacgcgcatgacgagctgaccgaggaagacgagctcaaattgtccgatcgcgaatatgttaagcggaaaggtctagacaagacgaacgcagacggcatgcggaggggcgacctgatgcagacgagttgcggaagtccgtgctatgcggcgcctgaattggtcgtcagtgattccctctatacaggccgaaaagtcgacgtttggagttgtggagttatcctgtatgccatgcttgcgggatatctcccattcgacgatgaccccgacaatccggaaggcgataatatcaacctactgtacaagtacatcgttaacactcctctcacattccccgaatacgtaacgccacatgctcgagatctgctccgacgcattctagtcccaagcccacgaaagcgagcagacctgttcgaggtggcccgacatagctggcttagcgaatatgcccatgttgtagagtttattacaagcgctaccacgacctccagtgaaatacagaacaccaccgtaccttctgacgatgttgaagcagccggtttggccaggagcgcttccgttcgagagccggccaagacaaagacacctgtgtcaaccgcagttggtggcttggcaagtaagcaaggcaaactggacggcgacgaagcggcctacgcgaagcagcgaaaggacgacaagcggcgaaccgtacaggttgagtacgttgcgcctactacgcaaacccaaagagggcaagagccggaggctcatgcatcgccccgtggtaaggccagagcaagatcatccagcaggggcccgacggatggtcaaacctcttcacctcacgacaaacctttacctagagacccgccggtcacgaaagatgcatacactgcgtcgcctcgagaccctagaaagccacctagcgcgcatcggcgtgatgcacctcctccgagggcgaatcagcagcggcctacggatgcctatatgacgaccgctactggtgcatcagtatcacgacctgcaactggtggatcgatgcagtctgttgggtccaggggtctcaacccatcttcacgaacgtccattcaacaacccaaatcgaagaactacgttatatctaagcctatccctcaggagacgccggacatcggctatggacggcccagtactagtatcaacgtgcctcccaagtttgccgaggtatctggatacgggaacccagttcagaagccaccaggtgaggcgaagggccacagaagatccaacacccttggtgaaatcggaggcaagattttcggccgaagtggatctatctttggcggtcgtaagaaccgaccagagcaggctgagaaaccatctaagaagtacccccctatcagcatgtccaacacaatgcctggcgagtcaagaacgtctatggattcccgtgcgtcgcgcaggtcattttctctgggacttgggaagaagcgcagcggcagcatgactggatcgcaagcatcaaacgagaaaccacctaatcggcggcgcttctccctcatgaaagctatgggattgagcaaggagcctacgacgccgcctgccgacaactctcagccagacctgccgatccaggatcctccagagcccgaggcattcgaccagcgttacccgaatcagcctcagagccgtgggaatgctggccagccacaaaccgatggaattcctaaactcagattccgaaacgtccgttgatcggccacaacggcggccacccaattcggcccccctatcagacgggatatgattcggatcactatgacagccgccagaccggaactggacaaggacagcgcgtgctccaaaagaataagagattcgtggatgcgtacgacgaagaagagtatgggagaccacgcgaccatgctgggagcagcggcgcggcaaaacgagtcatggatttcttccgacggagagggcgagctcgtggtggtgagatctaggcaagcgagcttaacgacgatcttgcccgttctgatgaggagcatcccttgatctgcaaagtctcaccatcaccagccgtgagaaggctccgatatccaagcccgaaactttgcggcccagtgggttgtctgacttctttttgacccaacccaaccctttttgtcagtgtctcattatccgagttcgcacgctggaatattgtgacgaacatgacttacgccgagcggatgatgaactggcacctaattttacgaacgacgcgatgcaactactgtgaatgaatcgaaagctataatcgtcattttctatttatggatgggcatttggcatgggagtttgagggcggtctagaatggcaacttgtgttcctttcggggaggtaccttgtctcattctggacttttattgtttgtttccttgaatcacctaatttcctcgacttgttagccgtatcacttcaggaaccatctcgacaccatcaccatcccgacaccatcaccatcctgacaccaccaccattcgaattctggtttgagacgagacggagacatgcagatccgatgtttgaaagatgtggcaataagacgttgtggaggaggctgtggagtggaaggaaggaagaaagagagacgacatgatacattagtaggcgtctactgttaaatagataccgctgtaccaaatgagcataataatatacccatagaaagatgttgatattgacttttagttctttactcgtgtgagtctctcgtaatgaaacatttg

SEQ ID NO: 26564 - DNA, 1443 bp, Muscodor strobelii
  misc_feature: SGI cDNA ID NO. 569087
  misc_feature: Reduced expression when VOC is produced
  misc_feature: Encodes the peptide sequence at SEQ ID NO 26565
atggcttctctcaccaacggcgtaactgcctccgccgactggacgcccgcttcgtggcgatccaagcccatcaagcaatgccccgagtatcccgatgagtccgcattgcgcaaagccaccgctgagctcggctgtctcccgcccattgtgcacccccatgagatcgagacactgaagcagaatttgcgcgatgttgctcaaggcaaagccttcctcctccagggcggcgactgcgctgagctcttcgactactgccgtcaagatgctatcgagtccaagataaagcttctgcttcagatgagtttggttctcatctggggtgctgacaagcgcgttgtacgcattggccgtatggccggacagtatgcaaagcctcgctcgagcccgactgaaatcgttgatggcaaggaggtgccttctttccgtggtgatatcctcaatggctatcatcttgaggaccgtcaattggacccgcagagacttgttaaggcctacaatcattcagctgcgacgctgaattatatgcgtgcctccatctcggctggcattgcagatcttcatcggccactaaactggtctttgggacacgtcaaggatgcgcaactcaaagccaagtatgaagctgctgtccacttccttcaggatatgattcgcttcatgcacaccattggcgctgatcagaactctaaactccacaccgtcgatctttttactagtcacgaaggtcttctactggaatacgaggagtctctgacccgtctgttggacgttcctcactctgcagctgtggtgaatacggactcatctacgaacgtagcaagtacggctacagagcctcaaaagaagtactacgacacgtcagctcatttcatctggattggagatcgtacacgccagatcgaccatgcgcatgtcgaattcttcagaggtattgccaatccaatcggcatcaaagtcggccctacgacacccacgaccgaccttctggagctcctccggactttgaacccatcccgcgaggttggcaagatcactctaatcacacgatatggtgcttcgaaagtcaaggagttgctggctgggcacattcgcgccgttgaaggcagcgaatacaggggttgtgtcatctggcagtgcgaccctatgcatggcaatacgcgatccacaggttcaggcatcaagacacgacgattcgacgatgtattctcggaacttcaagagacacttcgcatccataaggaagagggaagctatcttggtggtgtccatctggagctcaccggcgacgccgttaccgagtgcctgggaggtagcgagggactcgacgaggacgacttgtcgacgaactacaccagcttctgcgacccgcgtctgaatgagcgacaggcgctcgagctaacttttctgattgctgactcatatcgcaaggagcgagctttatga

SEQ ID NO: 26565 - protein, 480 aa, Muscodor strobelii
  misc_feature: SGI Peptide ID NO. 569087
  misc_feature (13)..(471): Pfam Id: PF01474 Pfam Desc: Class-II DAHP synthetase family
  misc_feature (274)..(471): Pfam Id: PF01474 Pfam Desc: Class-II DAHP synthetase family
  misc_feature (13)..(254): Pfam Id: PF01474 Pfam Desc: Class-II DAHP synthetase family
  misc_feature (9)..(478): NCBI GI: 171695254 Blast Desc: protein product [Podospora anserina] gi|170947869|emb|CAP60033.1| protein product [Podospora anserina]
  misc_feature (1)..(478): NCBI GI: 116182292 Blast Desc: CHGG_01774 [Chaetomium globosum CBS 148.51] gi|88186071|gb|EAQ93539.1| CHGG_01774 [Chaetomium globosum CBS 148.51]
  misc_feature (10)..(478): NCBI GI: 256730576 Blast Desc: [Nectria haematococca mpVI 77-13-4]
  misc_feature (14)..(478): NCBI GI: 39946608 Blast Desc: MGG_08596 [Magnaporthe grisea 70-15] gi|145012458|gb|EDJ97114.1| MGG_08596 [Magnaporthe grisea 70-15]
  misc_feature (14)..(478): NCBI GI: 85111448 Blast Desc: NCU02785 [Neurospora crassa OR74A] gi|51704305|sp|P80576.2|AROF_NEUCR RecName: Full=Phospho-2-dehydro-3-deoxyheptonate aldolase; AltName: crassa
  misc_feature (20)..(480): NCBI GI: 46109208 Blast Desc: FG01486.1 [Gibberella zeae PH-1]
  misc_feature (14)..(476): NCBI GI: 156056731 Blast Desc: SS1G_04096 [Sclerotinia sclerotiorum 1980] gi|154701882|gb|EDO01621.1| SS1G_04096 [Sclerotinia sclerotiorum 1980]
  misc_feature (14)..(476): NCBI GI: 154323814 Blast Desc: phospho-2-dehydro-3-deoxyheptonate aldolase [Botryotinia fuckeliana B05.10] gi|150842535|gb|EDN17728.1| phospho-2-dehydro-3-deoxyheptonate aldolase [Botryotinia B05.10]
  misc_feature (4)..(480): NCBI GI: 189202258 Blast Desc: phospho-2-dehydro-3-deoxyheptonate aldolase [Pyrenophora tritici-repentis Pt-1C-BFP] gi|187984564|gb|EDU50052.1| phospho-2-dehydro-3-deoxyheptonate
  misc_feature (4)..(480): NCBI GI: 169596336 Blast Desc: SNOG_00926 [Phaeosphaeria nodorum SN15] gi|160701285|gb|EAT92421.2| SNOG_00926 [Phaeosphaeria nodorum SN15]
  misc_feature (14)..(478): SWISSPROT Homolog: EC 2.5.1.54 3-deoxy-7-phosphoheptulonate synthase
  misc_feature: Useful for introducing or modulating the production of volatile compounds
MASLTNGVTASADWTPASWRSKPIKQCPEYPDESALRKATAELGCLPPIVHPHEIETLKQNLRDVAQGKAFLLQGGDCAELFDYCRQDAIESKIKLLLQMSLVLIWGADKRVVRIGRMAGQYAKPRSSPTEIVDGKEVPSFRGDILNGYHLEDRQLDPQRLVKAYNHSAATLNYMRASISAGIADLHRPLNWSLGHVKDAQLKAKYEAAVHFLQDMIRFMHTIGADQNSKLHTVDLFTSHEGLLLEYEESLTRLLDVPHSAAVVNTDSSTNVASTATEPQKKYYDTSAHFIWIGDRTRQIDHAHVEFFRGIANPIGIKVGPTTPTTDLLELLRTLNPSREVGKITLITRYGASKVKELLAGHIRAVEGSEYRGCVIWQCDPMHGNTRSTGSGIKTRRFDDVFSELQETLRIHKEEGSYLGGVHLELTGDAVTECLGGSEGLDEDDLSTNYTSFCDPRLNERQALELTFLIADSYRKERAL

SEQ ID NO: 26566 - DNA, 3799 bp, Muscodor strobelii
  misc_feature: SGI EST ID NO. CUFF.62927.1
  misc_feature: Variant of the nucleotide sequence at SEQ ID NO 26564
gtcacatcttaaagcccctttggtatggaaactagacgaaactcgaaagaagcggagtaaccaggacagttgtacaaagacataactacggtgggggattcgaaccccctgggtctttgtcacggaagcgactcagcccgctaggccagatggcccgtttgtgttgaatagctacttgccaattcaatttataaacatgcggcacctgcagagatacagatttatggtgcttcagtccttatccgaaatacgtacgaaatgcgcgcgcattccaacctcctctcgcattcaatgggtgactatacagtagggcagttagcgctaaataattgagacgcctagagacacagatatcattacaatctggtatataatatagggacacgttatttgaacgagacatgcgtcctcggcggaaatggaacgcgtccattctgccccacacatattcttataagaagcgctgcagacagtcatttgacaagaaggtatcaaacaggctgcaacggttgtgctcaaagccactagggtagcttcctctacggtgatacgaatttgatacccgtcatcttccgtctatatgtgggattctcgatgccgaaaagtgggagaacatcaagccagatgatattcttcgtcatatccttcagctatgccgtgaaagtcgtgcaatcgtatcctcttctctcatcctctaaagccgatcttttaaacgccgtgtatgcatatgtgacgcctgtgatattctctttgtatttcataccgcgatgaaagccctcatagcacggaccgcgtcaccatcgtgggatttcagcaattcggtggctttcgctttagtcaggtcgagctcgtcaacctagacaatagccagcgtcagcacatacgcaacgtcccagctactatctcccaatctcactgtatgcttccccagatttccacttgataacacgaggagacttacgagcaatgtgacgtcggcagcatcgaccttgaccttcttgacctccttcttggcagcagtggaagagccgaggttcttcatagccttgctgacggcgttagcgtcgacttcggcctgggctccgtcgccctgtgagtcgagactcgcgagggcggcggcggcttttctgtcctctgcagacttggcctgtgtctcctggacctcgtcttccacgtcaccgccagtcgcgccctcgtggaccgacttgggctgcggctcggccatctgcgcacttgtccgttgcgaaagaatcagggggttggagtgtatgcggcggcgcgacggatagcagcgtgttgagagggctaggtggttgacagctatgtcaggtatcgcttggttggcgcaatcgtaaaatgtttggtggtgtacctagggaatcctcctcgggtgcagaaacgggtggttaccggtagcggggcagctccctagcttttggtggggcctttgtccaatccactgagctccgcggaattgagcacccaaattgacgaatggtggggttcagttcaaacatgtagctgtgaataacaccagtgctactgcatcaagccgaataaaacatcagatggatgagctgctccatgccgcatacatgcatcgcatataataatctggcttcattttctctactataagattactcagcctcacaaaagtcgccaggggtgtctatacttcacgccgatcaaggagttcaatcaaatctttgtaggtactatataagatactaattgttcgtttgactcattttagtcccaactcctatgacggaatcgggcttatacgcactgagacttgaaacaaccttctgcgccaacatctgtaacagcttccggacattgcggtaaatattctgcactctctgcaggaagctgatcaggacaactggtggcatggcttctctcaccaacggcgtaactgcctccgccgactggacgcccgcttcgtggcgatccaagcccatcaagcaatgccccgagtatcccgatgagtccgcattgcgcaaagccaccgctgagctcggctgtctcccgcccattgtgcacccccatgagatcgagacactgaagcagaatttgcgcgatgttgctcaaggcaaagccttcctcctccagggcggcgactgcgctgagctcttcgactactgccgtcaagatgctatcgagtccaagataaagcttctgcttcagatgagtttggttctcatctggggtgctgacaagcgcgttgtacgcattggccgtatggccggacagtatgcaaagcctcgctcgagcccgactgaaatcgttgatggcaaggaggtgccttctttccgtggtgatatcctcaatggctatcatcttgaggaccgtcaattggacccgcagagacttgttaaggcctacaatcattcagctgcgacgctgaattatatgcgtgcctccatctcggctggcattgcagatcttcatcggccactaaactggtctttgggacacgtcaaggatgcgcaactcaaagccaagtatgaagctgctgtccacttccttcaggatatgattcgcttcatgcacaccattggcgctgatcagaactctaaactccacaccgtcgatctttttactagtcacgaaggtcttctactggaatacgaggagtctctgacccgtctgttggacgttcctcactctgcagctgtggtgaatacggactcatctacgaacgtagcaagtacggctacagagcctcaaaagaagtactacgacacgtcagctcatttcatctggattggagatcgtacacgccagatcgaccatgcgcatgtcgaattcttcagaggtattgccaatccaatcggcatcaaagtcggccctacgacacccacgaccgaccttctggagctcctccggactttgaacccatcccgcgaggttggcaagatcactctaatcacacgatatggtgcttcgaaagtcaaggagttgctggctgggcacattcgcgccgttgaaggcagcgaatacaggggttgtgtcatctggcagtgcgaccctatgcatggcaatacgcgatccacaggttcaggcatcaagacacgacgattcgacgatgtattctcggaacttcaagagacacttcgcatccataaggaagagggaagctatcttggtggtgtccatctggagctcaccggcgacgccgttaccgagtgcctgggaggtagcgagggactcgacgaggacgacttgtcgacgaactacaccagcttctgcgacccgcgtctgaatgagcgacaggcgctcgagctaacttttctgattgctgactcatatcgcaaggagcgagctttatgaagtgtacctcgatctttggctatatttgagtttatttccttggtgcccaaacgaacggtacaaataacaactggaacttcaacagtagataaaatcatggcatgcaaacaatacatgtcactgcatgctctttaggcgttatggcatgatttatagcatgagatggaaaaaagtggttggggagtgaccggaattggataaaatcggcgtcgcatgtgtaagaggagaatattgacaatggagacatgaagttgagaccaaaccagaaaaggggtcatggatatcacgatgcaatatcagaacatgaaggccaaggtacgaaggaaagaaacagaaagtagaggagcaattgaaaatgtccagactctgtgtatgtatcatagcgctacatttcaccaaatatgcctgcctaaagtggccgtcgagccagaacttctagaattgaacaaagctgtctgaa

SEQ ID NO: 26567 - DNA, 363 bp, Muscodor strobelii
  misc_feature: SGI cDNA ID NO. 569088
  misc_feature: Reduced expression when VOC is produced
  misc_feature: Encodes the peptide sequence at SEQ ID NO 26568
atggccgagccgcagcccaagtcggtccacgagggcgcgactggcggtgacgtggaagacgaggtccaggagacacaggccaagtctgcagaggacagaaaagccgccgccgccctcgcgagtctcgactcacagggcgacggagcccaggccgaagtcgacgctaacgccgtcagcaaggctatgaagaacctcggctcttccactgctgccaagaaggaggtcaagaaggtcaaggtcgatgctgccgacgtcacattgctcgttgacgagctcgacctgactaaagcgaaagccaccgaattgctgaaatcccacgatggtgacgcggtccgtgctatgagggctttcatcgcggtatga

SEQ ID NO: 26568 - protein, 120 aa, Muscodor strobelii
  misc_feature: SGI Peptide ID NO. 569088
  misc_feature (1)..(119): NCBI GI: 85111446 Blast Desc: NCU02784 [Neurospora crassa OR74A] gi|28925692|gb|EAA34704.1| [Neurospora crassa OR74A]
  misc_feature (1)..(120): NCBI GI: 261358642 Blast Desc: conserved [Verticillium albo-atrum VaMs.102]
  misc_feature (1)..(118): NCBI GI: 171695252 Blast Desc: protein product [Podospora anserina] gi|170947868|emb|CAP60032.1| protein product [Podospora anserina]
  misc_feature (1)..(118): NCBI GI: 189202256 Blast Desc: conserved [Pyrenophora tritici-repentis Pt-1C-BFP] gi|187984563|gb|EDU50051.1| conserved [Pyrenophora tritici-repentis Pt-1C-BFP]
  misc_feature (20)..(118): NCBI GI: 256730790 Blast Desc: [Nectria haematococca mpVI 77-13-4]
  misc_feature (20)..(118): NCBI GI: 46109210 Blast Desc: FG01487.1 [Gibberella zeae PH-1]
  misc_feature (1)..(118): NCBI GI: 156056733 Blast Desc: [Sclerotinia sclerotiorum 1980] gi|154701883|gb|EDO01622.1| [Sclerotinia sclerotiorum 1980]
  misc_feature (1)..(118): NCBI GI: 154323812 Blast Desc: [Botryotinia fuckeliana B05.10] gi|150842534|gb|EDN17727.1| [Botryotinia fuckeliana B05.10]
  misc_feature (5)..(120): NCBI GI: 145604464 Blast Desc: [Magnaporthe grisea 70-15] gi|145012457|gb|EDJ97113.1| [Magnaporthe grisea 70-15]
  misc_feature (19)..(119): NCBI GI: 255942735 Blast Desc: Pc18g02950 [Penicillium chrysogenum Wisconsin 54-1255] gi|211586869|emb|CAP94519.1| Pc18g02950 [Penicillium chrysogenum Wisconsin 54-1255]
  misc_feature: Useful for introducing or modulating the production of volatile compounds
MAEPQPKSVHEGATGGDVEDEVQETQAKSAEDRKAAAALASLDSQGDGAQAEVDANAVSKAMKNLGSSTAAKKEVKKVKVDAADVTLLVDELDLTKAKATELLKSHDGDAVRAMRAFIAV

SEQ ID NO: 26569 - DNA, 3752 bp, Muscodor strobelii
  misc_feature: SGI EST ID NO. CUFF.62926.0
  misc_feature: Variant of the nucleotide sequence at SEQ ID NO 26567
ttcagacagctttgttcaattctagaagttctggctcgacggccactttaggcaggcatatttggtgaaatgtagcgctatgatacatacacagagtctggacattttcaattgctcctctactttctgtttctttccttcgtaccttggccttcatgttctgatattgcatcgtgatatccatgaccccttttctggtttggtctcaacttcatgtctccattgtcaatattctcctcttacacatgcgacgccgattttatccaattccggtcactccccaaccacttttttccatctcatgctataaatcatgccataacgcctaaagagcatgcagtgacatgtattgtttgcatgccatgattttatctactgttgaagttccagttgttatttgtaccgttcgtttgggcaccaaggaaataaactcaaatatagccaaagatcgaggtacacttcataaagctcgctccttgcgatatgagtcagcaatcagaaaagttagctcgagcgcctgtcgctcattcagacgcgggtcgcagaagctggtgtagttcgtcgacaagtcgtcctcgtcgagtccctcgctacctcccaggcactcggtaacggcgtcgccggtgagctccagatggacaccaccaagatagcttccctcttccttatggatgcgaagtgtctcttgaagttccgagaatacatcgtcgaatcgtcgtgtcttgatgcctgaacctgtggatcgcgtattgccatgcatagggtcgcactgccagatgacacaacccctgtattcgctgccttcaacggcgcgaatgtgcccagccagcaactccttgactttcgaagcaccatatcgtgtgattagagtgatcttgccaacctcgcgggatgggttcaaagtccggaggagctccagaaggtcggtcgtgggtgtcgtagggccgactttgatgccgattggattggcaatacctctgaagaattcgacatgcgcatggtcgatctggcgtgtacgatctccaatccagatgaaatgagctgacgtgtcgtagtacttcttttgaggctctgtagccgtacttgctacgttcgtagatgagtccgtattcaccacagctgcagagtgaggaacgtccaacagacgggtcagagactcctcgtattccagtagaagaccttcgtgactagtaaaaagatcgacggtgtggagtttagagttctgatcagcgccaatggtgtgcatgaagcgaatcatatcctgaaggaagtggacagcagcttcatacttggctttgagttgcgcatccttgacgtgtcccaaagaccagtttagtggccgatgaagatctgcaatgccagccgagatggaggcacgcatataattcagcgtcgcagctgaatgattgtaggccctgtccatgtccatgtaagtgattgccatgttaagacaaaaaggatgagacgactcacttaacaagtctctgcgggtccaattgacggtcctcaagatgatagccattgaggatatcaccacggaaagaaggcacctccttgccatcaacgatttcagtcgggctcgagcgaggctttgcatactgtccggccatacggccaatgcgtacaacgcgcttgtcagcaccccagatgagaaccaaactcatctgaagcagaagctttatcttggactcgatagcatcttgacggcagtagtcgaagagctcagcgcagtcgccgccctggaggaggaaggctttgccttgagcaacatcgcgcaaattctgcttcagtgtctcgatctcatgggggtgcacaatgggcgggagacagccgagctcagcggtggctttgcgcaatgcggactcatcgggatactcggggcattgcttgatgggcttggatcgccacgaagcgggcgtccagtcggcggaggcagttacgccgttggtgagagaagccatgccaccagttgtcctgatcagcttcctgcagagagtgcagaatatttaccgcaatgtccggaagctgttacagatgttggcgcagaaggttgtttcaagtctcagtgcgtataagcccgattccgtcataggagttgggactaaaatgagtcaaacgaacaattagtatcttatatagtacctacaaagatttgattgaactccttgatcggcgtgaagtatagacacccctggcgacttttgtgaggctgagtaatcttatagtagagaaaatgaagccagattattatatgcgatgcatgtatgcggcatggagcagctcatccatctgatgttttattcggcttgatgcagtagcactggtgttattcacagctacatgtttgaactgaaccccaccattcgtcaatttgggtgctcaattccgcggagctcagtggattggacaaaggccccaccaaaagctagggagctgccccgctaccggtaaccacccgtttctgcacccgaggaggattccctaggtacaccaccaaacattttacgattgcgccaaccaagcgatacctgacatagctgtcaaccacctagccctctcaacacgctgctatccgtcgcgccgccgcatacactccaaccccctgattctttcgcaacggacaagtgcgcagatggccgagccgcagcccaagtcggtccacgagggcgcgactggcggtgacgtggaagacgaggtccaggagacacaggccaagtctgcagaggacagaaaagccgccgccgccctcgcgagtctcgactcacagggcgacggagcccaggccgaagtcgacgctaacgccgtcagcaaggctatgaagaacctcggctcttccactgctgccaagaaggaggtcaagaaggtcaaggtcgatgctgccgacgtcacattgctcgttgacgagctcgacctgactaaagcgaaagccaccgaattgctgaaatcccacgatggtgacgcggtccgtgctatgagggctttcatcgcggtatgaaatacaaagagaatatcacaggcgtcacatatgcatacacggcgtttaaaagatcggctttagaggatgagagaagaggatacgattgcacgactttcacggcatagctgaaggatatgacgaagaatatcatctggcttgatgttctcccacttttcggcatcgagaatcccacatatagacggaagatgacgggtatcaaattcgtatcaccgtagaggaagctaccctagtggctttgagcacaaccgttgcagcctgtttgataccttcttgtcaaatgactgtctgcagcgcttcttataagaatatgtgtggggcagaatggacgcgttccatttccgccgaggacgcatgtctcgttcaaataacgtgtccctatattatataccagattgtaatgatatctgtgtctctaggcgtctcaattatttagcgctaactgccctactgtatagtcacccattgaatgcgagaggaggttggaatgcgcgcgcatttcgtacgtatttcggataaggactgaagcaccataaatctgtatctctgcaggtgccgcatgtttataaattgaattggcaagtagctattcaacacaaacgggccatctggcctagcgggctgagtcgcttccgtgacaaagacccagggggttcgaatcccccaccgtagttatgtctttgtacaactgtcctggttactccgcttctttcgagtttcgtctagtttccataccaaaggggctttaagatgtgac

SEQ ID NO: 26570 - DNA, 1389 bp, Muscodor strobelii
  misc_feature: SGI cDNA ID NO. 569089
  misc_feature: Encodes the peptide sequence at SEQ ID NO 26571
atgagtactacgaagacgacttgggtcaccgagactcttcacggggccatcgtgcccagtggcgagatcacgacaggtgataacgtcaaacttgatgtgaaaggactgcgagcagccatcccagcacattgcctcaagccttcgactctccgctctttcttcttcgtcttccgcgacctagctttctacgttacctttctctatgcggccttgtatgttgagaagacgaccggcaactatgtagtcagcttcctaaaccgctttatcgtgtttccctatgctgctggcattgctctgaccggactttgggtgctcggtcatgaggcaggtcatggtgccttctcgacgaaccagaagctagctaacatagtcgggttcctcatccactcggcgttgatgtcgccatacttcgcctggcgctccagccatggtcgtcatcaccagtacgccaacaacgtttccatcgacctaaactatgttccgccctcgcgtgaggagtatcgcaccatgtttggaaataggagcaagcgcggccagggatctcttaagaagaagttcgaggccgagggcaaagaaaccggtatgcatgaagacgatgtattcgaagatgctcctttcgttgtgttattgcgcatcatcctgcaacaggtcatcggctggtattggtatctgctcacccacatcactgccggcccagattcgtcccccaagaaaagtcgcggctggtgggacaatagccattttctccctaacagcgacatgtcactcttccgcgatgacgaattctggaacattttgctttccgacattggccttatcggtatggtgggcgtcgtctatgcagccggaaagcattttggcttcatgacagtcttatggacatatggtatccctctgttatgggtcaatcattggatcgtcatgatcacatacctccatcatactcatacagatctacccaaatacgctcctgagagctggacgtatcttcgtggtgccttggcgactgtcgatcgtgaccccggcttcattttacgacatatgacacaccacattatcgatttacatgtcattcaccacctcttccctcgtattcctcactatcacgctgctgaggcaacgaatgccatcaagccactgttgggagatcaatatcacgtagataaaacctcgtattggggcgcgctttggactgcattcactgattgccaatggatcgagcctgacaaggagagaaccgctaaagccaacgtgtatagctcgtcgaaaggagattcggttgagtccgcaaagcaaaaggcaatcgacgagactggtgtcctttggtaccgaggcggaaggatgccgagcccagtggtgatcaactcccgcctgttggaggcgagctag

SEQ ID NO: 26571 - protein, 462 aa, Muscodor strobelii
  misc_feature: SGI Peptide ID NO. 569089
  misc_feature (91)..(381): Pfam Id: PF00487 Pfam Desc: Fatty acid desaturase
  misc_feature (256)..(381): Pfam Id: PF00487 Pfam Desc: Fatty acid desaturase
  misc_feature (91)..(156): Pfam Id: PF00487 Pfam Desc: Fatty acid desaturase
  misc_feature (33)..(451): NCBI GI: 258578375 Blast Desc: UREG_02885 [Uncinocarpus reesii 1704] gi|237903635|gb|EEP78036.1| UREG_02885 [Uncinocarpus reesii 1704]
  misc_feature (32)..(409): NCBI GI: 116191535 Blast Desc: CHGG_05485 [Chaetomium globosum CBS 148.51] gi|88181398|gb|EAQ88866.1| CHGG_05485 [Chaetomium globosum CBS 148.51]
  misc_feature (28)..(451): NCBI GI: 145231242 Blast Desc: An01g14970 [Aspergillus niger] gi|134056016|emb|CAK37451.1| protein product [Aspergillus niger]
  misc_feature (1)..(409): NCBI GI: 171680922 Blast Desc: protein product [Podospora anserina] gi|170940419|emb|CAP65646.1| protein product [Podospora anserina]
  misc_feature (4)..(409): NCBI GI: 256724499 Blast Desc: [Nectria haematococca mpVI 77-13-4]
  misc_feature (4)..(412): NCBI GI: 82658705 Blast Desc: bifunctional D12/D15 fatty acid desaturase [Gibberella moniliformis]
  misc_feature (32)..(411): NCBI GI: 261361627 Blast Desc: Delta(12) fatty acid desaturase [Verticillium albo-atrum VaMs.102]
  misc_feature (32)..(411): NCBI GI: 39946863 Blast Desc: MGG_08474 [Magnaporthe grisea 70-15] gi|145012308|gb|EDJ96964.1| MGG_08474 [Magnaporthe grisea 70-15]
  misc_feature (32)..(411): NCBI GI: 85088599 Blast Desc: NCU09497 [Neurospora crassa OR74A] gi|28919092|gb|EAA28621.1| NCU09497 [Neurospora crassa OR74A]
  misc_feature (24)..(431): NCBI GI: 259488665 Blast Desc: TPA: Oleate delta-12 desaturase [Source:UniProtKB/TrEMBL;Acc:Q9HF05] [Aspergillus nidulans FGSC A4]
  misc_feature (33)..(416): SWISSPROT Homolog: EC 1.14.99.33 Delta(12)-fatty acid dehydrogenase
MSTTKTTWVTETLHGAIVPSGEITTGDNVKLDVKGLRAAIPAHCLKPSTLRSFFFVFRDLAFYVTFLYAALYVEKTTGNYVVSFLNRFIVFPYAAGIALTGLWVLGHEAGHGAFSTNQKLANIVGFLIHSALMSPYFAWRSSHGRHHQYANNVSIDLNYVPPSREEYRTMFGNRSKRGQGSLKKKFEAEGKETGMHEDDVFEDAPFVVLLRIILQQVIGWYWYLLTHITAGPDSSPKKSRGWWDNSHFLPNSDMSLFRDDEFWNILLSDIGLIGMVGVVYAAGKHFGFMTVLWTYGIPLLWVNHWIVMITYLHHTHTDLPKYAPESWTYLRGALATVDRDPGFILRHMTHHIIDLHVIHHLFPRIPHYHAAEATNAIKPLLGDQYHVDKTSYWGALWTAFTDCQWIEPDKERTAKANVYSSSKGDSVESAKQKAIDETGVLWYRGGRMPSPVVINSRLLEAS

SEQ ID NO: 26572 - DNA, 1157 bp, Muscodor strobelii
  misc_feature: SGI EST ID NO. CUFF.62770.0
  misc_feature: Variant of the nucleotide sequence at SEQ ID NO 26570
ctggaacattttgctttccgacattggccttatcggtatggtgggcgtcgtctatgcagccggaaagcattttggcttcatgacagtcttatggacatatggtatccctctgttatgggtcaatcattggatcgtcatgatcacatacctccatcatactcatacagatctacccaaatacgctcctgagagctggacgtatcttcgtggtgccttggcgactgtcgatcgtgaccccggcttcattttacgacatatgacacaccacattatcgatttacatgtcattcaccacctcttccctcgtattcctcactatcacgctgctgaggcaacgaatgccatcaagccactgttgggagatcaatatcacgtagataaaacctcgtattggggcgcgctttggactgcattcactgattgccaatggatcgagcctgacaaggagagaaccgctaaagccaacgtgtatagctcgtcgaaaggagattcggttgagtccgcaaagcaaaaggcaatcgacgagactggtgtcctttggtaccgaggcggaaggatgccgagcccagtggtgatcaactcccgcctgttggaggcgagctagattccaatcatagacgaaacgcacgatatggtctgtgcataacccatacatcacagatcgagctcgtcagagcgtgtgaatacaaagttgcggaacctagaataatggatgaccgcgtgtttgtggcactttggatgctcgatagataattagagggcgagggcggcgatatccctatttagcagcctcgtaagggcatttccagattcttcaaggccctgctcttgcaatgctacaattgaagccaaggtatcgaggataaagaacacataactgcacataacgccattttcactgctatgcaattaagccccaagccatctccgcatttgcagggttcgtaccggttcactaacaaacgttatgacttaatgaaggccgcagacgaagcagagtgtatctatgacctttcctgatattggggaacgtagcatgcggccttcgaatatgatactatgatctgttccggccattgtctttaaatgtcgccggatagaacgaaggcgagagggacatatatgcttgacggcaaagatattcggacaggcacggg

SEQ ID NO: 26573 - DNA, 1905 bp, Muscodor strobelii
  misc_feature: SGI cDNA ID NO. 569090
  misc_feature: Encodes the peptide sequence at SEQ ID NO 26574
atgttctcttcaatattcctcgtggtcggcgcagttgtcgcatggcgcgcctatatctatttcagtggcttgttcgcaaatatcgagaaggccaagtctactgggctaaaatattatgtcgttccgatgaaccctatcaatccgatggcccaggccttctcgttcatttggataccagtctggcagttcatcgcgccaaagaagtactgggaagatatcacggaagtgtgcgaatacaactggcaattcagaaagcagttcgcaccttttgcgaagatgggcgaaacatttctgattgctacaccaaccatattgatgatatggaccaccaatgctggtgtcatgcatgaagtgcaatcgaggcgggaagcgttcccaaaaccaacagagcactacgaaattctggcccaattcggtaaaaatgttcttactactgagggaagcgtttggcgattgcatcgaaaagttacatctgcatcattcaacgagaagaatgcagcactagtgttcagagaatctatcgaacaggcacaaggaatgatggaatactggctccgaaagcagaagagtggcagcatcaacaccgtggaaggtgatacgatgacactggcgcttaatatcattagctacgtgggttttggactgcgacttatatggccaggccaatctctaccggcagatgcaaatcctcaaatggtcaaatatgcgagtcatgatgctcctgaaggccacactctgacgtttcatgaatccatagagagagtgcttaagtatcttctcactatcttgatcacgccgtcagggttacttaacaatctccccatcaaacagttcagattagccaaagaggcaagggataattacacacaatacatgaaagagtttctctcagaaaaggtagcagaaattcggaagggcgacaaggaccaagggatggatatcatggggtcgctttgctcaacgtcatacgaggatgtacaaggcaagaccaaagcaggaattcaacttgacgactctgaaatcattgggaatgccttcattatgttcgtggcaggccacgagacgacagccaacactatgcactttacgattcttgagctagccaacaatcctgcagctcagcgacaactacagcgggacatagatgcaattcttggccgcgattcggatccgacaacctgggactatgaagagaagctcggtgccatgcaagcatcgatgctgggcgcggtcatgaatgaaacgctaaggctgatgccacccgtgaccgagattccaaagaaagccacgccgaatcatacacaagagcttaccatcgacggcgtgaggcgcactcttcctgctaatacatacttgggtctctgcgtggccgcggcacatcgcaacccgaacaattggcccataaagccaagtagaatcacaaatgctcccgacgaccttggcgattgggtcccggaacgctggtttagggcgactactgcgagtgaggagaagaaacgtacggacttcgtcgaggatacagaggattacggcggctatgcgggtcctgataccagtgcttcgatgtttcggcctgttcgaggttcgtatatgccgttctcagatggtgcaagatcctgtcttggtaggcgcatcgccattgtcgaagtactagcggcactcgcggttatcttccagaagtacagtgtcgagaatgcagttgatgacctggctacggacgaagaggtttctgccatgaccaaggatcaaaaggagacactttataaagaagcgacgaagcgctcaagggatcatatgcatagggctgaggcaagaattacgcttaaaatttacaatggcacgacagtacccctgaggctggtcaagaggggcgaagagcgcttcgtcagctggattgactcataa

SEQ ID NO: 26574 - protein, 634 aa, Muscodor strobelii
  misc_feature: SGI Peptide ID NO. 569090
  misc_feature (64)..(590): Pfam Id: PF00067 Pfam Desc: Cytochrome P450
  misc_feature (250)..(467): Pfam Id: PF00067 Pfam Desc: Cytochrome P450
  misc_feature (529)..(590): Pfam Id: PF00067 Pfam Desc: Cytochrome P450
  misc_feature (2)..(632): NCBI GI: 256732084 Blast Desc: NECHADRAFT_41367 [Nectria haematococca mpVI 77-13-4]
  misc_feature (2)..(634): NCBI GI: 46136801 Blast Desc: FG09916.1 [Gibberella zeae PH-1]
  misc_feature (10)..(619): NCBI GI: 116197891 Blast Desc: CHGG_07101 [Chaetomium globosum CBS 148.51] gi|88178380|gb|EAQ85848.1| CHGG_07101 [Chaetomium globosum CBS 148.51]
  misc_feature (18)..(630): NCBI GI: 171694303 Blast Desc: protein product [Podospora anserina] gi|170947100|emb|CAP73905.1| protein product [Podospora anserina]
  misc_feature (2)..(629): NCBI GI: 85101872 Blast Desc: NCU04234 [Neurospora crassa OR74A] gi|28922767|gb|EAA31989.1| [Neurospora crassa OR74A]
  misc_feature (2)..(629): NCBI GI: 11595512 Blast Desc: related to cytochrome P450 3A7 [Neurospora crassa]
  misc_feature (80)..(633): NCBI GI: 156056064 Blast Desc: SS1G_05384 [Sclerotinia sclerotiorum 1980] gi|154703168|gb|EDO02907.1| SS1G_05384 [Sclerotinia sclerotiorum 1980]
  misc_feature (23)..(633): NCBI GI: 154310427 Blast Desc: BC1G_07134 [Botryotinia fuckeliana B05.10] gi|150851465|gb|EDN26658.1| BC1G_07134 [Botryotinia fuckeliana B05.10]
  misc_feature (80)..(627): NCBI GI: 261351941 Blast Desc: cytochrome P450 3A21 [Verticillium albo-atrum VaMs.102]
  misc_feature (18)..(617): NCBI GI: 145605776 Blast Desc: MGG_06872 [Magnaporthe grisea 70-15] gi|145013565|gb|EDJ98206.1| MGG_06872 [Magnaporthe grisea 70-15]
MFSSIFLVVGAVVAWRAYIYFSGLFANIEKAKSTGLKYYVVPMNPINPMAQAFSFIWIPVWQFIAPKKYWEDITEVCEYNWQFRKQFAPFAKMGETFLIATPTILMIWTTNAGVMHEVQSRREAFPKPTEHYEILAQFGKNVLTTEGSVWRLHRKVTSASFNEKNAALVFRESIEQAQGMMEYWLRKQKSGSINTVEGDTMTLALNIISYVGFGLRLIWPGQSLPADANPQMVKYASHDAPEGHTLTFHESIERVLKYLLTILITPSGLLNNLPIKQFRLAKEARDNYTQYMKEFLSEKVAEIRKGDKDQGMDIMGSLCSTSYEDVQGKTKAGIQLDDSEIIGNAFIMFVAGHETTANTMHFTILELANNPAAQRQLQRDIDAILGRDSDPTTWDYEEKLGAMQASMLGAVMNETLRLMPPVTEIPKKATPNHTQELTIDGVRRTLPANTYLGLCVAAAHRNPNNWPIKPSRITNAPDDLGDWVPERWFRATTASEEKKRTDFVEDTEDYGGYAGPDTSASMFRPVRGSYMPFSDGARSCLGRRIAIVEVLAALAVIFQKYSVENAVDDLATDEEVSAMTKDQKETLYKEATKRSRDHMHRAEARITLKIYNGTTVPLRLVKRGEERFVSWIDS

SEQ ID NO: 26575 - DNA, 2595 bp, Muscodor strobelii
  misc_feature: SGI EST ID NO. CUFF.62788.0
  misc_feature: Variant of the nucleotide sequence at SEQ ID NO 26573
tgcagatttatcggcattaaacgtctccgagaccaccactccagttctaaagtctccgtaaatgaaatacctcgttgaacatgttccagctgggaaggtcacggggattggcgtccaacagagtctgtaactttatgaatgggctttgccttctctccagacttgtactataacagcagagcttctccagtcaaactggtattgacgtttgcaaatgaatgaaagttccgtcccagcttctggcctctgacgacatagatccgaccgcacaccagtgattcaaatctgcagatccccactcaccagccattcaccaggcttgcagagagcctctcatcggcgtataaaaccagcagagctcctgggaaaaactggaagaggccacgacgaagggacatattgagcgacaatgttctcttcaatattcctcgtggtcggcgcagttgtcgcatggcgcgcctatatctatttcagtggcttgttcgcaaatatcgagaaggccaagtctactgggctaaaatattatgtcgttccgatgaaccctatcaatccgatggcccaggccttctcgttcatttggataccagtctggcagttcatcgcgccaaagaagtactgggaagatatcacggaagtgtgcgaatacaactggcaattcagaaagcagttcgcaccttttgcgaagatgggcgaaacatttctgattgctacaccaaccatattgatgatatggaccaccaatgctggtgtcatgcatgaagtgcaatcgaggcgggaagcgttcccaaaaccaacagagcactacgaaattctggcccaattcggtaaaaatgttcttactactgagggaagcgtttggcgattgcatcgaaaagttacatctgcatcattcaacgagaagaatgcagcactagtgttcagagaatctatcgaacaggcacaaggaatgatggaatactggctccgaaagcagaagagtggcagcatcaacaccgtggaaggtgatacgatgacactggcgcttaatatcattagctacgtgggttttggactgcgacttatatggccaggccaatctctaccggcagatgcaaatcctcaaatggtcaaatatgcgagtcatgatgctcctgaaggccacactctgacgtttcatgaatccatagagagagtgcttaagtatcttctcactatcttgatcacgccgtcagggttacttaacaatctccccatcaaacagttcagattagccaaagaggcaagggataattacacacaatacatgaaagagtttctctcagaaaaggtagcagaaattcggaagggcgacaaggaccaagggatggatatcatggggtcgctttgctcaacgtcatacgaggatgtacaaggcaagaccaaagcaggaattcaacttgacgactctgaaatcattgggaatgccttcattatgttcgtggcaggccacgagacgacagccaacactatgcactttacgattcttgagctagccaacaatcctgcagctcagcgacaactacagcgggacatagatgcaattcttggccgcgattcggatccgacaacctgggactatgaagagaagctcggtgccatgcaagcatcgatgctgggcgcggtcatgaatgaaacgctaaggctgatgccacccgtgaccgagattccaaagaaagccacgccgaatcatacacaagagcttaccatcgacggcgtgaggcgcactcttcctgctaatacatacttgggtctctgcgtggccgcggcacatcgcaacccgaacaattggcccataaagccaagtagaatcacaaatgctcccgacgaccttggcgattgggtcccggaacgctggtttagggcgactactgcgagtgaggagaagaaacgtacggacttcgtcgaggatacagaggattacggcggctatgcgggtcctgataccagtgcttcgatgtttcggcctgttcgaggttcgtatatgccgttctcagatggtgcaagatcctgtcttggtaggcgcatcgccattgtcgaagtactagcggcactcgcggttatcttccagaagtacagtgtcgagaatgcagttgatgacctggctacggacgaagaggtttctgccatgaccaaggatcaaaaggagacactttataaagaagcgacgaagcgctcaagggatcatatgcatagggctgaggcaagaattacgcttaaaatttacaatggcacgacagtacccctgaggctggtcaagaggggcgaagagcgcttcgtcagctggattgactcataagagcttcgtcaggttacgttcaactgaggatggtgttcggcaggtcattcatgttcgcgagcaagggacataactttgataactatatattgattgcgtttgaggttcttttaggtcttgatttgatagtgtacgccttataaagcctaaggtgacatgttgtatctattctcaagaacattcccagaatagcgatgtacacacattggaagatggtgctttttcgaaaccacaagaacatgcgttataagtcattttgttcagatgacttgtgaatgact

SEQ ID NO: 26576 - DNA, 2307 bp, Muscodor strobelii
  misc_feature: SGI cDNA ID NO. 569091
  misc_feature: Encodes the peptide sequence at SEQ ID NO 26577
atgaaggaaagctcgtctgataaaccgcctaaaatagatcgcatacgctcttgggcacgaactcatgcgtatggaggctcgaatcgacccgcgtcttccggtagcaaccctacgctgcccctaagcaatcctcatcaatctacagaccacaaagatggcaactccaccgccaacggaaattcaaaaccccctggtcagctcacagatggctctgtccgtaccaaacaggataccgataatgccgttaaatcagctccgtcggcatctaaacctgagggggaggggactgtcttagaacctgaaaaggcggagttgaagaaacctaatattgccatgagattcttcttgaccaccaagaaggtcctctttcatacttggctcaacctggggttggtatttgtgcccgtcggtattattattgctaatatcccaaatgccaaccctggagctacatttggcgttaacgccattgctattatccccctcgctggacttcttgcctatgccaccgagtccgtagctcgtaaactaggtgatacaatcggggctttgctcaacgtgacgtttggaaatgctgttgagttgatcatcttcatcatcgcattggttaagggtgaaattcgcgttgttcaggcatcccttttggggtccatcctcgccaacctattgctcattctgggcggcgcattcctgttaggtggcctgcgattccgagaacaagtctataacagcactgtaacgcagatgagtgcttgcttgctcagtttgagtgtcatcagtcttgtcctacctaccgcgtttcactattcttttaccagcatcgagaaagccgacgcggaatctctcaagatcagtcgcgctatcagtgttatcctgttgctgatatatgtcatatacctgctgttccaactgaagtcgcacgcgtacatgtacgagtcgacacctcagcacatcatcgacgaagaagcaactccaggccctgtggctgcttggatggatacttctagctcagaatcgagctcttcttcggattccgactcggactcatctggacactcaaagaacacaatgtctcgacgtgtcagacgtgccattcggaaccgccgccgtagaaagtcgagtgtcgcgtccattgacacggatgatgaacgagcacggacgcgtgcttcatctttcaatgctagccccgccgttgaaggttccaaatcgggagaatcttccagcggcttaggcggctttttccctcgcatgaactcgactggaagcgaagaagcagttgaggacgaggctaaacatggcaaatctcaccgcaaacgacgtcataaacagtctaaacacaagcatcgccgtcaacgtaagacgtcaacacccttggaacccgaggaggtggtagaagagaacatcgttggacttgttcctggggatgcgctcacagaaaccgcgaatggagaacctcgacgcgtcgattttgccgagaacgctgctaatcttgatggtactgccgacattgttgagtcgggtgctgagtctggcgcccctaaacggcccttcaataacttccgcggcttgtctgttgccaagcttgctcctccagtcttttcgcaacaaaaccagcagtccggtgtgacccctgttgcacccctcgggccggtcccccgtgtccgatatggcattcggcggaccaattcgcttccggacaagctcaatcagtatccttatcgtcctcctggagcgatgatgccgtctcaagttccgccgtcggttttggcccctcctcctggtaatggcggtgctgagagtgaagacgacgatctttcgagaccggcagctattgttctactgctcatcaccacggccctcgtagcggtgtgtgccgagttccttgtcgactcgatcgaggctgtggtggaaagcagctcgctcaaggagatcttcatcggtcttatcatcctgccgatcgtaggcaacgcggcagagcacgtgacggcgataacggtggcgatgaagaacaagatggacctcgctatcggcgtggccatcggctctagcatccagattgcactattcatcacgccccttgtggttatcatcgggtggatcatcgatcagcccatgacgctgtacttcacgctcttcgagacggtctgcttgttcgtttcggccttcatcatcaacttcttgattctcgacggacgcagcaactatctcgagggtgctctgctggtggcgacgtatgtcattattggcatcatcgcgttcttctaccccgaaggcacggacgccgatcaatggagcgccgcaccttaa

SEQ ID NO: 26577 - protein, 768 aa, Muscodor strobelii
  misc_feature: SGI Peptide ID NO. 569091
  misc_feature (619)..(752): Pfam Id: PF01699 Pfam Desc: Sodium/calcium exchanger protein
  misc_feature (157)..(303): Pfam Id: PF01699 Pfam Desc: Sodium/calcium exchanger protein
  misc_feature (56)..(764): NCBI GI: 46107632 Blast Desc: FG00699.1 [Gibberella zeae PH-1]
  misc_feature (1)..(766): NCBI GI: 256735468 Blast Desc: NECHADRAFT_31235 [Nectria haematococca mpVI 77-13-4]
  misc_feature (1)..(764): NCBI GI: 171694878 Blast Desc: protein product [Podospora anserina] gi|170947681|emb|CAP59843.1| protein product [Podospora anserina]
  misc_feature (13)..(763): NCBI GI: 164428680 Blast Desc: NCU00916 [Neurospora crassa OR74A] gi|157072239|gb|EAA35506.2| [Neurospora crassa OR74A]
  misc_feature (13)..(763): NCBI GI: 38636450 Blast Desc: [Neurospora crassa]
  misc_feature (13)..(760): NCBI GI: 154320402 Blast Desc: BC1G_01673 [Botryotinia fuckeliana B05.10] gi|150853362|gb|EDN28554.1| BC1G_01673 [Botryotinia fuckeliana B05.10]
  misc_feature (26)..(760): NCBI GI: 156040641 Blast Desc: SS1G_12337 [Sclerotinia sclerotiorum 1980] gi|154696393|gb|EDN96131.1| SS1G_12337 [Sclerotinia sclerotiorum 1980]
  misc_feature (106)..(766): NCBI GI: 116182634 Blast Desc: CHGG_01945 [Chaetomium globosum CBS 148.51] gi|88186242|gb|EAQ93710.1| CHGG_01945 [Chaetomium globosum CBS 148.51]
  misc_feature (8)..(767): NCBI GI: 238492345 Blast Desc: membrane bound cation transporter, [Aspergillus flavus NRRL3357] gi|220695903|gb|EED52245.1| membrane bound cation transporter, [Aspergillus flavus NRRL3357]
  misc_feature (12)..(767): NCBI GI: 115387615 Blast Desc: conserved [Aspergillus terreus NIH2624] gi|114195397|gb|EAU37097.1| conserved [Aspergillus terreus NIH2624]
MKESSSDKPPKIDRIRSWARTHAYGGSNRPASSGSNPTLPLSNPHQSTDHKDGNSTANGNSKPPGQLTDGSVRTKQDTDNAVKSAPSASKPEGEGTVLEPEKAELKKPNIAMRFFLTTKKVLFHTWLNLGLVFVPVGIIIANIPNANPGATFGVNAIAIIPLAGLLAYATESVARKLGDTIGALLNVTFGNAVELIIFIIALVKGEIRVVQASLLGSILANLLLILGGAFLLGGLRFREQVYNSTVTQMSACLLSLSVISLVLPTAFHYSFTSIEKADAESLKISRAISVILLLIYVIYLLFQLKSHAYMYESTPQHIIDEEATPGPVAAWMDTSSSESSSSSDSDSDSSGHSKNTMSRRVRRAIRNRRRRKSSVASIDTDDERARTRASSFNASPAVEGSKSGESSSGLGGFFPRMNSTGSEEAVEDEAKHGKSHRKRRHKQSKHKHRRQRKTSTPLEPEEVVEENIVGLVPGDALTETANGEPRRVDFAENAANLDGTADIVESGAESGAPKRPFNNFRGLSVAKLAPPVFSQQNQQSGVTPVAPLGPVPRVRYGIRRTNSLPDKLNQYPYRPPGAMMPSQVPPSVLAPPPGNGGAESEDDDLSRPAAIVLLLITTALVAVCAEFLVDSIEAVVESSSLKEIFIGLIILPIVGNAAEHVTAITVAMKNKMDLAIGVAIGSSIQIALFITPLVVIIGWIIDQPMTLYFTLFETVCLFVSAFIINFLILDGRSNYLEGALLVATYVIIGIIAFFYPEGTDADQWSAAP

SEQ ID NO: 26578 - DNA, 2916 bp, Muscodor strobelii
  misc_feature: SGI EST ID NO. CUFF.62824.0
  misc_feature: Variant of the nucleotide sequence at SEQ ID NO 26576
tccatcaccaaggcctatttaggccgtactactcgtccgttgttgcctcttcctttctctttcgttctctatccaacacacccacgaccttggcgtcgacattgccaaagtattatacatcgatgaaggaaagctcgtctgataaaccgcctaaaatagatcgcatacgctcttgggcacgaactcatgcgtatggaggctcgaatcgacccgcgtcttccggtagcaaccctacgctgcccctaagcaatcctcatcaatctacagaccacaaagatggcaactccaccgccaacggaaattcaaaaccccctggtcagctcacagatggctctgtccgtaccaaacaggataccgataatgccgttaaatcagctccgtcggcatctaaacctgagggggaggggactgtcttagaacctgaaaaggcggagttgaagaaacctaatattgccatgagattcttcttgaccaccaagaaggtcctctttcatacttggctcaacctggggttggtatttgtgcccgtcggtattattattgctaatatcccaaatgccaaccctggagctacatttggcgttaacgccattgctattatccccctcgctggacttcttgcctatgccaccgagtccgtagctcgtaaactaggtgatacaatcggggctttgctcaacgtgacgtttggaaatgctgttgagttgatcatcttcatcatcgcattggttaagggtgaaattcgcgttgttcaggcatcccttttggggtccatcctcgccaacctattgctcattctgggcggcgcattcctgttaggtggcctgcgattccgagaacaagtctataacagcactgtaacgcagatgagtgcttgcttgctcagtttgagtgtcatcagtcttgtcctacctaccgcgtttcactattcttttaccagcatcgagaaagccgacgcggaatctctcaagatcagtcgcgctatcagtgttatcctgttgctgatatatgtcatatacctgctgttccaactgaagtcgcacgcgtacatgtacgagtcgacacctcagcacatcatcgacgaagaagcaactccaggccctgtggctgcttggatggatacttctagctcagaatcgagctcttcttcggattccgactcggactcatctggacactcaaagaacacaatgtctcgacgtgtcagacgtgccattcggaaccgccgccgtagaaagtcgagtgtcgcgtccattgacacggatgatgaacgagcacggacgcgtgcttcatctttcaatgctagccccgccgttgaaggttccaaatcgggagaatcttccagcggcttaggcggctttttccctcgcatgaactcgactggaagcgaagaagcagttgaggacgaggctaaacatggcaaatctcaccgcaaacgacgtcataaacagtctaaacacaagcatcgccgtcaacgtaagacgtcaacacccttggaacccgaggaggtggtagaagagaacatcgttggacttgttcctggggatgcgctcacagaaaccgcgaatggagaacctcgacgcgtcgattttgccgagaacgctgctaatcttgatggtactgccgacattgttgagtcgggtgctgagtctggcgcccctaaacggcccttcaataacttccgcggcttgtctgttgccaagcttgctcctccagtcttttcgcaacaaaaccagcagtccggtgtgacccctgttgcacccctcgggccggtcccccgtgtccgatatggcattcggcggaccaattcgcttccggacaagctcaatcagtatccttatcgtcctcctggagcgatgatgccgtctcaagttccgccgtcggttttggcccctcctcctggtaatggcggtgctgagagtgaagacgacgatctttcgagaccggcagctattgttctactgctcatcaccacggccctcgtagcggtgtgtgccgagttccttgtcgactcgatcgaggctgtggtggaaagcagctcgctcaaggagatcttcatcggtcttatcatcctgccgatcgtaggcaacgcggcagagcacgtgacggcgataacggtggcgatgaagaacaagatggacctcgctatcggcgtggccatcggctctagcatccagattgcactattcatcacgccccttgtggttatcatcgggtggatcatcgatcagcccatgacgctgtacttcacgctcttcgagacggtctgcttgttcgtttcggccttcatcatcaacttcttgattctcgacggacgcagcaactatctcgagggtgctctgctggtggcgacgtatgtcattattggcatcatcgcgttcttctaccccgaaggcacggacgccgatcaatggagcgccgcaccttaaaaggggttctgccacgttctcgacgttctgtctacctgtagtcttgcacgaaaaacatttaccaatattgcggtaaagcataacgatcacaaaacatgaagcctacgtgaggagcatagttgagcgagaagacaatagataccctttcagtatctattgtagtggtgttgacaagatgtgaagttactgattgggggccagggggcttgtatggagcatgagacgaggaagtctaaaatacgaagcatgacgggcaaaaggctgaactgcgatggattcatttcagcgaggatcgctcagccaacttgagattttgataccaggtagtgttgacatgtgttccaggcagatgactagggacacgtagatgtcgtgaatacactcatttgacgttggctactttataatccttgaaagcattgtgatatgagacgtaattcggacatttgatttctgctagccaatctccggacaataccgatcatta

SEQ ID NO: 26579 - DNA, 1278 bp, Muscodor strobelii
  misc_feature: SGI cDNA ID NO. 569092
  misc_feature: Encodes the peptide sequence at SEQ ID NO 26580
atgtgcttcaccagctcagatcgcgacgacaatccgccgagcaagccggctcataatccacagcaacaagctgccaccagcagtgtgcctcttccgtctaaagccagtatgccgcagaacagctacgctcctcccccggggccccgccctcgcagcagctacgctcctcctcccggtcctcctccttctcacgactacgatgcaccttcaggtccgcctccttctcacggcagtgcgggacctttgccatccaaaagcaacaacccgttcttcgatgccccaccaggaccttcaccttctcatggaggtcaatcatcctcgcaatatgctcctcctccagggccacctccctctcacgactacacggctccaccgggccctccgccatcccaggactacggaccgccctccggtcctccgccctcccaaaagaagcaacatgactgggagacggccgtacctgacaccgctctcctgcccccaccgcccatgtacttcggcgagttcgagcgctcgccagccaacaattccacagaggcagaggccgatgaagcccaacattggtgtagacgctttcacatgacggcgcccatccagcttgaccccgccgctctgcgtgccgcagaggtaggcaacatcaatatgtttgcaccaccgttcttctccgatcagcacaacaggggcaccttcgggcggaagagcatgggagtctgggaaggacaagccacgagaaagacgcgcgatacgtgtctagcctcttacccaccgctctacagcgtctttgcccacagccccctgaagacccaccgtagaaagactatctactacgaagtcaccatcaagagcttcggaagaaacgggcctgttctcgctctcggcttattggcccctccatacccgccattccgtctacccggctggcagcgcggcagtcttggtatccacggtgacgatggacataagtatattaacgaccactggggtggtctcgactgtacctccccgttccagcgtggagatacggtgggtattggcatgcattttgacttcaatgatgggaggatcgaggcggaggtcttcttcacgaggaatgggacgcaagagacgtcgtggaatatcaatgaggatgtagattcgaagaccaatcttacgagagaggggctggaggggtatcatgatatttgtgctgctgtgggtgtgagtgatgaggttgcgtttgagattgttttcgtgccggagctttggcgatggcagggatggagggcaaataggggttag

SEQ ID NO: 26580 - protein, 425 aa, Muscodor strobelii
  misc_feature: SGI Peptide ID NO. 569092
  misc_feature (1)..(417): NCBI GI: 46107630 Blast Desc: FG00698.1 [Gibberella zeae PH-1]
  misc_feature (109)..(418): NCBI GI: 154295324 Blast Desc: BC1G_13243 [Botryotinia fuckeliana B05.10] gi|150844110|gb|EDN19303.1| BC1G_13243 [Botryotinia fuckeliana B05.10]
  misc_feature (128)..(418): NCBI GI: 156040601 Blast Desc: SS1G_12317 [Sclerotinia sclerotiorum 1980] gi|154696373|gb|EDN96111.1| SS1G_12317 [Sclerotinia sclerotiorum 1980]
  misc_feature (2)..(418): NCBI GI: 85114729 Blast Desc: NCU00918 [Neurospora crassa OR74A] gi|28926537|gb|EAA35508.1| NCU00918 [Neurospora crassa OR74A] gi|38567297|emb|CAE76586.1| [Neurospora crassa]
  misc_feature (144)..(421): NCBI GI: 261358692 Blast Desc: D-lactate dehydrogenase [Verticillium albo-atrum VaMs.102]
  misc_feature (95)..(417): NCBI GI: 256735467 Blast Desc: [Nectria haematococca mpVI 77-13-4]
  misc_feature (143)..(417): NCBI GI: 171694874 Blast Desc: protein product [Podospora anserina] gi|170947679|emb|CAP59841.1| protein product [Podospora anserina]
  misc_feature (105)..(419): NCBI GI: 39950503 Blast Desc: MGG_01220 [Magnaporthe grisea 70-15] gi|145020979|gb|EDK05108.1| MGG_01220 [Magnaporthe grisea 70-15]
  misc_feature (8)..(418): NCBI GI: 189197139 Blast Desc: conserved [Pyrenophora tritici-repentis Pt-1C-BFP] gi|187980855|gb|EDU47481.1| conserved [Pyrenophora tritici-repentis Pt-1C-BFP]
  misc_feature (208)..(418): NCBI GI: 116182636 Blast Desc: CHGG_01946 [Chaetomium globosum CBS 148.51] gi|88186243|gb|EAQ93711.1| CHGG_01946 [Chaetomium globosum CBS 148.51]
MCFTSSDRDDNPPSKPAHNPQQQAATSSVPLPSKASMPQNSYAPPPGPRPRSSYAPPPGPPPSHDYDAPSGPPPSHGSAGPLPSKSNNPFFDAPPGPSPSHGGQSSSQYAPPPGPPPSHDYTAPPGPPPSQDYGPPSGPPPSQKKQHDWETAVPDTALLPPPPMYFGEFERSPANNSTEAEADEAQHWCRRFHMTAPIQLDPAALRAAEVGNINMFAPPFFSDQHNRGTFGRKSMGVWEGQATRKTRDTCLASYPPLYSVFAHSPLKTHRRKTIYYEVTIKSFGRNGPVLALGLLAPPYPPFRLPGWQRGSLGIHGDDGHKYINDHWGGLDCTSPFQRGDTVGIGMHFDFNDGRIEAEVFFTRNGTQETSWNINEDVDSKTNLTREGLEGYHDICAAVGVSDEVAFEIVFVPELWRWQGWRANRG

SEQ ID NO: 26581 - DNA, 3426 bp, Muscodor strobelii
  misc_feature: SGI cDNA ID NO. 569093
  misc_feature: Encodes the peptide sequence at SEQ ID NO 26582
atgtcgtctctcaaggctgccacggtctccaataaacttgtgaagaggaagagaccgcaggcatctcgagacgcctcccccaccaaccccaccacagaggtagacagcaccaaggaagatcctgctgtgtcagaaaagcccaaaaaggcgcgtcaaacaaagaaagcgcaggcatcagcgcagattgtcgaatgtgtaatcgagtggccatcgattttcacccagctagaaaagactcatcgagcattgaaccttgtctttaccttttgttccacgcgaaagcacttagctaccacgtttgataccattcgttcagctgtcgagactcatattaaacgcgagttgcggattgaagatgtggcagctatcgcagcaattcgcccagagggcattttcttcggctatgtggacgaggtgatgctgcaaaccgatatcaagggtgctgaacgagatatgacctttaaatctggtcgctcaaaggacattactgtgcagggtcctgcccctgatgcatcagtaggcggcttgacgggtatggatagtcttggcagtcggcatcccgatgagttacccgcaagcggccaggaggtgttattctacgagttcatcgatggcgatctcaagcgccaagttcagagccgaaaatccggggagcctgttaaccctactagacggctcagagacgaagacttgaaagtaccagtgtatagccaaaagcagatgactaccttgattgagaagcgtaaccaaaagttctccaatgctataagcacattcataaatcgatgtgtggagggcaaactcgaccccgagctgatccttgcccaagaagctgaagcatgtatacctgttcgttcgcaatcaaaccggtctacaccgaaacttgagccaagtaccatcccaaagtcaatcccgaaagaaaggaaaagcatacctgatattatacaggagctcaaagatagctcatggtacacgaatcagatcgtgccggacggacatcgtgtctttgaagcacaggaagccgttctcggcgaactggatttcatgttaagccaggatatggttaacgctctatataacgcgaaaaacattcttcacttctacgcgcaccaaactgaagccatcaacagccttcatgccggtcgtcatgtcgtcgtctccacttctacaagctctggcaagtcactgatctaccagttgcccgtcctgcatgggttggaaaatgaccctgatactcgagcaatgtacatttttccgacaaaagccttggctcaggatcagaagaggagcttgaaagacatgcttgcatatctacccggattagaaaatgtgcttgttgaaacatttgatggcgacacgcctatgcaagacagaaaccagattcgagatgaagctcgcatcattttcacaaatcccgacatgttacatatcactattctaccccaagaagatcggtggcgaatgttcctcaagaacttgcgtttcgtcgttgttgatgagctccattactataacggcttgatggggtctcacgtggcgttcatcgtgagaagacttcgacggatctgtgcagcagtcggcaatcgaaaggtcaaatttgtatcttgctccgcaactgtagcgaatccacaagagcacttcaagacgatattcggtatagatgacgtgcatttaatcgatttcgacggatcgccgtccggccgtaaagagttcttatgctggaacacgccttataaagaccctggagatccctcaagtggccgcggcagtgctctcgcagaatgcgcacgccttttctgccaactaatcttacgaggagttcgtgtaatagctttttgccgagtgcgaaaacagtgcgaagaactggtgacggccacgaggtacgaattggagtcgttaggacggccggagtgcgtagcccgcgtcatggggtatcgaggaggctataccgcccaggaccgccgaaacatcgagagtcaaatgtttgagggtaagttgatgggaatcatcgcgaccactgcactggaactaggcgttgacattggtacgcttgattgtgtcatcacccttggattcccatatactattgcaaaccttagacaacaaagtggaagagctggcagaaggaacaaagactccctctccatccttgtaggagattgcttcccctctgatcagcactacatgcaaaatcctgatgaactcttcaccaaaccaaattgcgagctgcaagttgatctcaataatatgcttgttcttgagggccacatacaatgcgcagcttacgagatgccgatacggcccgctgaagataagatttatttctcgcccgacctggccaccattgccgatgaacgcctgattaaagacgagcttggatactatcattgccatgacagattcaggccaaccccatcgaaattcgttgctattcgcgatacagaagaagatcatttcgctattgtcgatatttcccacggtagaaatattgtacttgaggaattagaagcatcgagagcatttttcactttatacgatggggcgatcttcttgcatcagggcaattcctatcttgtccgcgactttcagcccgatcgaaagatagccaaagtcgaaaaagtgaaagtagagtggacgacgcaacagagagactttactgatattgacccggtcgaatgtgaggttattcgcaaaattccaggctctttatcgagagcctttcacggtgccatccgcattactcaaaacgtctacggctatttcaaggtcgacaagaggcgtcggattcttgacgccgttcaagttgacaaccccccaatcattcgacatagcaaaggcatgtggcttgatgtccctaagaaggcgctcgagatccttgtagacaggcatcttaacgtagccggagcaatacacgccgctgaacacgcggtcatgagcttgatgccaaatttcgtcattagcatgcccggggatgtgcgaacggaatgcaaagtgggaatgaaagagtttgctcaaaaagaaacgacgagaaaacgtccggcacggctaacattttacgatgccaaagggggtgcaaacgggtccggcatcagtactaaggcattcgaattcatcgacgtacttcttgtgcaagctctcgagcgtgtgcagcattgtcattgcgaattagggtgcgttgaatgtgtctgctcggaactttgcaaacatgcaaatgaggtcatgagcaaggcaggaagttccgtgattctgaaaacgctgttggacatggaagttgatgttgatgcgctccccatgggccccgaggagatgagccctgcaggtatcgagactgttgtattagcaaagcccgtacctttcaggagtagtcttcgggtcgatgataaggaagtgggacatgaggaaaatgaaatcgtaacgtcttcttga

SEQ ID NO: 26582 - protein, 1141 aa, Muscodor strobelii
  misc_feature: SGI Peptide ID NO. 569093
  misc_feature (972)..(1062): Pfam Id: PF09369 Pfam Desc: Domain of function (DUF1998)
  misc_feature (368)..(547): Pfam Id: PF00270 Pfam Desc: DEAD/DEAH box helicase
  misc_feature (634)..(710): Pfam Id: PF00271 Pfam Desc: Helicase conserved C-terminal domain
  misc_feature (641)..(710): Pfam Id: PF00271 Pfam Desc: Helicase conserved C-terminal domain
  misc_feature (2)..(1136): NCBI GI: 261352231 Blast Desc: Hrq1p [Verticillium albo-atrum VaMs.102]
  misc_feature (46)..(1121): NCBI GI: 256720963 Blast Desc: [Nectria haematococca mpVI 77-13-4]
  misc_feature (7)..(1137): NCBI GI: 85107552 Blast Desc: NCU06365 [Neurospora crassa OR74A] gi|28924004|gb|EAA33163.1| NCU06365 [Neurospora crassa OR74A]
  misc_feature (46)..(1121): NCBI GI: 46110126 Blast Desc: FG01945.1 [Gibberella zeae PH-1]
  misc_feature (115)..(1118): NCBI GI: 145603412 Blast Desc: MGG_13223 [Magnaporthe grisea 70-15] gi|145011649|gb|EDJ96305.1| MGG_13223 [Magnaporthe grisea 70-15]
  misc_feature (1)..(988): NCBI GI: 154311192 Blast Desc: BC1G_06714 [Botryotinia fuckeliana B05.10] gi|150851118|gb|EDN26311.1| BC1G_06714 [Botryotinia fuckeliana B05.10]
  misc_feature (44)..(1135): NCBI GI: 189210659 Blast Desc: conserved [Pyrenophora tritici-repentis Pt-1C-BFP] gi|187977754|gb|EDU44380.1| conserved [Pyrenophora tritici-repentis Pt-1C-BFP]
  misc_feature (1)..(1115): NCBI GI: 169618774 Blast Desc: SNOG_12579 [Phaeosphaeria nodorum SN15] gi|160703678|gb|EAT79877.2| SNOG_12579 [Phaeosphaeria nodorum SN15]
  misc_feature (15)..(1130): NCBI GI: 121715534 Blast Desc: DEAD/DEAH box helicase, [Aspergillus clavatus NRRL 1] gi|119403533|gb|EAW13950.1| DEAD/DEAH box helicase, [Aspergillus clavatus NRRL 1]
  misc_feature (12)..(1121): NCBI GI: 169783406 Blast Desc: [Aspergillus oryzae RIB40] gi|83774909|dbj|BAE65032.1| protein product [Aspergillus oryzae]
MSSLKAATVSNKLVKRKRPQASRDASPTNPTTEVDSTKEDPAVSEKPKKARQTKKAQASAQIVECVIEWPSIFTQLEKTHRALNLVFTFCSTRKHLATTFDTIRSAVETHIKRELRIEDVAAIAAIRPEGIFFGYVDEVMLQTDIKGAERDMTFKSGRSKDITVQGPAPDASVGGLTGMDSLGSRHPDELPASGQEVLFYEFIDGDLKRQVQSRKSGEPVNPTRRLRDEDLKVPVYSQKQMTTLIEKRNQKFSNAISTFINRCVEGKLDPELILAQEAEACIPVRSQSNRSTPKLEPSTIPKSIPKERKSIPDIIQELKDSSWYTNQIVPDGHRVFEAQEAVLGELDFMLSQDMVNALYNAKNILHFYAHQTEAINSLHAGRHVVVSTSTSSGKSLIYQLPVLHGLENDPDTRAMYIFPTKALAQDQKRSLKDMLAYLPGLENVLVETFDGDTPMQDRNQIRDEARIIFTNPDMLHITILPQEDRWRMFLKNLRFVVVDELHYYNGLMGSHVAFIVRRLRRICAAVGNRKVKFVSCSATVANPQEHFKTIFGIDDVHLIDFDGSPSGRKEFLCWNTPYKDPGDPSSGRGSALAECARLFCQLILRGVRVIAFCRVRKQCEELVTATRYELESLGRPECVARVMGYRGGYTAQDRRNIESQMFEGKLMGIIATTALELGVDIGTLDCVITLGFPYTIANLRQQSGRAGRRNKDSLSILVGDCFPSDQHYMQNPDELFTKPNCELQVDLNNMLVLEGHIQCAAYEMPIRPAEDKIYFSPDLATIADERLIKDELGYYHCHDRFRPTPSKFVAIRDTEEDHFAIVDISHGRNIVLEELEASRAFFTLYDGAIFLHQGNSYLVRDFQPDRKIAKVEKVKVEWTTQQRDFTDIDPVECEVIRKIPGSLSRAFHGAIRITQNVYGYFKVDKRRRILDAVQVDNPPIIRHSKGMWLDVPKKALEILVDRHLNVAGAIHAAEHAVMSLMPNFVISMPGDVRTECKVGMKEFAQKETTRKRPARLTFYDAKGGANGSGISTKAFEFIDVLLVQALERVQHCHCELGCVECVCSELCKHANEVMSKAGSSVILKTLLDMEVDVDALPMGPEEMSPAGIETVVLAKPVPFRSSLRVDDKEVGHEENEIVTSS

SEQ ID NO: 26583 - DNA, 3933 bp, Muscodor strobelii
  misc_feature: SGI EST ID NO. CUFF.62797.0
  misc_feature: Variant of the nucleotide sequence at SEQ ID NO 26581
attgtaccaaaatttgttcaatttcgggggtaagactgatgttggatggtatagaggacgtcacgtgctcgcgcgccacgctaaaccaagacgcgctggtagcttgaatgatgggcgagagtggacgtcattcatatctcctttttttcacccagacacgctcaagctcgttttcacgcgttgtccaccacaatgcacctcgattacagctgaaatgtcgtctctcaaggctgccacggtctccaataaacttgtgaagaggaagagaccgcaggcatctcgagacgcctcccccaccaaccccaccacagaggtagacagcaccaaggaagatcctgctgtgtcagaaaagcccaaaaaggcgcgtcaaacaaagaaagcgcaggcatcagcgcagattgtcgaatgtgtaatcgagtggccatcgattttcacccagctagaaaagactcatcgagcattgaaccttgtctttaccttttgttccacgcgaaagcacttagctaccacgtttgataccattcgttcagctgtcgagactcatattaaacgcgagttgcggattgaagatgtggcagctatcgcagcaattcgcccagagggcattttcttcggctatgtggacgaggtgatgctgcaaaccgatatcaagggtgctgaacgagatatgacctttaaatctggtcgctcaaaggacattactgtgcagggtcctgcccctgatgcatcagtaggcggcttgacgggtatggatagtcttggcagtcggcatcccgatgagttacccgcaagcggccaggaggtgttattctacgagttcatcgatggcgatctcaagcgccaagttcagagccgaaaatccggggagcctgttaaccctactagacggctcagagacgaagacttgaaagtaccagtgtatagccaaaagcagatgactaccttgattgagaagcgtaaccaaaagttctccaatgctataagcacattcataaatcgatgtgtggagggcaaactcgaccccgagctgatccttgcccaagaagctgaagcatgtatacctgttcgttcgcaatcaaaccggtctacaccgaaacttgagccaagtaccatcccaaagtcaatcccgaaagaaaggaaaagcatacctgatattatacaggagctcaaagatagctcatggtacacgaatcagatcgtgccggacggacatcgtgtctttgaagcacaggaagccgttctcggcgaactggatttcatgttaagccaggatatggttaacgctctatataacgcgaaaaacattcttcacttctacgcgcaccaaactgaagccatcaacagccttcatgccggtcgtcatgtcgtcgtctccacttctacaagctctggcaagtcactgatctaccagttgcccgtcctgcatgggttggaaaatgaccctgatactcgagcaatgtacatttttccgacaaaagccttggctcaggatcagaagaggagcttgaaagacatgcttgcatatctacccggattagaaaatgtgcttgttgaaacatttgatggcgacacgcctatgcaagacagaaaccagattcgagatgaagctcgcatcattttcacaaatcccgacatgttacatatcactattctaccccaagaagatcggtggcgaatgttcctcaagaacttgcgtttcgtcgttgttgatgagctccattactataacggcttgatggggtctcacgtggcgttcatcgtgagaagacttcgacggatctgtgcagcagtcggcaatcgaaaggtcaaatttgtatcttgctccgcaactgtagcgaatccacaagagcacttcaagacgatattcggtatagatgacgtgcatttaatcgatttcgacggatcgccgtccggccgtaaagagttcttatgctggaacacgccttataaagaccctggagatccctcaagtggccgcggcagtgctctcgcagaatgcgcacgccttttctgccaactaatcttacgaggagttcgtgtaatagctttttgccgagtgcgaaaacagtgcgaagaactggtgacggccacgaggtacgaattggagtcgttaggacggccggagtgcgtagcccgcgtcatggggtatcgaggaggctataccgcccaggaccgccgaaacatcgagagtcaaatgtttgagggtaagttgatgggaatcatcgcgaccactgcactggaactaggcgttgacattggtacgcttgattgtgtcatcacccttggattcccatatactattgcaaaccttagacaacaaagtggaagagctggcagaaggaacaaagactccctctccatccttgtaggagattgcttcccctctgatcagcactacatgcaaaatcctgatgaactcttcaccaaaccaaattgcgagctgcaagttgatctcaataatatgcttgttcttgagggccacatacaatgcgcagcttacgagatgccgatacggcccgctgaagataagatttatttctcgcccgacctggccaccattgccgatgaacgcctgattaaagacgagcttggatactatcattgccatgacagattcaggccaaccccatcgaaattcgttgctattcgcgatacagaagaagatcatttcgctattgtcgatatttcccacggtagaaatattgtacttgaggaattagaagcatcgagagcatttttcactttatacgatggggcgatcttcttgcatcagggcaattcctatcttgtccgcgactttcagcccgatcgaaagatagccaaagtcgaaaaagtgaaagtagagtggacgacgcaacagagagactttactgatattgacccggtcgaatgtgaggttattcgcaaaattccaggctctttatcgagagcctttcacggtgccatccgcattactcaaaacgtctacggctatttcaaggtcgacaagaggcgtcggattcttgacgccgttcaagttgacaaccccccaatcattcgacatagcaaaggcatgtggcttgatgtccctaagaaggcgctcgagatccttgtagacaggcatcttaacgtagccggagcaatacacgccgctgaacacgcggtcatgagcttgatgccaaatttcgtcattagcatgcccggggatgtgcgaacggaatgcaaagtgggaatgaaagagtttgctcaaaaagaaacgacgagaaaacgtccggcacggctaacattttacgatgccaaagggggtgcaaacgggtccggcatcagtactaaggcattcgaattcatcgacgtacttcttgtgcaagctctcgagcgtgtgcagcattgtcattgcgaattagggtgcgttgaatgtgtctgctcggaactttgcaaacatgcaaatgaggtcatgagcaaggcaggaagttccgtgattctgaaaacgctgttggacatggaagttgatgttgatgcgctccccatgggccccgaggagatgagccctgcaggtatcgagactgttgtattagcaaagcccgtacctttcaggagtagtcttcgggtcgatgataaggaagtgggacatgaggaaaatgaaatcgtaacgtcttcttgatattatatatgtaaaataagcactgagtggtgtcacttcgatagataatgcaccctacaaaatatagaagaacggaaagcaacagcaagcacacagaagcattacaaaacggatcatttgcctgtggacattctcccgtagcattcgacatcagggaggcaaacagcactagcttgttcgatcttcatatgtcgcagataaccatagtatcacgtaccatttgtcatcattttcgagtaaacttccccaatggaagctcaagctttcgatgcacgcgcaaaagaatctccaga

SEQ ID NO: 26584 - DNA, 957 bp, Muscodor strobelii
  misc_feature: SGI cDNA ID NO. 569094
  misc_feature: Encodes the peptide sequence at SEQ ID NO 26585
atgaagactttcctggacttaataaacgaatgcgacaaattcccctatcccgccgacaaagagcaatataatgcaaagattaatagtctttacaaattcagggttgaaggcgttccagccgatctcgggtatatacttccaagcactgtgaagtctattggttggcctgggttctggacggtggacaacggctctcgtactgtgacgcttgcatcgagtggaggcgtgcaagagagaagcgagttgttcgaatcaacaatgcaagatgagcggagaaagggaacttttaagctcctcaaagggtgggggaacgagaagtacccagtatatggaccaaacaatgacgtggtcctgagtatcgagagagcaacaagtaccatctttgggatcatcacctacggggcacatttgactgcttttcgtaacgatgtcgacggactcaaagtgtacctgtccagaaggtcacgtggcaagctgacttacggcgggatgctggacagttgtgtcggtgggagcatcacgacgggcgagttaccgtgggagtgtatggtccgcgaagcggatgaagaagcatccattccactgcagctaatggagtcgagagcaagaagttgtggagccgtcacatacttctacattagggacgagcgagcagggggtgagatcggaatgatgcagcctgaatgccaattcgtgtacgagctcgacatgacagggcaagaattcgagcctaaacccaacgacggtgaggtcgaagaattcttgctatacaacgtcgagcagttgaagtcttgcctcgcgaacggagagttcaagcccaactctgcttgcatcctactagagtttctgctgcggcatggggttattacgccggagaacgagaaggattatctggagattcttttgcgcgtgcatcgaaagcttgagcttccattggggaagtttactcgaaaatga

SEQ ID NO: 26585 - protein, 318 aa, Muscodor strobelii
  misc_feature: SGI Peptide ID NO. 569094
  misc_feature (131)..(278): Pfam Id: PF00293 Pfam Desc: NUDIX domain
  misc_feature (143)..(278): Pfam Id: PF00293 Pfam Desc: NUDIX domain
  misc_feature (2)..(318): NCBI GI: 121713588 Blast Desc: thiamin pyrophosphokinase-related protein [Aspergillus clavatus NRRL 1] gi|119402558|gb|EAW12979.1| thiamin pyrophosphokinase-related protein [Aspergillus clavatus NRRL 1]
  misc_feature (2)..(311): NCBI GI: 119479107 Blast Desc: thiamin pyrophosphokinase-related protein [Neosartorya fischeri NRRL 181] gi|119407736|gb|EAW17685.1| thiamin pyrophosphokinase-related protein [Neosartorya fischeri NRRL 181]
  misc_feature (2)..(311): NCBI GI: 159126731 Blast Desc: thiamin pyrophosphokinase-related protein [Aspergillus fumigatus A1163]
  misc_feature (2)..(313): NCBI GI: 238496013 Blast Desc: thiamin pyrophosphokinase-related protein [Aspergillus flavus NRRL3357] gi|220694122|gb|EED50466.1| thiamin pyrophosphokinase-related protein [Aspergillus flavus NRRL3357]
  misc_feature (2)..(311): NCBI GI: 70997589 Blast Desc: thiamin pyrophosphokinase-related protein [Aspergillus fumigatus Af293] gi|66851173|gb|EAL91499.1| thiamin pyrophosphokinase-related protein [Aspergillus fumigatus Af293]
  misc_feature (2)..(311): NCBI GI: 258573939 Blast Desc: conserved [Uncinocarpus reesii 1704] gi|237901417|gb|EEP75818.1| conserved [Uncinocarpus reesii 1704]
  misc_feature (2)..(317): NCBI GI: 115401438 Blast Desc: conserved [Aspergillus terreus NIH2624] gi|114190248|gb|EAU31948.1| conserved [Aspergillus terreus NIH2624]
  misc_feature (2)..(311): NCBI GI: 240106039 Blast Desc: hydrolase, NUDIX family protein [Coccidioides posadasii C735 delta SOWgp]
  misc_feature (2)..(311): NCBI GI: 119192580 Blast Desc: CIMG_00667 [Coccidioides immitis RS]
  misc_feature (2)..(311): NCBI GI: 238841150 Blast Desc: thiamine pyrophosphokinase [Microsporum canis CBS 113480]
  misc_feature (6)..(317): SWISSPROT Homolog: EC 2.7.6.2 Thiamine diphosphokinase
MKTFLDLINECDKFPYPADKEQYNAKINSLYKFRVEGVPADLGYILPSTVKSIGWPGFWTVDNGSRTVTLASSGGVQERSELFESTMQDERRKGTFKLLKGWGNEKYPVYGPNNDVVLSIERATSTIFGIITYGAHLTAFRNDVDGLKVYLSRRSRGKLTYGGMLDSCVGGSITTGELPWECMVREADEEASIPLQLMESRARSCGAVTYFYIRDERAGGEIGMMQPECQFVYELDMTGQEFEPKPNDGEVEEFLLYNVEQLKSCLANGEFKPNSACILLEFLLRHGVITPENEKDYLEILLRVHRKLELPLGKFTRK

SEQ ID NO: 26586 - DNA, 1044 bp, Muscodor strobelii
  misc_feature: SGI cDNA ID NO. 569095
  misc_feature: Encodes the peptide sequence at SEQ ID NO 26587
atgaaattcctcaacttcttaatagtacaggctgggctaagcgatgccgctcttcgattcggatgttcaaccgtctctgttcagcggttggaccctgtcgtccaacctggcgaaataccctctgctcatgttcatcagatcgttggcggcaatgccttcaacgcaactatgcaaggtgatataggagagaagggcagttgcacgacatgcgcatttactgaggatttctcgaactactggacagcagtaatgtatttcaaacatgaaaatggctcctataagcgagtaccgcaatatccaaatgcgcaattgggcacggaaggtcgcgatgcgccagatatcaatggcggaatgacaatttactattcacagaaagacctttcctcaaatggcaatcagttcattactgccttccagcctggcttccgcatgactgttggatccccaacgattgacactctcaatggaacacatacaggccttcgatatacttgcctggaaacaattctcacccgaggcagcgagacaccagactttccgaagaagaagtgcccagcggggatcatggcaattcaccatttcccggcgtgttgggacggcaagaatctcgatagccctgaccatcaatcgcacatgtacagtacaacgaaagacttgtttctcgaggcgggaccttgtcctgcatctcatcctgttaggatgccacagcttgcatacgagacgatgtggaacacgacggcattcgaagacatgtggccaacggacggctcgcaaccgtttgtttggtcgtttgcaaacggagataacagtggcttcggaacacatgcagactatgtgtttggctggaagggtgatgctttgcaacgtgcaatgaacgactcctgcatgtttcacgcttgtggttcgcctgggcatgacggaattctcaagacgcagcccgttttggagatgaataaatgtgccgtgaagaacacggtgacagagaatgtaggcatagatgaatggatttcggagctccccggtcaaaagatgagcggcatgtga

SEQ ID NO: 26587 - protein, 347 aa, Muscodor strobelii
  misc_feature: SGI Peptide ID NO. 569095
  misc_feature (31)..(282): Pfam Id: PF09362 Pfam Desc: Domain of function (DUF1996)
  misc_feature (1)..(330): NCBI GI: 164425163 Blast Desc: NCU11317 [Neurospora crassa OR74A] gi|157070815|gb|EAA33351.2| conserved [Neurospora crassa OR74A]
  misc_feature (1)..(344): NCBI GI: 116178994 Blast Desc: conserved [Chaetomium globosum CBS 148.51] gi|88184422|gb|EAQ91890.1| conserved [Chaetomium globosum CBS 148.51]
  misc_feature (57)..(344): NCBI GI: 169597349 Blast Desc: SNOG_01460 [Phaeosphaeria nodorum SN15] gi|111069989|gb|EAT91109.1| SNOG_01460 [Phaeosphaeria nodorum SN15]
  misc_feature (19)..(345): NCBI GI: 39975065 Blast Desc: MGG_00321 [Magnaporthe grisea 70-15] gi|145018793|gb|EDK03072.1| MGG_00321 [Magnaporthe grisea 70-15]
  misc_feature (18)..(344): NCBI GI: 169596100 Blast Desc: SNOG_00801 [Phaeosphaeria nodorum SN15] gi|111071176|gb|EAT92296.1| SNOG_00801 [Phaeosphaeria nodorum SN15]
  misc_feature (1)..(331): NCBI GI: 171680783 Blast Desc: protein product [Podospora anserina] gi|27764287|emb|CAD60567.1| protein product [Podospora anserina] gi|170940019|emb|CAP65245.1| protein product [Podospora anserina]
  misc_feature (5)..(330): NCBI GI: 171685460 Blast Desc: protein product [Podospora anserina] gi|170942691|emb|CAP68344.1| protein product [Podospora anserina]
  misc_feature (1)..(341): NCBI GI: 169868148 Blast Desc: CC1G_10434 [Coprinopsis cinerea okayama7#130] gi|116498252|gb|EAU81147.1| CC1G_10434 [Coprinopsis cinerea okayama7#130]
  misc_feature (11)..(330): NCBI GI: 171678167 Blast Desc: protein product [Podospora anserina] gi|170937153|emb|CAP61810.1| protein product [Podospora anserina]
  misc_feature (19)..(344): NCBI GI: 189202536 Blast Desc: conserved [Pyrenophora tritici-repentis Pt-1C-BFP] gi|187984703|gb|EDU50191.1| conserved [Pyrenophora tritici-repentis Pt-1C-BFP]
MKFLNFLIVQAGLSDAALRFGCSTVSVQRLDPVVQPGEIPSAHVHQIVGGNAFNATMQGDIGEKGSCTTCAFTEDFSNYWTAVMYFKHENGSYKRVPQYPNAQLGTEGRDAPDINGGMTIYYSQKDLSSNGNQFITAFQPGFRMTVGSPTIDTLNGTHTGLRYTCLETILTRGSETPDFPKKKCPAGIMAIHHFPACWDGKNLDSPDHQSHMYSTTKDLFLEAGPCPASHPVRMPQLAYETMWNTTAFEDMWPTDGSQPFVWSFANGDNSGFGTHADYVFGWKGDALQRAMNDSCMFHACGSPGHDGILKTQPVLEMNKCAVKNTVTENVGIDEWISELPGQKMSGM

SEQ ID NO: 26588 - DNA, 315 bp, Muscodor strobelii
  misc_feature: SGI cDNA ID NO. 569096
  misc_feature: Elevated expression when VOC is produced
  misc_feature: Encodes the peptide sequence at SEQ ID NO 26589
atgaaattcctcaatctgcttctcggtgctgtcatgccgcttgcagcaatcgctgctgagaacggcaagtgcagtggcaccgccaccggtgcgtataagtcgaatgggatctgtattgatactggcgaatgcggagactacggcggctcatatatcactggtggctgtcccaacgatcctaacaacatcaagtgttgttatattcttggatgctatgactccacctcgtcgtgcagatttactgctgatggttgtagcggaccatttttgcaaggctactgtcctggtggttcgaattatcaatgctgtaactag

SEQ ID NO: 26589 - protein, 104 aa, Muscodor strobelii
  misc_feature: SGI Peptide ID NO. 569096
  misc_feature (1)..(104): NCBI GI: 225557452 Blast Desc: conserved [Ajellomyces capsulatus G186AR] gi|240278088|gb|EER41595.1| conserved [Ajellomyces capsulatus H143]
  misc_feature (1)..(104): NCBI GI: 170940297 Blast Desc: protein product [Podospora anserina]
  misc_feature (1)..(104): NCBI GI: 170940301 Blast Desc: protein product [Podospora anserina]
  misc_feature (21)..(104): NCBI GI: 171681537 Blast Desc: protein product [Podospora anserina] gi|170940727|emb|CAP65955.1| protein product [Podospora anserina]
  misc_feature (17)..(104): NCBI GI: 116208614 Blast Desc: CHGG_03600 [Chaetomium globosum CBS 148.51] gi|88184197|gb|EAQ91665.1| CHGG_03600 [Chaetomium globosum CBS 148.51]
  misc_feature (1)..(103): NCBI GI: 169868498 Blast Desc: CC1G_03049 [Coprinopsis cinerea okayama7#130] gi|116497978|gb|EAU80873.1| CC1G_03049 [Coprinopsis cinerea okayama7#130]
  misc_feature (1)..(103): NCBI GI: 119190869 Blast Desc: CIMG_05482 [Coccidioides immitis RS]
  misc_feature (29)..(103): NCBI GI: 240107339 Blast Desc: CPC735_066240 [Coccidioides posadasii C735 delta SOWgp]
  misc_feature (3)..(104): NCBI GI: 46116794 Blast Desc: FG04239.1 [Gibberella zeae PH-1]
  misc_feature (1)..(103): NCBI GI: 169869196 Blast Desc: [Coprinopsis cinerea okayama7#130] gi|116497808|gb|EAU80703.1| [Coprinopsis cinerea okayama7#130]
  misc_feature: Useful for introducing or modulating the production of volatile compounds
MKFLNLLLGAVMPLAAIAAENGKCSGTATGAYKSNGICIDTGECGDYGGSYITGGCPNDPNNIKCCYILGCYDSTSSCRFTADGCSGPFLQGYCPGGSNYQCCN

SEQ ID NO: 26590 - DNA, 669 bp, Muscodor strobelii
  misc_feature: SGI EST ID NO. CUFF.62818.0
  misc_feature: Variant of the nucleotide sequence at SEQ ID NO 26588
attggaaccttgcttttgtcactctcctccaaacataaatttagagcaatctcgcacattgtttcccgatcattgtcccatcgagtcttctacacgttgcaaacctttcctcagctttctggatatcaaagcaccttacatactacatacctgccaatatgaaattcctcaatctgcttctcggtgctgtcatgccgcttgcagcaatcgctgctgagaacggcaagtgcagtggcaccgccaccggtgcgtataagtcgaatgggatctgtattgatactggcgaatgcggagactacggcggctcatatatcactggtggctgtcccaacgatcctaacaacatcaagtgttgttatattcttggatgctatgactccacctcgtcgtgcagatttactgctgatggttgtagcggaccatttttgcaaggctactgtcctggtggttcgaattatcaatgctgtaactatgcctagtatgattgattatatggtagttagcgcaattggggaatttggaggattgatgatgaaagaagtcaacaataacgggccgttaaaatttattctttacatttgctgctttaaagaacatcaacagagttttcgagtatgactgaatttgatactcatgtggttccttactattctcataaatataattcca

SEQ ID NO: 26591 - DNA, 819 bp, Muscodor strobelii
  misc_feature: SGI cDNA ID NO. 569097
  misc_feature: Elevated expression when VOC is produced
  misc_feature: Encodes the peptide sequence at SEQ ID NO 26592
atgggattcacacctctccgtaccacatttgaggctggctcaaaagctttcggcttctggttgtgtctcccgactgctgccggtgcaaaaaccattcttcgctcagcagcgtccatatcaggaggcttctcatgggttctagttgatgccgagcatggtttaatcacagataaggactactatgagctagtgaatgcaattgcggcagagggcgcaagcccaatcatccgtgtcccatggaatgaggagtggatgattaagcgagcacttgatgctggagcacatggtgttttgacgcctatgtgtcacaccccagaagatgctgaacgcatcgtgaaattctctaaatacccccctttcgggtcgagaggttatggtcctatgctagcatctcatactttgcctattgcacagggcggggctgtctatgacgcttcggctgacaagagtctttttgtcatggtacagatagagtctaagtcgggtgtggaccacgttgaggagatcgctaaagttgagggacttgatgtgttgcttatcggaccattcgatcttgctaaacagctgaacgtcgcgcacggaggagaagagcatgaagcggctattgcacgcattttgaagggagcgaaatcagctggaaagattgcagctattttttgcacaagcggagcccaggcgagagcccgactagagcaaggcttcgacatggtctctgttattcctgaccttaatattctcggcgacggaatggcgcatgagttgaagattgctagtggggatggatcagacgttacaaagcaacaaaaggacagctattaa

SEQ ID NO: 26592 - protein, 272 aa, Muscodor strobelii
  misc_feature: SGI Peptide ID NO. 569097
  misc_feature (16)..(249): Pfam Id: PF03328 Pfam Desc: HpcH/HpaI aldolase/citrate lyase family
  misc_feature (45)..(186): Pfam Id: PF03328 Pfam Desc: HpcH/HpaI aldolase/citrate lyase family
  misc_feature (5)..(261): NCBI GI: 115388715 Blast Desc: conserved [Aspergillus terreus NIH2624] gi|114195947|gb|EAU37647.1| conserved [Aspergillus terreus NIH2624]
  misc_feature (4)..(272): NCBI GI: 242782343 Blast Desc: 2,4-dihydroxyhept-2-ene-1,7-dioic acid aldolase [Talaromyces stipitatus ATCC 10500] gi|218720127|gb|EED19546.1| 2,4-dihydroxyhept-2-ene-1,7-dioic acid aldolase [Talaromyces ATCC
  misc_feature (1)..(272): NCBI GI: 212527016 Blast Desc: 2,4-dihydroxyhept-2-ene-1,7-dioic acid aldolase [Penicillium marneffei ATCC 18224] gi|210073063|gb|EEA27150.1| 2,4-dihydroxyhept-2-ene-1,7-dioic acid aldolase [Penicillium ATCC
  misc_feature (1)..(272): NCBI GI: 255955543 Blast Desc: Pc21g15140 [Penicillium chrysogenum Wisconsin 54-1255] gi|211590235|emb|CAP96411.1| Pc21g15140 [Penicillium chrysogenum Wisconsin 54-1255]
  misc_feature (6)..(272): NCBI GI: 238506345 Blast Desc: 4-hydroxy-2-oxovalerate aldolase, [Aspergillus flavus NRRL3357] gi|220689087|gb|EED45438.1| 4-hydroxy-2-oxovalerate aldolase, [Aspergillus flavus NRRL3357]
  misc_feature (4)..(259): NCBI GI: 75858934 Blast Desc: AN9425.2 [Aspergillus nidulans FGSC A4] gi|40747677|gb|EAA66833.1| AN9425.2 [Aspergillus nidulans FGSC A4] gi|259486649|tpe|CBF84672.1| TPA: acid aldolase AFUA_1G11530)
  misc_feature (33)..(272): NCBI GI: 256731195 Blast Desc: NECHADRAFT_48742 [Nectria haematococca mpVI 77-13-4]
  misc_feature (4)..(260): NCBI GI: 58264832 Blast Desc: [Cryptococcus neoformans var. neoformans JEC21] gi|134109685|ref|XP_776392.1| CNBC4470 [Cryptococcus neoformans var. neoformans B-3501A] gi|50259068|gb|EAL21745.1| CNBC4470 var.
  misc_feature (4)..(255): NCBI GI: 145234991 Blast Desc: An03g02490 [Aspergillus niger] gi|134057820|emb|CAK38215.1| protein product [Aspergillus niger]
  misc_feature (4)..(255): NCBI GI: 58266598 Blast Desc: [Cryptococcus neoformans var. neoformans JEC21] gi|134111116|ref|XP_775700.1| CNBD4290 [Cryptococcus neoformans var. neoformans B-3501A] gi|50258364|gb|EAL21053.1| CNBD4290 var.
  misc_feature (41)..(246): SWISSPROT Homolog: EC 4.1.2.20 2-dehydro-3-deoxyglucarate aldolase
  misc_feature: Useful for introducing or modulating the production of volatile compounds
MGFTPLRTTFEAGSKAFGFWLCLPTAAGAKTILRSAASISGGFSWVLVDAEHGLITDKDYYELVNAIAAEGASPIIRVPWNEEWMIKRALDAGAHGVLTPMCHTPEDAERIVKFSKYPPFGSRGYGPMLASHTLPIAQGGAVYDASADKSLFVMVQIESKSGVDHVEEIAKVEGLDVLLIGPFDLAKQLNVAHGGEEHEAAIARILKGAKSAGKIAAIFCTSGAQARARLEQGFDMVSVIPDLNILGDGMAHELKIASGDGSDVTKQQKDSY

SEQ ID NO: 26593 - DNA, 3723 bp, Muscodor strobelii
  misc_feature: SGI EST ID NO. CUFF.62838.0
  misc_feature: Variant of the nucleotide sequence at SEQ ID NO 26591
tagcatggtctagtcatcgattatactctgaaccaactcattcaatgtgtagatgcacgtcgcaatccgtttagtttaaccgatcggctatggcggagggcgagagtgcatcgtcggccaactagcgatgcgtggggtcggcaagcgtcggacctctatctctatgttgatccactgtcgtacaagagcctcaggagcttgattgatggctcaatgacgagtttaaagggggggttccataaaccccagtattgggcaagctcagagccattatcattcctctaccttgcatatcatccttcggctatctcgtttgtagtacttgattctacgatcactactcgactaaataagcttttgtgtcaattattcactattggaagaaacactgatagcctgagacacaatgggattcacacctctccgtaccacatttgaggctggctcaaaagctttcggcttctggttgtgtctcccgactgctgccggtgcaaaaaccattcttcgctcagcagcgtccatatcaggaggcttctcatgggttctagttgatgccgagcatggtttaatcacagataaggactactatgagctagtgaatgcaattgcggcagagggcgcaagcccaatcatccgtgtcccatggaatgaggagtggatgattaagcgagcacttgatgctggagcacatggtgttttgacgcctatgtgtcacaccccagaagatgctgaacgcatcgtgaaattctctaaatacccccctttcgggtcgagaggttatggtcctatgctagcatctcatactttgcctattgcacagggcggggctgtctatgacgcttcggctgacaagagtctttttgtcatggtacagatagagtctaagtcgggtgtggaccacgttgaggagatcgctaaagttgagggacttgatgtgttgcttatcggaccattcgatcttgctaaacagctgaacgtcgcgcacggaggagaagagcatgaagcggctattgcacgcattttgaagggagcgaaatcagctggaaagattgcagctattttttgcacaagcggagcccaggcgagagcccgactagagcaaggcttcgacatggtctctgttattcctgaccttaatattctcggcgacggaatggcgcatgagttgaagattgctagtggggatggatcagacgttacaaagcaacaaaaggacagctattaaggatacttaattctcgtcactacacggtagtattctacataatagcccatggttcacatttatagaacatttagcccaaacatattctctatttaacactatgtaggtatctgaaagagttattatgaagcttggaacatgtagtgaattgcgatgcttacaaggtacctggaaccatacaccagaggcctttattacatgactcaaaatgttatatattgacgtcgaccgtttttgcattaatatcgaacatgcgccgtaagttgatgcaaagcgcaaaggaactacagcagttgcctgccaacaccagaaggagtacgtccagatcgtataataactcagtccgcaacagtcctttcctgctttatgagaggctcttttgtcttgtcagcatctggcttgacccggcctaagtaccactccactgacaacttgtacaaggtccatgtgatctgaagaagaacaatgtcggcaatgaaaatggagattagcaggtttagagtcgtttttagctgcggcacctagcataaatactaagctgagaaaaccgacggtgtaatcccgggtggccccgttaaagttttgtttaatgcttgtgcctctgcatagctcatggtaccgggtccgccaactgtattaccgtcggcaacctccttagttgcagtaatgttagccgtaaaggatgtaagtgttgatacatcagccagcaagttccccaaggtccccggctatccaagatccgtgagaattgtcgaccaagtcgactttgccagtccgtctaacgcgtaccaaacatccgggaacctgcccctctaactcaacccaagcgcagtgctctcttacgcgtcgtcttcgttagcccatatgtcataagtgccgtatcctaagtctgctaagaatcagtattggatattaaagaaattcggatccataatatctgtcactgtatggccttcaatcttgttcggcgtaaaagtaatgaaaccttttatgaggcctgcctcgccagcactcgtattcgcctcgcgtatcgtttacatctcgtaaataactaataaatagtatatcgacataaaagtctctccccaccacaagcttgctcggtcgtccttatcatgatcgaaaaagttatcgccatggtaacgatacacgctactaaaggtaacagtttcaaggacgtagtcgtaggtctgtgtgaggttaaagaacacagcgccgtctaaggtttggatctagcacgttatcgacgttcgcacaacgacgccccatttggcaagtgctatttaattagccgctcgactaagggcgctatagacaagatcgatattattgatcgagcagccttcaatcagctgattcgtgtaagctagggatggggatagctcgtgattatgtttgaccccgagcgtccttttccaaacggactgtaaactgtagactaatgctgtctgatttgtaaagagctgcgagttaacaggaatgcctaccgactggcacgaaggctcgacctttgccgttaagtacgaaggccaatgttggagccaaacaccatcagaaatggtggcgttagggttggaagaaacctgtacagccagatcgtacccgctcgaagcgaagttgaggaaggtgtaaagggtcgtagcaacgatgaataaagcgatggtgacaggcgtaaaccacttgaaagggtatggccgagttaggttatagttgaagaaggattcatactggccaaccatcattgggtgtgtaatgacgattaggattcgtgggaaaggtatactttacaggtaaaagaaacgttaagtctttaggagtgttgtagatgtactgagtatgagcgagcgcgatcgcaggacgttatcgcagatgttgattcttgcaacgccatgttcacaatagcacggcatcgaaaaggggcttgcgggggaattcagctggtacgattgttaacaaagctatatgcatctttacgcgcccacgttaccgccgtctagggatgttcgagaaacgcagcttgccgacgaatcagagactagtgccattaggcagccggtcggtatcgtgctccggtcagcagtcatgccggtgcggatgaacacccgttctccaagactctccccaattttgagggtcgaaagcgccccggagctattctatgagcttgcgatgagtaggtcggcggatatttaccgtgtttcaattttcatcaggtcccatcaccccaacttatcccatgattcattcgctccaatgtccatactagtgattatgatatttaagtattgtacttgcggcgatttatgcaaaaaagcaatggaatccaatacctgagctaggtgaagatggcactgcaaggcaacttggttaagtcagaaaccgacccgtcgcctggatgacaatgagatatcaccaatttgtaaaacaaggcttccgcataggaaaagctatcaagagaatagcaaatggtttctaagaagaagaaaattgacttacag

SEQ ID NO: 26594 - DNA, 819 bp, Muscodor strobelii
  misc_feature: SGI cDNA ID NO. 569098
  misc_feature: Encodes the peptide sequence at SEQ ID NO 26595
atgggattcacacctctccgtaccacatttgaggctggctcaaaagctttcggcttctggttgtgtctcccgactgctgccggtgcaaaaaccattcttcgctcagcagcgtccatatcaggaggcttctcatgggttctagttgatgccgagcatggtttaatcacagataaggactactatgaggtagtgaatgcaattgcggcagagggcgcaagcccaatcatccgtgtcccatggaatgaggagtggatgattaagcgagcacttgatgctggagcacatggtgttttgacgcctatgtgtcacaccccagaagatgctgaacgcatcgtgaaattctctaaatacccccctttcgggtcgagaggttatggtcctatgctagcatctcatactttgcctattgcacagggcggggctgtctatgacgcttcggctgacaagagtctttttgtcatggtacagatagagtctaagtcgggtgtggaccacgttgaggagatcgctaaagttgagggacttgatgtgttgcttatcggaccattcgatcttgctaaacagctgaacgtcgcgcacggaggagaagagcatgaagcggctattgcacgcattttgaagggagcgaaatcagctggaaagattgcagctattttttgcacaagcggagcccaggcgagagcccgactagagcaaggcttcgacatggtctctgttattcctgaccttaatattctcggcgacggaatggcgcatgagttgaagattgctagtggggatggatcagacgttacaaagcaacaaaaggacagctattaa

SEQ ID NO: 26595 - protein, 272 aa, Muscodor strobelii
  misc_feature: SGI Peptide ID NO. 569098
  misc_feature (16)..(249): Pfam Id: PF03328 Pfam Desc: HpcH/HpaI aldolase/citrate lyase family
  misc_feature (45)..(186): Pfam Id: PF03328 Pfam Desc: HpcH/HpaI aldolase/citrate lyase family
  misc_feature (5)..(261): NCBI GI: 115388715 Blast Desc: conserved [Aspergillus terreus NIH2624] gi|114195947|gb|EAU37647.1| conserved [Aspergillus terreus NIH2624]
  misc_feature (4)..(272): NCBI GI: 242782343 Blast Desc: 2,4-dihydroxyhept-2-ene-1,7-dioic acid aldolase [Talaromyces stipitatus ATCC 10500] gi|218720127|gb|EED19546.1| 2,4-dihydroxyhept-2-ene-1,7-dioic acid aldolase [Talaromyces ATCC
  misc_feature (1)..(272): NCBI GI: 212527016 Blast Desc: 2,4-dihydroxyhept-2-ene-1,7-dioic acid aldolase [Penicillium marneffei ATCC 18224] gi|210073063|gb|EEA27150.1| 2,4-dihydroxyhept-2-ene-1,7-dioic acid aldolase [Penicillium ATCC
  misc_feature (1)..(272): NCBI GI: 255955543 Blast Desc: Pc21g15140 [Penicillium chrysogenum Wisconsin 54-1255] gi|211590235|emb|CAP96411.1| Pc21g15140 [Penicillium chrysogenum Wisconsin 54-1255]
  misc_feature (6)..(272): NCBI GI: 238506345 Blast Desc: 4-hydroxy-2-oxovalerate aldolase, [Aspergillus flavus NRRL3357] gi|220689087|gb|EED45438.1| 4-hydroxy-2-oxovalerate aldolase, [Aspergillus flavus NRRL3357]
  misc_feature (4)..(259): NCBI GI: 75858934 Blast Desc: AN9425.2 [Aspergillus nidulans FGSC A4] gi|40747677|gb|EAA66833.1| AN9425.2 [Aspergillus nidulans FGSC A4] gi|259486649|tpe|CBF84672.1| TPA: acid aldolase AFUA_1G11530)
  misc_feature (33)..(272): NCBI GI: 256731195 Blast Desc: NECHADRAFT_48742 [Nectria haematococca mpVI 77-13-4]
  misc_feature (4)..(260): NCBI GI: 58264832 Blast Desc: [Cryptococcus neoformans var. neoformans JEC21] gi|134109685|ref|XP_776392.1| CNBC4470 [Cryptococcus neoformans var. neoformans B-3501A] gi|50259068|gb|EAL21745.1| CNBC4470 var.
  misc_feature (4)..(255): NCBI GI: 145234991 Blast Desc: An03g02490 [Aspergillus niger] gi|134057820|emb|CAK38215.1| protein product [Aspergillus niger]
  misc_feature (4)..(255): NCBI GI: 58266598 Blast Desc: [Cryptococcus neoformans var. neoformans JEC21] gi|134111116|ref|XP_775700.1| CNBD4290 [Cryptococcus neoformans var. neoformans B-3501A] gi|50258364|gb|EAL21053.1| CNBD4290 var.
  misc_feature (41)..(246): SWISSPROT Homolog: EC 4.1.2.20 2-dehydro-3-deoxyglucarate aldolase
MGFTPLRTTFEAGSKAFGFWLCLPTAAGAKTILRSAASISGGFSWVLVDAEHGLITDKDYYEVVNAIAAEGASPIIRVPWNEEWMIKRALDAGAHGVLTPMCHTPEDAERIVKFSKYPPFGSRGYGPMLASHTLPIAQGGAVYDASADKSLFVMVQIESKSGVDHVEEIAKVEGLDVLLIGPFDLAKQLNVAHGGEEHEAAIARILKGAKSAGKIAAIFCTSGAQARARLEQGFDMVSVIPDLNILGDGMAHELKIASGDGSDVTKQQKDSY

SEQ ID NO: 26596 - DNA, 3723 bp, Muscodor strobelii; identical to SEQ ID NO: 26593
  misc_feature: SGI EST ID NO. CUFF.62838.0
  misc_feature: Variant of the nucleotide sequence at SEQ ID NO 26594

SEQ ID NO: 26597 - DNA, 759 bp, Muscodor strobelii
  misc_feature: SGI cDNA ID NO. 569099
  misc_feature: Encodes the peptide sequence at SEQ ID NO 26598
atgactatcattctagtaacaggcggcaaccgtggcatcggcttcgctatagtcgaagccttgggctctcgaataccagatgccactattctgatgggttgcaggtcaacgaccaaagcagacgaagccatccaagaccttaagcaaaaaggagtctcggcaaagctcgaagcactcgaaattactataactgatgatagtagcatccgtgctgctgtagagaaagtagagagagtttatgggaaattagatgtgcttgtcaacaatgctggcgctgtgtcgcttcccaagtccgacgatttgactgaaattcgagagaactggggtcaaactctggacagcatgttgacatcccaagtccttgtgacaagagctttcttaccactacttagaaagtcggcatggggccgagtgataatgaactcaagtgcgcgcggtagtctcacaaggaacgatttacgagagcttccaccgacgcagcactggctgtataactgttccaaagcagctctgaacctgactacgatcgagttccgtaacgatgaagctagcaaagtcgcgaatgaatcgggccgcgtcacattctggacagtcagccctgggcactgtaagacgggattcaataactttcgagggatcaaagacccgcttgagggggcagaagtcacagccaggttgctggagtcgcagcggggagacatcccctcgggcacattctgggagtttgaacacgggaagtttcagcaggtgccttggtaa

SEQ ID NO: 26598 - protein, 252 aa, Muscodor strobelii
  misc_feature: SGI Peptide ID NO. 569099
  misc_feature (2)..(154): Pfam Id: PF00106 Pfam Desc: short chain dehydrogenase
  misc_feature (2)..(146): Pfam Id: PF00106 Pfam Desc: short chain dehydrogenase
  misc_feature (1)..(252): NCBI GI: 256722740 Blast Desc: NECHADRAFT_87211 [Nectria haematococca mpVI 77-13-4]
  misc_feature (3)..(252): NCBI GI: 169619672 Blast Desc: SNOG_13034 [Phaeosphaeria nodorum SN15] gi|111058241|gb|EAT79361.1| SNOG_13034 [Phaeosphaeria nodorum SN15]
  misc_feature (3)..(252): NCBI GI: 70990000 Blast Desc: short chain dehydrogenase/reductase family protein [Aspergillus fumigatus Af293] gi|66847481|gb|EAL87811.1| short chain dehydrogenase/reductase family protein [Aspergillus Af293]
  misc_feature (2)..(239): NCBI GI: 145252074 Blast Desc: An16g02370 [Aspergillus niger] gi|134083093|emb|CAL00461.1| protein product [Aspergillus niger]
  misc_feature (2)..(252): NCBI GI: 171696136 Blast Desc: protein product [Podospora anserina] gi|170948310|emb|CAP60474.1| protein product [Podospora anserina]
  misc_feature (3)..(244): NCBI GI: 145229863 Blast Desc: An01g08150 [Aspergillus niger] gi|134055353|emb|CAK43907.1| protein product [Aspergillus niger]
  misc_feature (3)..(233): NCBI GI: 115433010 Blast Desc: [Aspergillus terreus NIH2624] gi|114189494|gb|EAU31194.1| [Aspergillus terreus NIH2624]
  misc_feature (3)..(239): NCBI GI: 256723532 Blast Desc: NECHADRAFT_42034 [Nectria haematococca mpVI 77-13-4]
  misc_feature (3)..(252): NCBI GI: 114049979 Blast Desc: ketoacyl reductase [Streptomyces ambofaciens] gi|114050201|emb|CAK51234.1| ketoacyl reductase [Streptomyces ambofaciens]
  misc_feature (3)..(231): NCBI GI: 256724418 Blast Desc: NECHADRAFT_105729 [Nectria haematococca mpVI 77-13-4]
  misc_feature (3)..(205): SWISSPROT Homolog: EC 1.1.1.100 3-oxoacyl-[acyl-carrier-protein] reductase
MTIILVTGGNRGIGFAIVEALGSRIPDATILMGCRSTTKADEAIQDLKQKGVSAKLEALEITITDDSSIRAAVEKVERVYGKLDVLVNNAGAVSLPKSDDLTEIRENWGQTLDSMLTSQVLVTRAFLPLLRKSAWGRVIMNSSARGSLTRNDLRELPPTQHWLYNCSKAALNLTTIEFRNDEASKVANESGRVTFWTVSPGHCKTGFNNFRGIKDPLEGAEVTARLLESQRGDIPSGTFWEFEHGKFQQVPW

SEQ ID NO: 26599 - DNA, 231 bp, Muscodor strobelii
  misc_feature: SGI cDNA ID NO. 569100
  misc_feature: Encodes the peptide sequence at SEQ ID NO 26600
atggccggccctgctatgtacaatgttctcggccgccaagttggctcccaccacctcgctatgggtgtactcggtgctcttttcggcggtagctacctcgctctcagcggtggaagcaagaagaccgctactcagactcccccgatcaacgcctccagccccgacgaagccgacttcattcagaattttctgaagcaggccgatgccgacgagaagaagagcaagcactag

SEQ ID NO: 26600 - protein, 76 aa, Muscodor strobelii
  misc_feature: SGI Peptide ID NO. 569100
  misc_feature (6)..(73): NCBI GI: 261354953 Blast Desc: VDBG_03490 [Verticillium albo-atrum VaMs.102]
  misc_feature (5)..(76): NCBI GI: 121714409 Blast Desc: ACLA_054360 [Aspergillus clavatus NRRL 1] gi|119402969|gb|EAW13389.1| ACLA_054360 [Aspergillus clavatus NRRL 1]
  misc_feature (7)..(72): NCBI GI: 212535774 Blast Desc: conserved [Penicillium marneffei ATCC 18224] gi|210070442|gb|EEA24532.1| conserved [Penicillium marneffei ATCC 18224]
  misc_feature (7)..(73): NCBI GI: 255936043 Blast Desc: Pc13g06140 [Penicillium chrysogenum Wisconsin 54-1255] gi|211583668|emb|CAP91683.1| Pc13g06140 [Penicillium chrysogenum Wisconsin 54-1255]
  misc_feature (1)..(68): NCBI GI: 256726825 Blast Desc: [Nectria haematococca mpVI 77-13-4]
  misc_feature (3)..(73): NCBI GI: 171691022 Blast Desc: protein product [Podospora anserina] gi|170945459|emb|CAP71571.1| protein product [Podospora anserina]
  misc_feature (7)..(76): NCBI GI: 238508625 Blast Desc: conserved [Aspergillus flavus NRRL3357] gi|220688392|gb|EED44745.1| conserved [Aspergillus flavus NRRL3357]
  misc_feature (1)..(68): NCBI GI: 46121775 Blast Desc: FG05266.1 [Gibberella zeae PH-1]
  misc_feature (7)..(76): NCBI GI: 259483642 Blast Desc: TPA: conserved [Aspergillus nidulans FGSC A4]
  misc_feature (5)..(76): NCBI GI: 189194183 Blast Desc: PTRG_03097 [Pyrenophora tritici-repentis Pt-1C-BFP] gi|187978994|gb|EDU45620.1| PTRG_03097 [Pyrenophora tritici-repentis Pt-1C-BFP]
MAGPAMYNVLGRQVGSHHLAMGVLGALFGGSYLALSGGSKKTATQTPPINASSPDEADFIQNFLKQADADEKKSKH

SEQ ID NO: 26601 - DNA, 1113 bp, Muscodor strobelii
  misc_feature: SGI EST ID NO. CUFF.62906.0
  misc_feature: Variant of the nucleotide sequence at SEQ ID NO 26599
gatacgtcttatcgtatgcaactgtatattatttcctatggagtaaagtctggaatttcattcaaaaagcagtttcgattgtaagcggcttcgttgaatctgcacgatggttttgctgaaatcgccgagccaggtagctaaatgtttcgtccaagataaatatatatgcatgtctagctaatttggacttatcgcgcataggtatgcgtaaagcagggatttgtctctgagctaaggccatcggatttcaattgagcttttgagcgctattccagcccttcaacatcgacgacgctcattcaccccatcgcatctacactcgccgctaattcctcctctacgacacatcaataaccgtcaaaatggccggccctgctatgtacaatgttctcggccgccaagttggctcccaccacctcgctatgggtgtactcggtgctcttttcggcggtagctacctcgctctcagcggtggaagcaagaagaccgctactcagactcccccgatcaacgcctccagccccgacgaagccgacttcattcagaattttctgaagcaggccgatgccgacgagaagaagagcaagcactagatgtaacatcacgaggcgggcgctggtttgatcggaatagaggtcaattgtacatatagaggctacaatccaaaacatcgacatttcgacgacgtgttaccaaggcacctgctgaaacttcccgtgttcaaactcccagaatgtgcccgaggggatgtctccccgctgcgactccagcaacctggctgtgacttctgccccctcaagcgggtctttgatccctcgaaagttattgaatcccgtcttacagtgcccagggctgactgtccagaatgtgacgcggcccgattcattcgcgactttgctagcttcatcgttacggaactcgatcgtagtcaggttcagagctgctttggaacagttatacagccagtgctgcgtcggtggaagctgtgtttgatgagcatgaaatatgacaatcccacgtcttggtagcggcacatacctctcgtaaatcgttccttgtgagactaccgcgcgcacttgagttcattatcactcggccccatgccgactttct

SEQ ID NO: 26602 - DNA, 891 bp, Muscodor strobelii
  misc_feature: SGI cDNA ID NO. 569101
  misc_feature: Encodes the peptide sequence at SEQ ID NO 26603
atgttttggggccgaggatcagacaagaaacccgaagacaaagctccagaagccgcccaagcttcgggaaccagcgtcgacccgcgcaaagacgccacgcaattcgatcccgacaagctgccagagcgccggaaactgcccaagaacctgcagaagattgtcgagaagtccgacaaggaagagaatttctttgatgagttagtggatggatatgttcccgactccaccgagtccaacgttcgatatgccgcctacgcgaaccgactgcggaccatcatgctctcggcccaccgctatgtcgcctacacgtctgacataggcgaatccttccgtcccgtagcgcacccatggcttgtccgtagtgcgtacggtatctcgtggagttatatccttggagatgtctcatacgagggctacaaggcttattggcagaaccagcgagccttgaacccccagctcgagctctccgagagggctcaaaaagctaccggactgtctgtccccgctccctccgatgtgaagcccggagctgtggcaccactcgaggactatcgaacggtaatggtgcagcgaggcatcttccagagcgtcgcatccatgggtctgccagctttcaccatccacagcgtcgtccgatactccgggcgcgcactgaaagacgccaagaacaagacggtgcgagtctggggtcccatcggtctaggtctcgccgttgtgccattcctaccaacgctattcgacaagcccgtcgagaatgctgttgaatggatgttccacaagggattcgcgctgtacggcggtcaagcctacatcggcgacactccatccatgggacgggaggcaacccttcaccagagacctaggaaagacccaaaggataaggaattgtag

SEQ ID NO: 26603 - protein, 296 aa, Muscodor strobelii
  misc_feature: SGI Peptide ID NO. 569101
  misc_feature (2)..(296): NCBI GI: 39952129 Blast Desc: MGG_01707 [Magnaporthe grisea 70-15] gi|145020449|gb|EDK04578.1| MGG_01707 [Magnaporthe grisea 70-15]
  misc_feature (1)..(296): NCBI GI: 261354952 Blast Desc: conserved [Verticillium albo-atrum VaMs.102]
  misc_feature (1)..(294): NCBI GI: 171691024 Blast Desc: protein product [Podospora anserina] gi|170945460|emb|CAP71572.1| protein product [Podospora anserina]
  misc_feature (2)..(287): NCBI GI: 164425006 Blast Desc: NCU06587 [Neurospora crassa OR74A] gi|157070750|gb|EAA32711.2| conserved [Neurospora crassa OR74A]
  misc_feature (1)..(296): NCBI GI: 46121779 Blast Desc: FG05267.1 [Gibberella zeae PH-1]
  misc_feature (1)..(296): NCBI GI: 256727394 Blast Desc: [Nectria haematococca mpVI 77-13-4]
  misc_feature (37)..(291): NCBI GI: 154317599 Blast Desc: BC1G_03151 [Botryotinia fuckeliana B05.10] gi|150844325|gb|EDN19518.1| BC1G_03151 [Botryotinia fuckeliana B05.10]
  misc_feature (37)..(287): NCBI GI: 156049505 Blast Desc: SS1G_08459 [Sclerotinia sclerotiorum 1980] gi|154692858|gb|EDN92596.1| SS1G_08459 [Sclerotinia sclerotiorum 1980]
  misc_feature (41)..(296): NCBI GI: 189194185 Blast Desc: conserved [Pyrenophora tritici-repentis Pt-1C-BFP] gi|187978995|gb|EDU45621.1| conserved [Pyrenophora tritici-repentis Pt-1C-BFP]
  misc_feature (38)..(269): NCBI GI: 154272131 Blast Desc: conserved [Ajellomyces capsulatus NAm1] gi|150408905|gb|EDN04361.1| conserved [Ajellomyces capsulatus NAm1]
MFWGRGSDKKPEDKAPEAAQASGTSVDPRKDATQFDPDKLPERRKLPKNLQKIVEKSDKEENFFDELVDGYVPDSTESNVRYAAYANRLRTIMLSAHRYVAYTSDIGESFRPVAHPWLVRSAYGISWSYILGDVSYEGYKAYWQNQRALNPQLELSERAQKATGLSVPAPSDVKPGAVAPLEDYRTVMVQRGIFQSVASMGLPAFTIHSVVRYSGRALKDAKNKTVRVWGPIGLGLAVVPFLPTLFDKPVENAVEWMFHKGFALYGGQAYIGDTPSMGREATLHQRPRKDPKDKEL

SEQ ID NO: 26604 - DNA, 2795 bp, Muscodor strobelii
  misc_feature: SGI EST ID NO. CUFF.62952.0
  misc_feature: Variant of the nucleotide sequence at SEQ ID NO 26602
caaactcgagatcaacgtgggtcgatttccatgcgggtattgtaggactccgtaggtgcgacgtcaccgcaatagctcccgctttcttcctctaggcccgcgtttgtgcaaccatctaactcccgcgactttctccatcagatcagtcccggcaaatcactatacaacacattggaccgctagaaataaagcattcgagggctattctaagacttgggtattccatcttttcaaccatcatccatcctaacaagatgttttggggccgaggatcagacaagaaacccgaagacaaagctccagaagccgcccaagcttcgggaaccagcgtcgacccgcgcaaagacgccacgcaattcgatcccgacaagctgccagagcgccggaaactgcccaagaacctgcagaagattgtcgagaagtccgacaaggaagagaatttctttgatgatgttcccgactccaccgagtccaacgttcgatatgccgcctacgcgaaccgactgcggaccatcatgctctcggcccaccgctatgtcgcctacacgtctgacataggcgaatccttccgtcccgtagcgcacccatggcttgtccgtagtgcgtacggtatctcgtggagttatatccttggagatgtctcatacgagggctacaaggcttattggcagaaccagcgagccttgaacccccagctcgagctctccgagagggctcaaaaagctaccggactgtctgtccccgctccctccgatgtgaagcccggagctgtggcaccactcgaggactatcgaacggtaatggtgcagcgaggcatcttccagagcgtcgcatccatgggtctgccagctttcaccatccacagcgtcgtccgatactccgggcgcgcactgaaagacgccaagaacaagacggtgcgagtctggggtcccatcggtctaggtctcgccgttgtgccattcctaccaacgctattcgacaagcccgtcgagaatgctgttgaatggatgttccacaagggattcgcgctgtacggcggtcaagcctacatcggcgacactccatccatgggacgggaggcaacccttcaccagagacctaggaaagacccaaaggataaggaattgtagactatgatgacgcaaacaagtggcgtttttggaggagcatggtgttataggagtcaactctgctcaattgatttcttttgtgaccatcacaactctactgtacatagtttttaaatggtctaccttggaacaactaggtctcccatggtatatgtaattacaaaaccacttcactgtacggggcaccgacagaccaaatgatacacacacttctaagcactatggcaccggcgacccaatgttttgagtaatcagtatctgttttgagggtttattatacgtgtgccttataaattatcaggaactcaactcagctctacccatatcaaaaacatgcaccatgatattgttgcgctatgctctacgacaagatagtagtattgcttattttgcctctggtaggaggtggtcctccgacaggtcataggctatgctccgtgaagtctacgaatggagaaattacaatgacaacgcttcccaaatgcacgctatccgcgctcaacgcccgtaaatgcatcaatcaggtacccaagccgccgctcgcccttccgtccatctacaactcaatcagatccggcggcgggccaatacctcgcagcagaacaatcgtattcccactgacgagtgcagacccgactttctcgttgaactccagcactctcccaccctcgacgtggaacaccctgagcttgtctctctcctgagacgattgattgttgacgttttcgacctgtaggctcttggcggcggcgtccagcaccctgcctatgacccagtccttggagtagaagaactcgcccttgtagttcttggctttcgtcgtctcggcctcggcttcgacgtataaatagactctcttctcgggcccgagcttggtgtcgccctttgctactttcttcaggttgttgacggcgaccagtctctgggcggtggatgacggttttggttttggtagcgaacgactcgcttgttctttcgcctgttctttcttggcggcgccccaggctcggagctttgcaaatgcagatctggtctgctcggcgacgtcgttccgcggccgtgcgccgatggggatgaggttcttgcagtcgtgttcctcgttcaggcggtgcttgaggcagtagtcgcggttgcacgtcgaacagtggacgccggggactagtgcagtgcctatcgtcgtcctgcagtctttggcggcgcagggcttttcggtcacgtagtcgcgcatgcgcttgccctcaccggcggagggacgggccagttgcgcctggcgccgacgttcggcccatgcgcccttgttctcgcatttgtgggcgtcttcggtgcggtggtcgaggcagaaggtcttcttgcaggactggcagaaaaaggggaggaagtctagctggttgcagtattcgagctggcagtgcttgccgatgagcgtggcgtctgagtcgcggtccatcttgacgtagctcgtgtctggcgcttcggtggaagatgaggacgccatcttgtctggtcgtgcgccgttgtagagccttatgtagcgggtgaacggcgagctaagaagaatgcaaatagtcccaatcaataggcagttcacagactcgtaagcctagctttgtgatggtggatggcaaggcgcgagcacctagcttcagatgattaagaggagggaag

SEQ ID NO: 26605 - DNA, 939 bp, Muscodor strobelii
  misc_feature: SGI cDNA ID NO. 569102
  misc_feature: Reduced expression when VOC is produced
  misc_feature: Encodes the peptide sequence at SEQ ID NO 26606
atggcgtcctcatcttccaccgaagcgccagacacgagctacgtcaagatggaccgcgactcagacgccacgctcatcggcaagcactgccagctcgaatactgcaaccagctagacttcctcccctttttctgccagtcctgcaagaagaccttctgcctcgaccaccgcaccgaagacgcccacaaatgcgagaacaagggcgcatgggccgaacgtcggcgccaggcgcaactggcccgtccctccgccggtgagggcaagcgcatgcgcgactacgtgaccgaaaagccctgcgccgccaaagactgcaggacgacgataggcactgcactagtccccggcgtccactgttcgacgtgcaaccgcgactactgcctcaagcaccgcctgaacgaggaacacgactgcaagaacctcatccccatcggcgcacggccgcggaacgacgtcgccgagcagaccagatctgcatttgcaaagctccgagcctggggcgccgccaagaaagaacaggcgaaagaacaagcgagtcgttcgctaccaaaaccaaaaccgtcatccaccgcccagagactggtcgccgtcaacaacctgaagaaagtagcaaagggcgacaccaagctcgggcccgagaagagagtctatttatacgtcgaagccgaggccgagacgacgaaagccaagaactacaagggcgagttcttctactccaaggactgggtcataggcagggtgctggacgccgccgccaagagcctacaggtcgaaaacgtcaacaatcaatcgtctcaggagagagacaagctcagggtgttccacgtcgagggtgggagagtgctggagttcaacgagaaagtcgggtctgcactcgtcagtgggaatacgattgttctgctgcgaggtattggcccgccgccggatctgattgagttgtag

SEQ ID NO: 26606 - protein, 312 aa, Muscodor strobelii
  misc_feature: SGI Peptide ID NO. 569102
  misc_feature (33)..(72): Pfam Id: PF01428 Pfam Desc: AN1-like Zinc finger
  misc_feature (99)..(145): Pfam Id: PF01428 Pfam Desc: AN1-like Zinc finger
  misc_feature (1)..(311): NCBI GI: 46121781 Blast Desc: FG05268.1 [Gibberella zeae PH-1]
  misc_feature (8)..(312): NCBI GI: 261354951 Blast Desc: AN1-type zinc finger protein [Verticillium albo-atrum VaMs.102]
  misc_feature (11)..(312): NCBI GI: 39952131 Blast Desc: conserved [Magnaporthe grisea 70-15] gi|58257429|gb|AAW69336.1| [Magnaporthe grisea] gi|145020448|gb|EDK04577.1| conserved [Magnaporthe grisea 70-15]
  misc_feature (5)..(312): NCBI GI: 164425004 Blast Desc: NCU06586 [Neurospora crassa OR74A] gi|157070749|gb|EAA32710.2| conserved [Neurospora crassa OR74A]
  misc_feature (1)..(310): NCBI GI: 156032864 Blast Desc: SS1G_13838 [Sclerotinia sclerotiorum 1980] gi|154699240|gb|EDN98978.1| SS1G_13838 [Sclerotinia sclerotiorum 1980]
  misc_feature (1)..(311): NCBI GI: 116195146 Blast Desc: CHGG_04171 [Chaetomium globosum CBS 148.51] gi|88180084|gb|EAQ87552.1| CHGG_04171 [Chaetomium globosum CBS 148.51]
  misc_feature (4)..(312): NCBI GI: 171691026 Blast Desc: protein product [Podospora anserina] gi|170945461|emb|CAP71573.1| protein product [Podospora anserina]
  misc_feature (1)..(311): NCBI GI: 154303751 Blast Desc: BC1G_08760 [Botryotinia fuckeliana B05.10] gi|150854554|gb|EDN29746.1| BC1G_08760 [Botryotinia fuckeliana B05.10]
  misc_feature (11)..(309): NCBI GI: 261192530 Blast Desc: zinc finger protein [Ajellomyces dermatitidis SLH14081] gi|239589547|gb|EEQ72190.1| zinc finger protein [Ajellomyces dermatitidis SLH14081]
  misc_feature (11)..(309): NCBI GI: 239615261 Blast Desc: zinc finger protein [Ajellomyces dermatitidis ER-3]
  misc_feature: Useful for introducing or modulating the production of volatile compounds
MASSSSTEAPDTSYVKMDRDSDATLIGKHCQLEYCNQLDFLPFFCQSCKKTFCLDHRTEDAHKCENKGAWAERRRQAQLARPSAGEGKRMRDYVTEKPCAAKDCRTTIGTALVPGVHCSTCNRDYCLKHRLNEEHDCKNLIPIGARPRNDVAEQTRSAFAKLRAWGAAKKEQAKEQASRSLPKPKPSSTAQRLVAVNNLKKVAKGDTKLGPEKRVYLYVEAEAETTKAKNYKGEFFYSKDWVIGRVLDAAAKSLQVENVNNQSSQERDKLRVFHVEGGRVLEFNEKVGSALVSGNTIVLLRGIGPPPDLIEL

SEQ ID NO: 26607 - DNA, 2881 bp, Muscodor strobelii
  misc_feature: SGI EST ID NO. CUFF.62952.1
  misc_feature: Variant of the nucleotide sequence at SEQ ID NO 26605
cttccctcctcttaatcatctgaagctaggtgctcgcgccttgccatccaccatcacaaagctaggcttacgagtctgtgaactgcctattgattgggactatttgcattcttcttagctcgccgttcacccgctacataaggctctacaacggcgcacgaccagacaagatggcgtcctcatcttccaccgaagcgccagacacgagctacgtcaagatggaccgcgactcagacgccacgctcatcggcaagcactgccagctcgaatactgcaaccagctagacttcctcccctttttctgccagtcctgcaagaagaccttctgcctcgaccaccgcaccgaagacgcccacaaatgcgagaacaagggcgcatgggccgaacgtcggcgccaggcgcaactggcccgtccctccgccggtgagggcaagcgcatgcgcgactacgtgaccgaaaagccctgcgccgccaaagactgcaggacgacgataggcactgcactagtccccggcgtccactgttcgacgtgcaaccgcgactactgcctcaagcaccgcctgaacgaggaacacgactgcaagaacctcatccccatcggcgcacggccgcggaacgacgtcgccgagcagaccagatctgcatttgcaaagctccgagcctggggcgccgccaagaaagaacaggcgaaagaacaagcgagtcgttcgctaccaaaaccaaaaccgtcatccaccgcccagagactggtcgccgtcaacaacctgaagaaagtagcaaagggcgacaccaagctcgggcccgagaagagagtctatttatacgtcgaagccgaggccgagacgacgaaagccaagaactacaagggcgagttcttctactccaaggactgggtcataggcagggtgctggacgccgccgccaagagcctacaggtcgaaaacgtcaacaatcaatcgtctcaggagagagacaagctcagggtgttccacgtcgagggtgggagagtgctggagttcaacgagaaagtcgggtctgcactcgtcagtgggaatacgattgttctgctgcgaggtattggcccgccgccggatctgattgagttgtagatggacggaagggcgagcggcggcttgggtacctgattgatgcatttacgggcgttgagcgcggatagcgtgcatttgggaagcgttgtcattgtaatttctccattcgtagacttcacggagcatagcctatgacctgtcggaggaccacctcctaccagaggcaaaataagcaatactactatcttgtcgtagagcatagcgcaacaatatcatggtgcatgtttttgatatgggtagagctgagttgagttcctgataatttataaggcacacgtataataaaccctcaaaacagatactgattactcaaaacattgggtcgccggtgccatagtgcttagaagtgtgtgtatcatttggtctgtcggtgccccgtacagtgaagtggttttgtaattacatataccatgggagacctagttgttccaaggtagaccatttaaaaactatgtacagtagagttgtgatggtcacaaaagaaatcaattgagcagagttgactcctataacaccatgctcctccaaaaacgccacttgtttgcgtcatcatagtctacaattccttatcctttgggtctttcctaggtctctggtgaagggttgcctcccgtcccatggatggagtgtcgccgatgtaggcttgaccgccgtacagcgcgaatcccttgtggaacatccattcaacagcattctcgacgggcttgtcgaatagcgttggtaggaatggcacaacggcgagacctagaccgatgggaccccagactcgcaccgtcttgttcttggcgtctttcagtgcgcgcccggagtatcggacgacgctgtggatggtgaaagctggcagacccatggatgcgacgctctggaagatgcctcgctgcaccattaccgttcgatagtcctcgagtggtgccacagctccgggcttcacatcggagggagcggggacagacagtccggtagctttttgagccctctcggagagctcgagctgggggttcaaggctcgctggttctgccaataagccttgtagccctcgtatgagacatctccaaggatataactccacgagataccgtacgcactacggacaagccatgggtgcgctacgggacggaaggattcgcctatgtcagacgtgtaggcgacatagcggtgggccgagagcatgatggtccgcagtcggttcgcgtaggcggcatatcgaacgttggactcggtggagtcgggaacactggagtggcgatgttagtcgttgcgcatcggagcatagtattgggattcgcggggtgagtgctgacgcactatccatccactaactcatcaaagaaattctcttccttgtcggacttctcgacaatcttctgcaggttcttgggcagtttccggcgctctggcagcttgtcgggatcgaattgcgtggcgtctttgcgcgggtcgacgctggttcccgaagcttgggcggcttctggagctttgtcttcgggtttcttgtctgatcctcggccccaaaacatcttgttaggatggatgatggttgaaaagatggaatacccaagtcttagaatagccctcgaatgctttatttctagcggtccaatgtgttgtatagtgatttgccgggactgatctgatggagaaagtcgcgggagttagatggttgcacaaacgcgggcctagaggaagaaagcgggagctattgcggtgacgtcgcacctacggagtcctacaatacccgcatggaaatcgacccacgttgatctcgagtttg

SEQ ID NO: 26608 - DNA, 3057 bp, Muscodor strobelii
  misc_feature: SGI cDNA ID NO. 569103
  misc_feature: Encodes the peptide sequence at SEQ ID NO 26609
atgccgccacttgtaccgcgaaagcggttgatgcgcactccctcacccgacactcatggccgtgttgtgaagcagtccggcaacgccaaggccaaaggaactcctgctgtcaaagtgccaccacgaaaaaacacgctgtttgacgatctagactcggcatcgaagaagggttctgcagaaaaaaccagagccgctattcaacaaatgcaagatgacgacgacagcagctcactgagctccttgtctgatgctgagttcgaggatgtaccagctgccaagcgtgtgaaaacggaccatgactttgaagactctaatgatgatgaggacatggagtttgaagatgtcccttctcatgatcagcagccagtgcagcccgaaccggagttgggtgacctagaattgactttgtatcaagacaatcgacccatacccttacccagtgagcttgggaagaaaggtccttcgaaaagggaaaaggcgatccgtatttctacgcactgcatgcacgtccaatttctgatgtggcataatgccatacgcaactcgtggctgtgtgatgacgaggtacaagcaatcatgatatcgcatctgccgccaaggatttgggaggaatacgaccgatggaagcggagcagtggattgaacgtctctgaggaatctccggagaaggaagcgaaaggaaagaagactgcgaaaggaaaaggcaaacgggcatctgcacgacctaccaaggactggagcgaagcagctgaacgtctggaaaagggcgtgccggatctcagccatggtgatccgctatttcgtctcatgaaggctctggtatcttggtggaaacaaaggttccgaattactgcgccgggcttacggaaatggggctacatgaatgccaggcggctcggaaaactgagagctgcatttgaggaggaagaacatgattcaattcgctttggcgaaagaatcgcgaacatcgaggactttcgcaggatggcccaggactgtaccggcagccgagatgtgggagcgcagctctttaccgcactcctacgtggattgggattagaggcgcgaatggtgacgaatatccagtctctaggttttggctggagcagagcggaagaggccgacgacgagaaacctatgacgaatggaaagaaagccgacgagcctagcccaaagaaagggcccgcagtcaagaaaaaggcagccccaatcaagccaacacagcgaaaggcacgaaaaagcgataaagatgccttgactatggaccttgatgactctgatgagtacgcggagccacttgaagacgagagcgaggacaatctttccgtggtcgatgacaccgaagatgttcgcccgaaaaagacggtgccatcagcaccttacgacaaagagctggagtttcccatttattggacagaaattttgtcgccggtaaccagcaagtatttgtcagtcgatccgatcgtaaaggcggttgtagggacgaaccgagagttggtggagtccctggagcctcgaggtgggaaggcagacaaagcaaagcaaattatggcgtatacagttgggttctcgcaagacggcacagcaaaagatgtgacagttcgctacttgaggaagcagttctttcccggaaagacaaaaggaatgcgaatgccagaagagaaagtcccaatccacaacaaacacggaaaagttaagagatacgatcagttcgactggtttaagtctgtcatgcgaggctacggcagaggaagcagaaaacatcctatcgttgaggcggatgagattgaggagtcaacagatctcaagccggcccagcccgagaaaaaggaagtcaaagagggcgaggagacgttgcaatattataagtcttcgaaagaattcgtgttacagcgtcatctaaaacgtgaagaggcattgctctctagtgccgtgcctgtcaaggtattccgtaataaagtcaaagggggcaagatagaggaagaagatgtctatctccggaaggacgtcgtcgctgtgaagagcgcagagacatggcataagcaaggccgagctcctctccaggatgctgaacctcgcaaacacgccccttatagagccgcgacaacaaataggcgccgcgaaattgccgaggcagaggctgcaactggcaaaaaggtgttacagcccctttacagcgaagatcagacagattggatcattccagatcctataaaggacggtgttattccgaagaacgagtatggcaacattgatatgttcgccgaacacatgtgtccagagggtgccattcacgtccccttccgatatgccgttcgcgtctgcaaacgtttgcaaatcgactacgctgaggctgtgactgggttcgagttcggccatcgcatggctgtacctgtaattcaaggagttgtcattgcccaagagcactacgataatgtgattgtagagttagagaaagacgaggcagaaagagcaaggaaagaagacgaaaaacgccgaaaggcatcattgggtagttggcgaaagttcttaatgggtctgcgaattgcggaacgcataagacaggatcacggccacctagacgagtctgtcgaggtcttcggccatgaggatcaagatgcccatggtacaatattttctcacgaggacgaagatatggcaggcgggttcctgcctgaaggcttcgagggcgaagaacaaatcgaaacgaaggcgaaaccagcacaaacctcagcatacttcgctgcaccagacccttatgatgaaaatgatgagggggaagatccattccaagtcgaatactccggtcatccaaccattcaagaatccgaacaatctgagctcacctcggtctctgacctcgagccagagccagatttggaatcagatacgaaagaggtgcccagaaaagcaccaaagaaggctgctccgaaacccaaacctaaaccgaagcctcgacaatcaacacgtcgccggacaaggaagacgctggttgaatcgtcggaagaggaagatgatgaggatgaagattttatgttgtcggatagtgaggaatag

SEQ ID NO: 26609 - protein, 1018 aa, Muscodor strobelii
  misc_feature: SGI Peptide ID NO. 569103
  misc_feature (430)..(858): Pfam Id: PF03835 Pfam Desc: DNA repair protein Rad4
  misc_feature (627)..(858): Pfam Id: PF03835 Pfam Desc: DNA repair protein Rad4
  misc_feature (1)..(1016): NCBI GI: 46121783 Blast Desc: FG05269.1 [Gibberella zeae PH-1]
  misc_feature (1)..(926): NCBI GI: 256727392 Blast Desc: NECHADRAFT_32496 [Nectria haematococca mpVI 77-13-4]
  misc_feature (1)..(900): NCBI GI: 85105352 Blast Desc: NCU06585 [Neurospora crassa OR74A] gi|28923532|gb|EAA32709.1| conserved [Neurospora crassa OR74A]
  misc_feature (39)..(914): NCBI GI: 39952113 Blast Desc: MGG_01699 [Magnaporthe grisea 70-15] gi|145020457|gb|EDK04586.1| MGG_01699 [Magnaporthe grisea 70-15]
  misc_feature (1)..(969): NCBI GI: 261354950 Blast Desc: DNA repair protein rhp42 [Verticillium albo-atrum VaMs.102]
  misc_feature (1)..(895): NCBI GI: 116195144 Blast Desc: CHGG_04170 [Chaetomium globosum CBS 148.51] gi|88180083|gb|EAQ87551.1| CHGG_04170 [Chaetomium globosum CBS 148.51]
  misc_feature (125)..(891): NCBI GI: 159129567 Blast Desc: Rad4 family protein [Aspergillus fumigatus A1163]
  misc_feature (125)..(891): NCBI GI: 71001634 Blast Desc: Rad4 family protein [Aspergillus fumigatus Af293] gi|66853136|gb|EAL93460.1| Rad4 family protein [Aspergillus fumigatus Af293]
  misc_feature (1)..(996): NCBI GI: 189194107 Blast Desc: DNA repair protein rhp42 [Pyrenophora tritici-repentis Pt-1C-BFP] gi|187978956|gb|EDU45582.1| DNA repair protein rhp42 [Pyrenophora tritici-repentis Pt-1C-BFP]
  misc_feature (1)..(917): NCBI GI: 169620622 Blast Desc: SNOG_13514 [Phaeosphaeria nodorum SN15] gi|160704074|gb|EAT78961.2| SNOG_13514 [Phaeosphaeria nodorum SN15]
MPPLVPRKRLMRTPSPDTHGRVVKQSGNAKAKGTPAVKVPPRKNTLFDDLDSASKKGSAEKTRAAIQQMQDDDDSSSLSSLSDAEFEDVPAAKRVKTDHDFEDSNDDEDMEFEDVPSHDQQPVQPEPELGDLELTLYQDNRPIPLPSELGKKGPSKREKAIRISTHCMHVQFLMWHNAIRNSWLCDDEVQAIMISHLPPRIWEEYDRWKRSSGLNVSEESPEKEAKGKKTAKGKGKRASARPTKDWSEAAERLEKGVPDLSHGDPLFRLMKALVSWWKQRFRITAPGLRKWGYMNARRLGKLRAAFEEEEHDSIRFGERIANIEDFRRMAQDCTGSRDVGAQLFTALLRGLGLEARMVTNIQSLGFGWSRAEEADDEKPMTNGKKADEPSPKKGPAVKKKAAPIKPTQRKARKSDKDALTMDLDDSDEYAEPLEDESEDNLSVVDDTEDVRPKKTVPSAPYDKELEFPIYWTEILSPVTSKYLSVDPIVKAVVGTNRELVESLEPRGGKADKAKQIMAYTVGFSQDGTAKDVTVRYLRKQFFPGKTKGMRMPEEKVPIHNKHGKVKRYDQFDWFKSVMRGYGRGSRKHPIVEADEIEESTDLKPAQPEKKEVKEGEETLQYYKSSKEFVLQRHLKREEALLSSAVPVKVFRNKVKGGKIEEEDVYLRKDVVAVKSAETWHKQGRAPLQDAEPRKHAPYRAATTNRRREIAEAEAATGKKVLQPLYSEDQTDWIIPDPIKDGVIPKNEYGNIDMFAEHMCPEGAIHVPFRYAVRVCKRLQIDYAEAVTGFEFGHRMAVPVIQGVVIAQEHYDNVIVELEKDEAERARKEDEKRRKASLGSWRKFLMGLRIAERIRQDHGHLDESVEVFGHEDQDAHGTIFSHEDEDMAGGFLPEGFEGEEQIETKAKPAQTSAYFAAPDPYDENDEGEDPFQVEYSGHPTIQESEQSELTSVSDLEPEPDLESDTKEVPRKAPKKAAPKPKPKPKPRQSTRRRTRKTLVESSEEEDDEDEDFMLSDSEE

SEQ ID NO: 26610 - DNA, 3283 bp, Muscodor strobelii
  misc_feature: SGI EST ID NO. CUFF.62850.0
  misc_feature: Variant of the nucleotide sequence at SEQ ID NO 26608
gtgacgcatttgacttccactaggcgcgacgcatggaatatcttgaagtctgggaggaaacatccctaacaccaatgtaaatcgccttgtacctgttctcaacgcttcggcccggccgtagccaggagaatgccgccacttgtaccgcgaaagcggttgatgcgcactccctcacccgacactcatggccgtgttgtgaagcagtccggcaacgccaaggccaaaggaactcctgctgtcaaagtgccaccacgaaaaaacacgctgtttgacgatctagactcggcatcgaagaagggttctgcagaaaaaaccagagccgctattcaacaaatgcaagatgacgacgacagcagctcactgagctccttgtctgatgctgagttcgaggatgtaccagctgccaagcgtgtgaaaacggaccatgactttgaagactctaatgatgatgaggacatggagtttgaagatgtcccttctcatgatcagcagccagtgcagcccgaaccggagttgggtgacctagaattgactttgtatcaagacaatcgacccatacccttacccagtgagcttgggaagaaaggtccttcgaaaagggaaaaggcgatccgtatttctacgcactgcatgcacgtccaatttctgatgtggcataatgccatacgcaactcgtggctgtgtgatgacgaggtacaagcaatcatgatatcgcatctgccgccaaggatttgggaggaatacgaccgatggaagcggagcagtggattgaacgtctctgaggaatctccggagaaggaagcgaaaggaaagaagactgcgaaaggaaaaggcaaacgggcatctgcacgacctaccaaggactggagcgaagcagctgaacgtctggaaaagggcgtgccggatctcagccatggtgatccgctatttcgtctcatgaaggctctggtatcttggtggaaacaaaggttccgaattactgcgccgggcttacggaaatggggctacatgaatgccaggcggctcggaaaactgagagctgcatttgaggaggaagaacatgattcaattcgctttggcgaaagaatcgcgaacatcgaggactttcgcaggatggcccaggactgtaccggcagccgagatgtgggagcgcagctctttaccgcactcctacgtggattgggattagaggcgcgaatggtgacgaatatccagtctctaggttttggctggagcagagcggaagaggccgacgacgagaaacctatgacgaatggaaagaaagccgacgagcctagcccaaagaaagggcccgcagtcaagaaaaaggcagccccaatcaagccaacacagcgaaaggcacgaaaaagcgataaagatgccttgactatggaccttgatgactctgatgagtacgcggagccacttgaagacgagagcgaggacaatctttccgtggtcgatgacaccgaagatgttcgcccgaaaaagacggtgccatcagcaccttacgacaaagagctggagtttcccatttattggacagaaattttgtcgccggtaaccagcaagtatttgtcagtcgatccgatcgtaaaggcggttgtagggacgaaccgagagttggtggagtccctggagcctcgaggtgggaaggcagacaaagcaaagcaaattatggcgtatacagttgggttctcgcaagacggcacagcaaaagatgtgacagttcgctacttgaggaagcagttctttcccggaaagacaaaaggaatgcgaatgccagaagagaaagtcccaatccacaacaaacacggaaaagttaagagatacgatcagttcgactggtttaagtctgtcatgcgaggctacggcagaggaagcagaaaacatcctatcgttgaggcggatgagattgaggagtcaacagatctcaagccggcccagcccgagaaaaaggaagtcaaagagggcgaggagacgttgcaatattataagtcttcgaaagaattcgtgttacagcgtcatctaaaacgtgaagaggcattgctctctagtgccgtgcctgtcaaggtattccgtaataaagtcaaagggggcaagatagaggaagaagatgtctatctccggaaggacgtcgtcgctgtgaagagcgcagagacatggcataagcaaggccgagctcctctccaggatgctgaacctcgcaaacacgccccttatagagccgcgacaacaaataggcgccgcgaaattgccgaggcagaggctgcaactggcaaaaaggtgttacagcccctttacagcgaagatcagacagattggatcattccagatcctataaaggacggtgttattccgaagaacgagtatggcaacattgatatgttcgccgaacacatgtgtccagagggtgccattcacgtccccttccgatatgccgttcgcgtctgcaaacgtttgcaaatcgactacgctgaggctgtgactgggttcgagttcggccatcgcatggctgtacctgtaattcaaggagttgtcattgcccaagagcactacgataatgtgattgtagagttagagaaagacgaggcagaaagagcaaggaaagaagacgaaaaacgccgaaaggcatcattgggtagttggcgaaagttcttaatgggtctgcgaattgcggaacgcataagacaggatcacggccacctagacgagtctgtcgaggtcttcggccatgaggatcaagatgcccatggtacaatattttctcacgaggacgaagatatggcaggcgggttcctgcctgaaggcttcgagggcgaagaacaaatcgaaacgaaggcgaaaccagcacaaacctcagcatacttcgctgcaccagacccttatgatgaaaatgatgagggggaagatccattccaagtcgaatactccggtcatccaaccattcaagaatccgaacaatctgagctcacctcggtctctgacctcgagccagagccagatttggaatcagatacgaaagaggtgcccagaaaagcaccaaagaaggctgctccgaaacccaaacctaaaccgaagcctcgacaatcaacacgtcgccggacaaggaagacgctggttgaatcgtcggaagaggaagatgatgaggatgaagattttatgttgtcggatagtgaggaatagtgtaggtgtaaagtatgaaatcgagtacttgtacagtaatacggaggaaggttttgataccatgccactggaaatgaatacaatatgtatcttctgg

SEQ ID NO: 26611 - DNA, 816 bp, Muscodor strobelii
  misc_feature: SGI cDNA ID NO. 569104
  misc_feature: Encodes the peptide sequence at SEQ ID NO 26612
atgtgttccgagttggcctcgcgtctcgatcgtagtcgcatagtcgaaaaggtcgatcactggcacaacgaaaagcttgcgacagccatccaggatcaatacgccagaattcccaaggatgagctgaagaaagtcatcaatcataccatggtgaaagacatcgagaaactgctgaagacgagatctatggacagagaacgtgcacggaaagtaacatttcgcgccttgtgcgcggtgaccacggcctggggagaaaagtgtaaaccgaagcgtctcaacattggtgttcaaaaagttttcaggagacgtgcgaaggaggctttgagacgaacggcactgaaacccaaagtccaggctgcatcccaaccttcggccgtgaaaccggcaaaacaccagactgtacaacctcgttccgtgatcaactcaaaagctacgccgcgtgctagtccggatgtccctttgaatgctccaactggtccaaaagccctgcgccacggtcttcctgatatgagcattcatcacttgagagcacagggatatatgagtgataaggcatggtcacagggccaagggattcgctcctccgctgcccgatcgacctattatcagcccatcccttcagaccttcgcgactgtaatgcgtttccagaacctcggactgaagccccaatgaatcaatctgctcggctacaccacaatccgacccttcgcaaccctggtcgcgaccagctgcaatgctcctcgccatctgctggcgccggcttgcagtcttgctctgaattcgccacgcgtttctacgcgccaccggcgaagtaa

SEQ ID NO: 26612 - protein, 271 aa, Muscodor strobelii
  misc_feature: SGI Peptide ID NO. 569104
  misc_feature (146)..(180): NCBI GI: 256729707 Blast Desc: NECHADRAFT_83807 [Nectria haematococca mpVI 77-13-4]
  misc_feature (150)..(180): NCBI GI: 261358205 Blast Desc: conserved [Verticillium albo-atrum VaMs.102]
  misc_feature (150)..(183): NCBI GI: 39976879 Blast Desc: MGG_06342 [Magnaporthe grisea 70-15] gi|145016258|gb|EDK00748.1| MGG_06342 [Magnaporthe grisea 70-15]
  misc_feature (154)..(181): NCBI GI: 46122245 Blast Desc: FG05500.1 [Gibberella zeae PH-1]
MCSELASRLDRSRIVEKVDHWHNEKLATAIQDQYARIPKDELKKVINHTMVKDIEKLLKTRSMDRERARKVTFRALCAVTTAWGEKCKPKRLNIGVQKVFRRRAKEALRRTALKPKVQAASQPSAVKPAKHQTVQPRSVINSKATPRASPDVPLNAPTGPKALRHGLPDMSIHHLRAQGYMSDKAWSQGQGIRSSAARSTYYQPIPSDLRDCNAFPEPRTEAPMNQSARLHHNPTLRNPGRDQLQCSSPSAGAGLQSCSEFATRFYAPPAK

SEQ ID NO: 26613 - DNA, 993 bp, Muscodor strobelii
  misc_feature: SGI cDNA ID NO. 569105
  misc_feature: Encodes the peptide sequence at SEQ ID NO 26614
atggcttcagtgacgaaggaagccatcatcactcacgacttggattttgaggactattctgtgaaggacgaacttaaaggttgcggaagaactcatcttacccgcggagccgattcgatcgtcgcccgagcatatgatcccgaattccatgacttcctaaccgacgctactgggcccgtttatgcactacttctttcttctgcagactcttcacaaaatgcgttgtttttcaatggacccgtgtatcttcctagccaggaccaactttacatcatgtcggatctcttacagtcgagcagcagttctaggctgccagtcgttttaatatcaagaatctccttcaatcgtgagatggacacagatattggcgatataccaacaaatattactagtctacagtggatgaaacttcgcccgccgtctgatatgccaatgccttctggcgcaatcccatacaaacaaggaattctttactgctcacaaggtaccctggagccatccaccggaggcctttattacatgcctctcgggaagccacccgtccccgtcgtgacaaacttctatgggagacctttcaactcgattcaaagtgtggtcgaggataaagaaggagctttgtggtttgtcgactcatcaattggctttgagcatgaaactcgcccgaaacctctgctgcccaaccaagtttactgtttccagccaagtacagccacagactgcgtgaatttgcgtgtcgtggccgatggaatccaaaggccaactggaatagctatgagtcctgatggatgtgttttatacgtgaccgatacggaggcagccaaaacaggtaacattacagactcggcaaccatttatgcatttgatgttccctgggggttttctatacgcggcatgccctggtggcgtggaaagctggatgccagatggcagaccattcagaacaatacggataccagatggctgttcaagtctcacttttgggcgagacagtga

SEQ ID NO: 26614 - protein, 330 aa, Muscodor strobelii
  misc_feature: SGI Peptide ID NO. 569105
  misc_feature (201)..(289): Pfam Id: PF08450 Pfam Desc: SMP-30/Gluconolaconase/LRE-like region
  misc_feature (1)..(289): NCBI GI: 156032870 Blast Desc: SS1G_13841 [Sclerotinia sclerotiorum 1980] gi|154699243|gb|EDN98981.1| SS1G_13841 [Sclerotinia sclerotiorum 1980]
  misc_feature (128)..(289): NCBI GI: 154303745 Blast Desc: BC1G_08757 [Botryotinia fuckeliana B05.10] gi|150854551|gb|EDN29743.1| BC1G_08757 [Botryotinia fuckeliana B05.10]
  misc_feature (48)..(289): NCBI GI: 212541166 Blast Desc: conserved [Penicillium marneffei ATCC 18224] gi|210068037|gb|EEA22129.1| conserved [Penicillium marneffei ATCC 18224]
  misc_feature (45)..(289): NCBI GI: 145256269 Blast Desc: An10g00900 [Aspergillus niger CBS 513.88] gi|134078653|emb|CAK40526.1| protein product [Aspergillus niger]
  misc_feature (81)..(289): NCBI GI: 145616556 Blast Desc: MGG_09681 [Magnaporthe grisea 70-15] gi|145009621|gb|EDJ94277.1| MGG_09681 [Magnaporthe grisea 70-15]
  misc_feature (43)..(284): NCBI GI: 169618437 Blast Desc: SNOG_12409 [Phaeosphaeria nodorum SN15] gi|111059102|gb|EAT80222.1| SNOG_12409 [Phaeosphaeria nodorum SN15]
  misc_feature (81)..(284): NCBI GI: 189211931 Blast Desc: gluconolactonase precursor [Pyrenophora tritici-repentis Pt-1C-BFP] gi|187979492|gb|EDU46118.1| gluconolactonase precursor [Pyrenophora tritici-repentis
  misc_feature (81)..(289): NCBI GI: 169777723 Blast Desc: [Aspergillus oryzae RIB40] gi|83772064|dbj|BAE62194.1| protein product [Aspergillus oryzae]
  misc_feature (81)..(289): NCBI GI: 46137647 Blast Desc: FG10339.1 [Gibberella zeae PH-1]
  misc_feature (77)..(289): NCBI GI: 169617906 Blast Desc: SNOG_12135 [Phaeosphaeria nodorum SN15] gi|160703511|gb|EAT80547.2| SNOG_12135 [Phaeosphaeria nodorum SN15]
MASVTKEAIITHDLDFEDYSVKDELKGCGRTHLTRGADSIVARAYDPEFHDFLTDATGPVYALLLSSADSSQNALFFNGPVYLPSQDQLYIMSDLLQSSSSSRLPVVLISRISFNREMDTDIGDIPTNITSLQWMKLRPPSDMPMPSGAIPYKQGILYCSQGTLEPSTGGLYYMPLGKPPVPVVTNFYGRPFNSIQSVVEDKEGALWFVDSSIGFEHETRPKPLLPNQVYCFQPSTATDCVNLRVVADGIQRPTGIAMSPDGCVLYVTDTEAAKTGNITDSATIYAFDVPWGFSIRGMPWWRGKLDARWQTIQNNTDTRWLFKSHFWARQ

SEQ ID NO: 26615 - DNA, 2029 bp, Muscodor strobelii
  misc_feature: SGI EST ID NO. CUFF.62865.0
  misc_feature: Variant of the nucleotide sequence at SEQ ID NO 26613
attggctttgagcatgaaactcgcccgaaacctctgctgcccaaccaagtttactgtttccagccaagtacagccacagactgcgtgaatttgcgtgtcgtggccgatggaatccaaaggccaactggaatagctatgagtcctgatggatgtgttttatacgtgaccgatacggaggcagccaaaacaggtaacattacagactcggcaaccatttatgcatttgatgttgtaagaccggaccgttccacaacgcaatattggtctccttatttgacgaataagcgtgtcttctctttccctgcgtccggtgtaccagctgcaatcacatgcagccctgggggttttctatacgcggcatgccctggtggcgtggaaagctggatgccagatggcagaccattcagaacaatacggataccagatggctgttcaagtctcacttttgggcgagacagtgaaatctttgtgggcagtcgacaagatctatggtattttcgatttcgctcgcgctgaatgacattacatcctgccacgaatgatgtagccaaatgtccaaaagcgtgtttctccatccaaggactggatcgagttcatgaaggatttttagccgttgcacccggcaaactgcatacatcaagtatgatacctcttcggtggctcaacatacggctattggaagcatgactgtggcaacctgcttgtgattaaccattatgccagccggagctctttttcacagtttctgcgcattgcgaacagaagaactacccgttagtaacatgatccgtagcatgaggaagctgagtgcttccgttggtgatccctgagtcttcaagtgacctatggacagtcgaaattggtgtcgtcaatttgtcttgtcactgcatcataactggctcttaaactatttgcgccgaattctcgtctgagggatcttgggcgaacaaatccttgttcatgctggatcagctgacggaactcgtcagcggtactcatcaccttgcgttctcgtaatgtacctaggctgtcctcatgatgtcaattgtttaaacgacgctacgcttaccaacactaaacaaataaatacagcgaaacgactttcctagtgaccactatgcagcctttgaatctcatcccgtactctcttctcctcttcggcgagttcctgaatccgtctcagcctatcggcctcctcttgtaatctctgctgcgtcgcaagcaactcggccatgtttctttcttgcatgcctctaggtatggcgctatgttgctgatgtggtgctaactcgaggccgggttgcgatgctagtgtctgcgtatcccaactcgtccgtgtggtgctatcatttctaccccaggcgacggcctctaagccatcgtatggatgcgtgtgttgtgcgtattgcgcaagctctgatactgggctaccgcttatctccagtcgtggtgcggctgtgtcgagttcttgaccgtggtattcatttcttgggataacacttgtgtgcgcgatcgggacttcagactgtggtgtctggttaaactcttcacgaggcggatggaaaacagcctcctcagaaactaacagtttcttttgatcaccggtcaccccaacaccagcgattggtttgacggcaacgctgaccccagataattcagctttgccgaattcagccggactcgattcgacatcactaccaggttgtgtcggcgtggaaccttgctcattcttggacgcacgtcttgatacaaaaaaccagatgagggcagcaatgattccaaggacaatggctcctcccaccgcaatcccagcataagcgcctgcaggcaaacccttcttgtgggatttcgaaccactatcgctactcgacgcggggcttgtctcttggctttggccaccggcagcagctgtagaagacgtgctactagcacctttggtgttcgtcgacccggaattcgtcgtagctgtagcaacggacgtggtagttgtaagtgaagatgtttctccagtaccacagatctggttata

SEQ ID NO: 26616 - DNA, 1146 bp, Muscodor strobelii
  misc_feature: SGI cDNA ID NO. 569106
  misc_feature: Elevated expression when VOC is produced
  misc_feature: Encodes the peptide sequence at SEQ ID NO 26617
atgcagttaatagttctcgcactgctcgcgagcgcaagtctcgcggctgcgcaaagttcagtacctgattgctccaagacttgtctcgtcgacgccgatactggatgtgatgagactgatgtctcctgttggtgcagcttaccgcagtctaccgactatttaattcatcaatgtgtcttacaatcctgtgatgcagcagactcgcaatccttctcagatgaatataaccagatctgtggtactggagaaacatcttcacttacaactaccacgtccgttgctacagctacgacgaattccgggtcgacgaacaccaaaggtgctagtagcacgtcttctacagctgctgccggtggccaaagccaagagacaagccccgcgtcgagtagcgatagtggttcgaaatcccacaagaagggtttgcctgcaggcgcttatgctgggattgcggtgggaggagccattgtccttggaatcattgctgccctcatctggttttttgtatcaagacgtgcgtccaagaatgagcaaggttccacgccgacacaacctggtagtgatgtcgaatcgagtccggctgaattcggcaaagctgaattatctggggtcagcgttgccgtcaaaccaatcgctggtgttggggtgaccggtgatcaaaagaaactgttagtttctgaggaggctgttttccatccgcctcgtgaagagtttaaccagacaccacagtctgaagtcccgatcgcgcacacaagtgttatcccaagaaatgaataccacggtcaagaactcgacacagccgcaccacgactggagataagcggtagcccagtatcagagcttgcgcaatacgcacaacacacgcatccatacgatggcttagaggccgtcgcctggggtagaaatgatagcaccacacggacgagttgggatacgcagacactagcatcgcaacccggcctcgagttagcaccacatcagcaacatagcgccatacctagaggcatgcaagaaagaaacatggccgagttgcttgcgacgcagcagagattacaagaggaggccgataggctgagacggattcaggaactcgccgaagaggagaagagagtacgggatgagattcaaaggctgcatagtggtcactag

SEQ ID NO: 26617 - protein, 381 aa, Muscodor strobelii
  misc_feature: SGI Peptide ID NO. 569106
  misc_feature (45)..(184): NCBI GI: 156049729 Blast Desc: SS1G_08571 [Sclerotinia sclerotiorum 1980] gi|154692970|gb|EDN92708.1| SS1G_08571 [Sclerotinia sclerotiorum 1980]
  misc_feature: Useful for introducing or modulating the production of volatile compounds
MQLIVLALLASASLAAAQSSVPDCSKTCLVDADTGCDETDVSCWCSLPQSTDYLIHQCVLQSCDAADSQSFSDEYNQICGTGETSSLTTTTSVATATTNSGSTNTKGASSTSSTAAAGGQSQETSPASSSDSGSKSHKKGLPAGAYAGIAVGGAIVLGIIAALIWFFVSRRASKNEQGSTPTQPGSDVESSPAEFGKAELSGVSVAVKPIAGVGVTGDQKKLLVSEEAVFHPPREEFNQTPQSEVPIAHTSVIPRNEYHGQELDTAAPRLEISGSPVSELAQYAQHTHPYDGLEAVAWGRNDSTTRTSWDTQTLASQPGLELAPHQQHSAIPRGMQERNMAELLATQQRLQEEADRLRRIQELAEEEKRVRDEIQRLHSGH

SEQ ID NO: 26618 - DNA, 2120 bp, Muscodor strobelii
  misc_feature: SGI EST ID NO. CUFF.62866.1
  misc_feature: Variant of the nucleotide sequence at SEQ ID NO 26616
gtcgccataactcagccgcgccaagctagggatctagaccgccacagacctggcgaggcacaatatcaagcatgcacgcttctcgtcacatttggtaattaagtatgttatgccaccgttctagataccgcttagcgcgaggttcatgggcttttgctccgagtatagtctatatcccccaggttgacacttcgtcttggctttctgcgcatcgtcttgccttctccttcatcaactatgattgacatttagcgagtgatttgagcatattgattaattttgtgacattctttcacccttgattttcgtaaattcttgtttaatgcagttaatagttctcgcactgctcgcgagcgcaagtctcgcggctgcgcaaagttcagtacctgattgctccaagacttgtctcgtcgacgccgatactggatgtgatgagactgatgtctcctgttggtgcagcttaccgcagtctaccgactatttaattcatcaatgtgtcttacaatcctgtgatgcagcagactcgcaatccttctcagatgaatataaccagatctgtggtactggagaaacatcttcacttacaactaccacgtccgttgctacagctacgacgaattccgggtcgacgaacaccaaaggtgctagtagcacgtcttctacagctgctgccggtggccaaagccaagagacaagccccgcgtcgagtagcgatagtggttcgaaatcccacaagaagggtttgcctgcaggcgcttatgctgggattgcggtgggaggagccattgtccttggaatcattgctgccctcatctggttttttgtatcaagacgtgcgtccaagaatgagcaaggttccacgccgacacaacctggtagtgatgtcgaatcgagtccggctgaattcggcaaagctgaattatctggggtcagcgttgccgtcaaaccaatcgctggtgttggggtgaccggtgatcaaaagaaactgttagtttctgaggaggctgttttccatccgcctcgtgaagagtttaaccagacaccacagtctgaagtcccgatcgcgcacacaagtgttatcccaagaaatgaataccacggtcaagaactcgacacagccgcaccacgactggagataagcggtagcccagtatcagagcttgcgcaatacgcacaacacacgcatccatacgatggcttagaggccgtcgcctggggtagaaatgatagcaccacacggacgagttgggatacgcagacactagcatcgcaacccggcctcgagttagcaccacatcagcaacatagcgccatacctagaggcatgcaagaaagaaacatggccgagttgcttgcgacgcagcagagattacaagaggaggccgataggctgagacggattcaggaactcgccgaagaggagaagagagtacgggatgagattcaaaggctgcatagtggtcactaggaaagtcgtttcgctgtatttatttgtttagtgttggtaagcgtagcgtcgtttaaacaattgacatcatgaggacagcctaggtacattacgagaacgcaaggtgatgagtaccgctgacgagttccgtcagctgatccagcatgaacaaggatttgttcgcccaagatccctcagacgagaattcggcgcaaatagtttaagagccagttatgatgcagtgacaagacaaattgacgacaccaatttcgactgtccataggtcacttgaagactcagggatcaccaacggaagcactcagcttcctcatgctacggatcatgttactaacgggtagttcttctgttcgcaatgcgcagaaactgtgaaaaagagctccggctggcataatggttaatcacaagcaggttgccacagtcatgcttccaatagccgtatgttgagccaccgaagaggtatcatacttgatgtatgcagtttgccgggtgcaacggctaaaaatccttcatgaactcgatccagtccttggatggagaaacacgcttttggacatttggctacatcattcgtggcaggatgtaatgtcattcagcgcgagcgaaatcgaaaataccatagatcttgtcgactgcccacaaagatttcactgtc

SEQ ID NO: 26619 - DNA, 837 bp, Muscodor strobelii
  misc_feature: SGI cDNA ID NO. 569107
  misc_feature: Encodes the peptide sequence at SEQ ID NO 26620
atgtttaggctgtctttggcattactcgcattgctggtcctatcaaggacggggcttgggagcttgacggtgaactttgacgatacagattccatcaagaaagcagcagaattggtcgcccatgaatcgatcgcggcctattattacggcacaaacggcgccgaggtcccaccgagctcgggtctcctgacaccgaaaggcgactatgcctggtggacaggaggcgtattttggacagccatgctggattaccagggccggactggcggcacccagttcaatagcatcatctctcagggcttacggttacaagtcactgactccatcgagtttcagtcccaagctggtgcgaaccgtgactttgtgccggccaacctggtggcgcaagagaggagcgaagaccagagtatctgggctctagcagcgatcgctgcgactgaaacgcttgatgaaagtccgggtaacgaccttagttggcagaggatcgcggaaactgtcttcgacgagcaggtcacagctggtaggcgggttgaagcggcaggcaattgcactggcctgctgaagtcgaacatttcgccttccactgctgcccctgattttgtcaatgcccaatcaaactatttcttcattgctatgggagcgcagctcgacctactcaatgagaactacaacgagacgagattcaagcagatcatggacacatgggaagaatgccaatctctcggtatcatcgatgatgacttgaacgtctggcacggagtggatcttgacggaggggattgtactgacggtaagttcttactaactgcctcatattatcgcgcgttctttggctag

SEQ ID NO: 26620 - protein, 278 aa, Muscodor strobelii
  misc_feature: SGI Peptide ID NO. 569107
  misc_feature (4)..(263): NCBI GI: 171691532 Blast Desc: protein product [Podospora anserina] gi|170945714|emb|CAP71827.1| protein product [Podospora anserina]
  misc_feature (8)..(263): NCBI GI: 145610715 Blast Desc: MGG_00951 [Magnaporthe grisea 70-15] gi|145018095|gb|EDK02374.1| MGG_00951 [Magnaporthe grisea 70-15]
  misc_feature (12)..(261): NCBI GI: 116195462 Blast Desc: CHGG_04329 [Chaetomium globosum CBS 148.51] gi|88180242|gb|EAQ87710.1| CHGG_04329 [Chaetomium globosum CBS 148.51]
  misc_feature (29)..(277): NCBI GI: 164425167 Blast Desc: NCU06319 [Neurospora crassa OR74A] gi|157070816|gb|EAA33345.2| conserved [Neurospora crassa OR74A]
  misc_feature (7)..(256): NCBI GI: 154299512 Blast Desc: BC1G_11018 [Botryotinia fuckeliana B05.10] gi|150857360|gb|EDN32552.1| BC1G_11018 [Botryotinia fuckeliana B05.10]
  misc_feature (6)..(263): NCBI GI: 156054998 Blast Desc: SS1G_04850 [Sclerotinia sclerotiorum 1980] gi|154702635|gb|EDO02374.1| SS1G_04850 [Sclerotinia sclerotiorum 1980]
  misc_feature (32)..(272): NCBI GI: 171693745 Blast Desc: protein product [Podospora anserina] gi|170946821|emb|CAP73625.1| protein product [Podospora anserina]
  misc_feature (21)..(261): NCBI GI: 154314008 Blast Desc: BC1G_04947 [Botryotinia fuckeliana B05.10] gi|150849093|gb|EDN24286.1| BC1G_04947 [Botryotinia fuckeliana B05.10]
  misc_feature (10)..(263): NCBI GI: 46137743 Blast Desc: FG10387.1 [Gibberella zeae PH-1]
  misc_feature (26)..(222): NCBI GI: 85093327 Blast Desc: NCU08127 [Neurospora crassa OR74A] gi|28921118|gb|EAA30434.1| conserved [Neurospora crassa OR74A]
  misc_feature (21)..(253): SWISSPROT Homolog: EC 3.2.1.101 Mannan endo-1,6-alpha-mannosidase
MFRLSLALLALLVLSRTGLGSLTVNFDDTDSIKKAAELVAHESIAAYYYGTNGAEVPPSSGLLTPKGDYAWWTGGVFWTAMLDYQGRTGGTQFNSIISQGLRLQVTDSIEFQSQAGANRDFVPANLVAQERSEDQSIWALAAIAATETLDESPGNDLSWQRIAETVFDEQVTAGRRVEAAGNCTGLLKSNISPSTAAPDFVNAQSNYFFIAMGAQLDLLNENYNETRFKQIMDTWEECQSLGIIDDDLNVWHGVDLDGGDCTDGKFLLTASYYRAFFG

SEQ ID NO: 26621 - DNA, 2977 bp, Muscodor strobelii
  misc_feature: SGI EST ID NO. CUFF.62870.0
  misc_feature: Variant of the nucleotide sequence at SEQ ID NO 26619
ctttggcattactcgcattgctggtcctatcaaggacggggcttgggagcttgacggtgaactttgacgatacaggtgggcattgcctgtgaagatactacctggacgcccaactattctgggcttcaagatcctttcgtagaaatactgctcactgatacagattccatcaagaaagcagcagaattggtcgcccatgaatcgatcgcggcctattattacggcacaaacggcgccgaggtcccaccgagctcgggtctcctgacaccgaaaggcgactatgcctggtggacaggaggcgtattttggacagccatgctggattaccagggccggactggcggcacccagttcaatagcatcatctctcagggcttacgggtgagtagctgctcaagccactttccaatttccaatctcctacaacacttttcagagctttcaacaaaaactgccagttacaagtcactgactccatcgagtttcagtcccaagctggtgcgaaccgtgactttgtgccggccaacctggtggcgcaagagaggagcgaagaccagagtatctgggctctagcagcgatcgctgcgactgaaacgcttgatgaaagtccgggtaacgaccttagttggcagaggatcgcggaaactgtcttcgacgagcaggtcacagctggtaggcgggttgaagcggcaggcaattgcactggcctgctgaagtcgaacatttcgccttccactgctgcccctgattttgtcaatgcccaatcaaactatttcttcattgctatgggagcgcagctcgacctactcaatgagaactacaacgagacgagattcaagcagatcatggacacatgggaagaatgccaatctctcggtatcatcgatgatgacttgaacgtctggcacggagtggatcttgacggaggggattgtactgacgtgcatcatgtatactcctcctttccagcagtattagctcccaagagcgcatcggcaatatacaatttgaccgcatctcgatacaatgctagttttgcggacgcgcggtggagacccatcgtagacggacttgtgctccggactatagaggtgtatttcaagaacggcgtcgccacggaaatcgcttgcgaacctagtggctgctcgacggacacgacattctataaaatctatcttcatcgtgcgctcgctttgacggtgtcttatgcgccgtggaccgcagatacagtacttcctgtgttgaagtctagtgctatggcggcggcgaagacttgtgagaatgatgggtcaagtggttttgtctggaatagagagggacaaactgtcacgggtgctggcgcgcaggtatgcgtatttgctttccttccttttctcctgcgaatctcttctcagctgaaaatgaagcaccacatggttggcccgaattttcacatcacatgtgaagctggttgggtccgagctgcctgtttttttaacctgcaggcctgttaattggtgctgggctgcatttgcatcatccattgcgcaggtaccttgcaaacgtggaccatgcatgtgcaaatgctagattcgaggattaacttttcatcttttcgctagacaaaagcttatcagcccacctatgcaccacatagaggcatcaatacatctagaaaaggcctctgatgtctctctggaaaaaaagatcgttcaacttaagacaactgttgttaaggtgctgaataatcaaatacttattccatttccttacatccattactccctattgccaccggtccaatttgaaatactctatcaacatcacagaatcacttgcaaaacgattggcccagcctatttctatccaccgcggtaacaatctttcatactaaacttgtcaaattacacgccgcaagtttgaagaatacagcatggcattccgcgcgaaccagcttctccttcaacagctttgcagctacacactggaacaatttgggtacagatctctcaccccggaaatggttaaagacgtctcatcaatgacattgcttgaaaaaggctgcttctatctatttcactcccagacccttgtttacgccggaattctctttgccttcggagcctgcgagcatgtactaggatttgccgaatggccagaaggtcaacatgatgaaccggttgggctagtaccaagaattcttgggaagttctatagctgctggctcgcaggggctataggtttcgttatcgatgtctggcgatttggtcagggtaatccctagagtcacggttcatgccgcagtgcggtctacggaacaccgggtcgacgcaccgtctggttgaactcccctcctcaaacctaccgaattcattcgactatcaactcatttacaatcgacatagtctttattgcggggtatgtcagacctgtgggacgtcattgcgtcaagaagcttcggtgttattacaatacaccgcgggatcgcaagaattcgacacaattagtctgataggctctttgcacgatacaatggccctattatgcaacttaagattcatccgaaatgcgatagaacgatgcagatggcggcattctatcacgcagctatttcatggcacgaagttagaatttgccggcacatgtttctagatatctcggcgattgacatttaagatacgatagtacattgagcccatttcgagtcatcgcgagcggcgacagtatcaaggtttcgacggcgctggtctgggtacgtgttgaatgtgacgaacccgtagaaattcgacggcgttgatagcctggcagcgcacatgtttcgacggcgctgatagctgtggtctgggtacgtgaacagcagaaaccccagcagcatgtgagatttgttgggattgttgttaagatagctaattcgatggaccgccgccatcagaagtagatagtgtgtgtgctgtttttttttttgtcacctggcgcatcgccgaatttaactgtatat

SEQ ID NO: 26622 - DNA, 1392 bp, Muscodor strobelii
  misc_feature: SGI cDNA ID NO. 569108
  misc_feature: Elevated expression when VOC is produced
  misc_feature: Encodes the peptide sequence at SEQ ID NO 26623
atgggttcactgccaactaccaaagtcctcccggatttcgcagacacatctctgattcttacacatccgaccgaggccgaaaagcaacagacatggcgtctgaaccatggcgaatggggtggcccgcttagtcttgaagcatacatgcagcgcgagccattccttgcctcgacggctctaacatctaacggcggcataacgcattggattttgacagagccgacggctggggatgggccacggaagatacttgcatcctgcgagacgatacataaacacgtcttatacattcatgcggaaaagaatggaacggaaccggaagtaaaagagggcatcagctacggcatcggaagcgtatatacgtaccccgagttccgtggaaagaagtatgctgctagaatgttgaaagatctgagcgaaactctcaagacatggccagaacaccagtatccccagaagaaacagcgcttcagaaacggcgtcaaattatcaaatggcgacaccatactggagaatggctccccacaggtccaacagacgaacggccattccaagaaagaagtaatctgtactgcgctatggtcagatataggcaagaagttctacgcgtccaaaggctggccagtatatgagagctcgcatgtcgagttcccctcctcattccctttcgcaccgggcatcacttctatcttcgaccaagctgcaaagatcccaaatgcgtcactgactctcacgcctgtgacaaactcgaacctcgcgtcactttgttctgaagacgagatgcagctccgcgctcaaatgaagaaaaactcacagacgacgggccgcgcctcgttcgctttcacacctgatgcggacgttttccgctggcactgggctcgcgaggacttcctgacacctcacgtgtttccgggctgcacaccaagtgaagtccggggtatgatcgcgactgtgagccccagctctcccaccggacgtcatgcgcagacaaacggtcacggaaatggagctcccaaagcacaagaagcacgagtgtgggcgatctgggctagaaactacggctccgatgccgcgaccaaatcagaaaacaatcccctctacattctacggttcgttatcgatcgatcgcatggcgaaccggacccgaaagctctgcagctcgctttcaacgccatactgcacagcgcactggatacagcgcgcacctggcattgtgggaaggtgaatctctggaatccatcctcagaagttaagagtcttgctgcggcgtcgggcgtcaaacatcactttgtcgatcgtgagatggagagcatttctagcatgatgtggtatgggccggagaaggagagcgatgtggattggtttgccaatgagaagttttgttggtgctga

SEQ ID NO: 26623 - protein, 463 aa, Muscodor strobelii
  misc_feature: SGI Peptide ID NO. 569108
  misc_feature (18)..(463): NCBI GI: 171691302 Blast Desc: protein product [Podospora anserina] gi|170945599|emb|CAP71712.1| protein product [Podospora anserina]
  misc_feature (17)..(463): NCBI GI: 85104672 Blast Desc: NCU07895 [Neurospora crassa OR74A] gi|28923357|gb|EAA32548.1| [Neurospora crassa OR74A]
  misc_feature (16)..(463): NCBI GI: 116195314 Blast Desc: CHGG_04255 [Chaetomium globosum CBS 148.51] gi|88180168|gb|EAQ87636.1| CHGG_04255 [Chaetomium globosum CBS 148.51]
  misc_feature (1)..(463): NCBI GI: 39969497 Blast Desc: MGG_10359 [Magnaporthe grisea 70-15] gi|145015161|gb|EDJ99729.1| MGG_10359 [Magnaporthe grisea 70-15]
  misc_feature (10)..(463): NCBI GI: 255953079 Blast Desc: Pc21g02280 [Penicillium chrysogenum Wisconsin 54-1255] gi|211589003|emb|CAP95125.1| Pc21g02280 [Penicillium chrysogenum Wisconsin 54-1255]
  misc_feature (4)..(463): NCBI GI: 256727404 Blast Desc: NECHADRAFT_76226 [Nectria haematococca mpVI 77-13-4]
  misc_feature (9)..(463): NCBI GI: 261193589 Blast Desc: conserved [Ajellomyces dermatitidis SLH14081] gi|239588805|gb|EEQ71448.1| conserved [Ajellomyces dermatitidis SLH14081]
  misc_feature (9)..(463): NCBI GI: 156032758 Blast Desc: SS1G_13784 [Sclerotinia sclerotiorum 1980] gi|154699187|gb|EDN98925.1| SS1G_13784 [Sclerotinia sclerotiorum 1980]
  misc_feature (9)..(463): NCBI GI: 239613871 Blast Desc: conserved [Ajellomyces dermatitidis ER-3]
  misc_feature (10)..(463): NCBI GI: 259483844 Blast Desc: TPA: conserved [Aspergillus nidulans FGSC A4]
  misc_feature (20)..(298): SWISSPROT Homolog: EC 2.3.1.32 Lysine N-acetyltransferase
  misc_feature: Useful for introducing or modulating the production of volatile compounds
MGSLPTTKVLPDFADTSLILTHPTEAEKQQTWRLNHGEWGGPLSLEAYMQREPFLASTALTSNGGITHWILTEPTAGDGPRKILASCETIHKHVLYIHAEKNGTEPEVKEGISYGIGSVYTYPEFRGKKYAARMLKDLSETLKTWPEHQYPQKKQRFRNGVKLSNGDTILENGSPQVQQTNGHSKKEVICTALWSDIGKKFYASKGWPVYESSHVEFPSSFPFAPGITSIFDQAAKIPNASLTLTPVTNSNLASLCSEDEMQLRAQMKKNSQTTGRASFAFTPDADVFRWHWAREDFLTPHVFPGCTPSEVRGMIATVSPSSPTGRHAQTNGHGNGAPKAQEARVWAIWARNYGSDAATKSENNPLYILRFVIDRSHGEPDPKALQLAFNAILHSALDTARTWHCGKVNLWNPSSEVKSLAAASGVKHHFVDREMESISSMMWYGPEKESDVDWFANEKFCWC

SEQ ID NO: 26624 - DNA, 2412 bp, Muscodor strobelii
  misc_feature: SGI EST ID NO. CUFF.62872.0
  misc_feature: Variant of the nucleotide sequence at SEQ ID NO 26622
cacagatcctggcaatcgaaatctggaaacagagtgaaggcttccactagcaacctcgacaccacaattagtaggtagatatctgtgcgataagagagccgtctctcgtcagcccgcattgtgggcggattccttcggtgtccttcttttatcttacgtatttggtctctggacttatgcaaccaaatctacctgtaggtcagggattctcaatctccacgatctacgtcagttagcctaggcatcatcagacgtccggggtatagtttaagggaccaagaaacgttggaactttacacaatagcttcacttgaatgatcgagtgaaaatatttttagatcccatgccaattccccctcattctcatttcttctgatcgtccgcctttgtctaagtgctgtcttaccaccgactcgcgttgtctggtgtcgattagttgccttggattccaacgcgtcccctttgttccaacttgacaagcagtgggcaacgaaagtggcgctatcaaattcaattacagagctagttgatgagctcttttgctacttttaaacctttggccgttgagccaacgtaaagttaagacggagaaagctcgtcgctcagatcacatatcaattcgtcaactatcttatgtgactcaatcgttgacaacctcgattttcttcgggcaaacgctcaagatagtcaaatctttgatcccacgtcccacgagatacttcgccaacatgggttcactgccaactaccaaagtcctcccggatttcgcagacacatctctgattcttacacatccgaccgaggccgaaaagcaacagacatggcgtctgaaccatggcgaatggggtggcccgcttagtcttgaagcatacatgcagcgcgagccattccttgcctcgacggctctaacatctaacggcggcataacgcattggattttgacagagccgacggctggggatgggccacggaagatacttgcatcctgcgagacgatacataaacacgtcttatacattcatgcggaaaagaatggaacggaaccggaagtaaaagagggcatcagctacggcatcggaagcgtatatacgtaccccgagttccgtggaaagaagtatgctgctagaatgttgaaagatctgagcgaaactctcaagacatggccagaacaccagtatccccagaagaaacagcgcttcagaaacggcgtcaaattatcaaatggcgacaccatactggagaatggctccccacaggtccaacagacgaacggccattccaagaaagaagtaatctgtactgcgctatggtcagatataggcaagaagttctacgcgtccaaaggctggccagtatatgagagctcgcatgtcgagttcccctcctcattccctttcgcaccgggcatcacttctatcttcgaccaagctgcaaagatcccaaatgcgtcactgactctcacgcctgtgacaaactcgaacctcgcgtcactttgttctgaagacgagatgcagctccgcgctcaaatgaagaaaaactcacagacgacgggccgcgcctcgttcgctttcacacctgatgcggacgttttccgctggcactgggctcgcgaggacttcctgacacctcacgtgtttccgggctgcacaccaagtgaagtccggggtatgatcgcgactgtgagccccagctctcccaccggacgtcatgcgcagacaaacggtcacggaaatggagctcccaaagcacaagaagcacgagtgtgggcgatctgggctagaaactacggctccgatgccgcgaccaaatcagaaaacaatcccctctacattctacggttcgttatcgatcgatcgcatggcgaaccggacccgaaagctctgcagctcgctttcaacgccatactgcacagcgcactggatacagcgcgcacctggcattgtgggaaggtgaatctctggaatccatcctcagaagttaagagtcttgctgcggcgtcgggcgtcaaacatcactttgtcgatcgtgagatggagagcatttctagcatgatgtggtatgggccggagaaggagagcgatgtggattggtttgccaatgagaagttttgttggtgctgagcatgcctcgatgataagaagaaggaagatgagcaaaaatgtcgtgagcggacacaagaagcatatagttgagtaagggtcatgttggagtacgattacacattgcttgcatatgtcggcatcctgatatagggaacccgggtatgacatgggataggctattgagacagaggcgcagcatagcatagttttctacacagctgcgagagtgaagcattgggtccttccaacaaataccgatgcagatagaaagactggacaatgaattttatggttaagactacgatcgcca

SEQ ID NO: 26625 - DNA, 1638 bp, Muscodor strobelii
  misc_feature: SGI cDNA ID NO. 569109
  misc_feature: Encodes the peptide sequence at SEQ ID NO 26626
atgggttccatgttcgaacagtccagcaacgggctgctgttcctgggcggccagaagatctctggcgccgacatcagagaccagaatgttctcgccacgcaagctattgcaaatgtcgtcaagagctccttcggcccgagtggtcttgacaagatgatggtcgacgatattggtgatgtcacagttacgaacgacggggctacgattctcagtttattagacgtcgaacacccggccggtaagatcctggtcgacctggcacaacagcaagacaaggaggtcggcgatggaacaacgtccgtcgtcctcattgccgccgagcttctacgacgcgccaacgagttgatgcggaacaagatacaccccaccaccattatcaccggttaccgattagccctgagggaagccgtcaaatatatgaacgagaacgtgagcaccaaggtcgagaacctcggccgcgaatccctcatcaatatcgccaaaacctccatgtccagcaagatcatcggtgccgactccgacttctttgccaacatggtcgtcgatgccatgcaggccgtcaagtccaccaataaccgcaatgaagtcaagtacccagtcaaggctgtaaacattctcaaggctcacggcaagggcgttttagagtcagtattggtcaagggctacgctctgaactgcactgtcgcatcacaggctatggtcacaaggatacaagacgccaagatcgccgttttcgacatgaacttccagaaagagcgcatgaagttgggtgtacagattactgtcgacgacccgaaacagttggagcagattcgagctagggaatccggcatggtcatcgagcgaatcgagatgatcctcaaggcgggcgccaatgtcattctcactaccaagggaattgatgatatgtgcatgaagttcttcattgagcgcggcgccatggccgtccgtcgatgcaagaaggaagacctacgacgaatcgccaaggcgactggtgccactcttcttagcacattgtctgacttgaatggcgacgagaaattcgagacctcctacctgggctatgcagaggaagttgcccaagaacgtatctcggacgacgaatgtatcttggtcaagggcaccaagacccactcttcggcctctatcctcctccgcgggcccaatgactttaccttggatgagatggagcgctccgttcacgactcgctttgtgccgtcaagcggacactggagagcggaagcatcgtccccggtgggggtgctgtggaaacggctttacatatctacctcgaggaatttgcgggcaccgtcgggtcaagagaacagctcgcgattggtgaattcgcacagtcactcctcgtcattcccaaaacacttgcgcgcacccaggacgacgatggcaatgaagatgagaagacattggcacgcaagaagggctacaagaactacggtctagacctcatgaagggcaaggtggtagatgaggtcaaggcaggtgttcttgagcccagtgtaagcaaggtacgacagctgaagagtgccgttgaggcgtgtatcagcatcatgcgtatagacactctgatcaaattagatccggaagagagaggggagccagatgatggtcacggtcactga

SEQ ID NO: 26626 - protein, 545 aa, Muscodor strobelii
  misc_feature: SGI Peptide ID NO. 569109
  misc_feature (36)..(533): Pfam Id: PF00118 Pfam Desc: TCP-1/cpn60 chaperonin family
  misc_feature (1)..(545): NCBI GI: 39969495 Blast Desc: conserved [Magnaporthe grisea 70-15] gi|145015162|gb|EDJ99730.1| conserved [Magnaporthe grisea 70-15]
  misc_feature (1)..(545): NCBI GI: 46121743 Blast Desc: FG05250.1 [Gibberella zeae PH-1]
  misc_feature (1)..(545): NCBI GI: 116195312 Blast Desc: conserved [Chaetomium globosum CBS 148.51] gi|88180167|gb|EAQ87635.1| conserved [Chaetomium globosum CBS 148.51]
  misc_feature (1)..(545): NCBI GI: 256727403 Blast Desc: [Nectria haematococca mpVI 77-13-4]
  misc_feature (1)..(545): NCBI GI: 164429413 Blast Desc: T-complex protein 1 subunit alpha [Neurospora crassa OR74A] gi|40882173|emb|CAF05999.1| tailless complex polypeptide 1 / chaperonin subunit alpha [Neurospora crassa] T-complex protein
  misc_feature (1)..(545): NCBI GI: 171691300 Blast Desc: protein product [Podospora anserina] gi|170945598|emb|CAP71711.1| protein product [Podospora anserina]
  misc_feature (1)..(545): NCBI GI: 154309171 Blast Desc: BC1G_07480 [Botryotinia fuckeliana B05.10] gi|150852523|gb|EDN27715.1| BC1G_07480 [Botryotinia fuckeliana B05.10]
  misc_feature (1)..(545): NCBI GI: 212535536 Blast Desc: t-complex protein 1, alpha subunit, [Penicillium marneffei ATCC 18224] gi|210070323|gb|EEA24413.1| t-complex protein 1, alpha subunit, [Penicillium marneffei ATCC 18224]
  misc_feature (1)..(545): NCBI GI: 242793404 Blast Desc: t-complex protein 1, alpha subunit, [Talaromyces stipitatus ATCC 10500] gi|218718742|gb|EED18162.1| t-complex protein 1, alpha subunit, [Talaromyces stipitatus ATCC 10500]
  misc_feature (1)..(545): NCBI GI: 261204759 Blast Desc: T-complex protein 1 subunit alpha [Ajellomyces dermatitidis SLH14081] gi|239587378|gb|EEQ70021.1| T-complex protein 1 subunit alpha [Ajellomyces dermatitidis SLH14081] 1
MGSMFEQSSNGLLFLGGQKISGADIRDQNVLATQAIANVVKSSFGPSGLDKMMVDDIGDVTVTNDGATILSLLDVEHPAGKILVDLAQQQDKEVGDGTTSVVLIAAELLRRANELMRNKIHPTTIITGYRLALREAVKYMNENVSTKVENLGRESLINIAKTSMSSKIIGADSDFFANMVVDAMQAVKSTNNRNEVKYPVKAVNILKAHGKGVLESVLVKGYALNCTVASQAMVTRIQDAKIAVFDMNFQKERMKLGVQITVDDPKQLEQIRARESGMVIERIEMILKAGANVILTTKGIDDMCMKFFIERGAMAVRRCKKEDLRRIAKATGATLLSTLSDLNGDEKFETSYLGYAEEVAQERISDDECILVKGTKTHSSASILLRGPNDFTLDEMERSVHDSLCAVKRTLESGSIVPGGGAVETALHIYLEEFAGTVGSREQLAIGEFAQSLLVIPKTLARTQDDDGNEDEKTLARKKGYKNYGLDLMKGKVVDEVKAGVLEPSVSKVRQLKSAVEACISIMRIDTLIKLDPEERGEPDDGHGH

SEQ ID NO: 26627 - DNA, 2421 bp, Muscodor strobelii
  misc_feature: SGI EST ID NO. CUFF.62876.0
  misc_feature: Variant of the nucleotide sequence at SEQ ID NO 26625
cacgggatggaggggtagtggctcatgcacacattatcggggctgagattaacctcccgtccgcaaaaaagttgctgcccccctactactgacaaaagctggagctagctggcgggcttcaaatcagcaaaccagacctcagtcgcagctgcctgatcacccacacatcgcatactcgacctcgatagacatctcgatcctttcccgccgctgcgatatagctgtggacaactaacgatatgggttccatgttcgaacagtccagcaacgggctgctgttcctgggcggccagaagatctctggcgccgacatcagagaccagaatgttctcgccacgcaagctattgcaaatgtcgtcaagagctccttcggcccgagtggtcttgacaagatgatggtcgacgatattggtgatgtcacagttacgaacgacggggctacgattctcagtttattagacgtcgaacacccggccggtaagatcctggtcgacctggcacaacagcaagacaaggaggtcggcgatggaacaacgtccgtcgtcctcattgccgccgagcttctacgacgcgccaacgagttgatgcggaacaagatacaccccaccaccattatcaccggttaccgattagccctgagggaagccgtcaaatatatgaacgagaacgtgagcaccaaggtcgagaacctcggccgcgaatccctcatcaatatcgccaaaacctccatgtccagcaagatcatcggtgccgactccgacttctttgccaacatggtcgtcgatgccatgcaggccgtcaagtccaccaataaccgcaatgaagtcaagtacccagtcaaggctgtaaacattctcaaggctcacggcaagggcgttttagagtcagtattggtcaagggctacgctctgaactgcactgtcgcatcacaggctatggtcacaaggatacaagacgccaagatcgccgttttcgacatgaacttccagaaagagcgcatgaagttgggtgtacagattactgtcgacgacccgaaacagttggagcagattcgagctagggaatccggcatggtcatcgagcgaatcgagatgatcctcaaggcgggcgccaatgtcattctcactaccaagggaattgatgatatgtgcatgaagttcttcattgagcgcggcgccatggccgtccgtcgatgcaagaaggaagacctacgacgaatcgccaaggcgactggtgccactcttcttagcacattgtctgacttgaatggcgacgagaaattcgagacctcctacctgggctatgcagaggaagttgcccaagaacgtatctcggacgacgaatgtatcttggtcaagggcaccaagacccactcttcggcctctatcctcctccgcgggcccaatgactttaccttggatgagatggagcgctccgttcacgactcgctttgtgccgtcaagcggacactggagagcggaagcatcgtccccggtgggggtgctgtggaaacggctttacatatctacctcgaggaatttgcgggcaccgtcgggtcaagagaacagctcgcgattggtgaattcgcacagtcactcctcgtcattcccaaaacacttgcggtgaatgccgctaaggatgcaagcgagcttgtagcacagctccgatcaaggcacgcctatcgcagcgcacccaggacgacgatggcaatgaagatgagaagacattggcacgcaagaagggctacaagaactacggtctagacctcatgaagggcaaggtggtagatgaggtcaaggcaggtgttcttgagcccagtgtaagcaaggtacgacagctgaagagtgccgttgaggcgtgtatcagcatcatgcgtatagacactctgatcaaattagatccggaagagagaggggagccagatgatggtcacggtcactgatgatgggatggaaaaagaaaacaggcttgcttggagtgcggcgtttccagatcggaaggtcacagatgtctgtaatcatagtgcgacgacactggcttggctgaaaaatgtgacttggatggacacagcatagagggtttgtgattacccatgatgctgtgaggctacaagccacttatcatggttacagagaggaacggtttattactatttgcccgcctcaccgcagtcttccttcatagctatgcccgttctcaatgccacctgcaggccgattagtccccgagaggatgatcggcttgcgtcggcagggcccacacaaacccagactatctgatcccgtgaacgcgggtaagtttgatagtgcctgccctgaatagctgcattgacgaatcaaatactctgcatgcggctcaagcaatcaagttgaagggttcacctcatgacagaactcaatacctcaatgctgtaaagtaagc

SEQ ID NO: 26628 - DNA, 888 bp, Muscodor strobelii
  misc_feature: SGI cDNA ID NO. 569110
  misc_feature: Encodes the peptide sequence at SEQ ID NO 26629
atgaagctgtacgccatcggagacctgcatctcggatatgagttcaacaagaacgcactcaacgacctcgagccacaccttgaagatggtcttatattagcgggagatgtaggcgagaagcccgaacatctggaattggtgtttgcgatatgcaagaatcaattcaaggaagtgttctgggtaccggggaatcatgaactgtacaccatgccaccaagcaaagagccgcgcggtgtggcaaagtatgagcaatgtgttgaattagcgcgcaagcatggggttcacacacccgacgatgatttctttcgatgggaaggcgagggcggaccagtcatcattgcgccaatattcacactctacgactacagctttcgacctccggacatcacgcgcgagagggcaatcaaatgggcggaggaggccgatacggtcgcgactgatgaattcatcttacacacagatcctttcgattcaaaagacgactggtgtaaggtgttgatctcgcggtttgagaagaaactcgacgaaactgtcgcacagaaccccggcatcccactcatcatcataaatcactggccactgcgcgaagatctcgtcttcattccgcgagtaccgcgcttcagtctctggtgcggcacgaaggctactgaggactggcacactcgattcaatgccaaagtggtcgtgtccgggcacctgcatgtgcgccggacggattggaaagatcatgtgcgatttgaggaatgcagtctgggatatcctaagcaatgggaggatgcacgggaaaaggctggccggaatatcaacgacatgctccgagagatactacctggtcccgacccacccgaatctgggttcgcggatacgaaatggcgccggtttggttga

SEQ ID NO: 26629 - protein, 295 aa, Muscodor strobelii
  misc_feature: SGI Peptide ID NO. 569110
  misc_feature (1)..(236): Pfam Id: PF00149 Pfam Desc: Calcineurin-like phosphoesterase
  misc_feature (2)..(295): NCBI GI: 242779398 Blast Desc: conserved [Talaromyces stipitatus ATCC 10500] gi|218723053|gb|EED22471.1| conserved [Talaromyces stipitatus ATCC 10500]
  misc_feature (3)..(295): NCBI GI: 212533977 Blast Desc: conserved [Penicillium marneffei ATCC 18224] gi|210072509|gb|EEA26598.1| conserved [Penicillium marneffei ATCC 18224]
  misc_feature (2)..(295): NCBI GI: 189209177 Blast Desc: ser/Thr protein phosphatase family protein [Pyrenophora tritici-repentis Pt-1C-BFP] gi|187977014|gb|EDU43640.1| ser/Thr protein phosphatase family
  misc_feature (2)..(295): NCBI GI: 169613526 Blast Desc: SNOG_09894 [Phaeosphaeria nodorum SN15] gi|111062039|gb|EAT83159.1| SNOG_09894 [Phaeosphaeria nodorum SN15]
  misc_feature (1)..(279): NCBI GI: 144898274 Blast Desc: metallophosphoesterase [Magnetospirillum gryphiswaldense MSR-1]
  misc_feature (1)..(279): NCBI GI: 162453335 Blast Desc: metallophosphoesterase [Sorangium cellulosum 'So ce 56'] gi|161163917|emb|CAN95222.1| Metallophosphoesterase [Sorangium cellulosum 'So ce 56']
  misc_feature (1)..(280): NCBI GI: 115378826 Blast Desc: phosphoesterase [Stigmatella aurantiaca DW4/3-1] gi|115364182|gb|EAU63276.1| phosphoesterase [Stigmatella aurantiaca DW4/3-1]
  misc_feature (1)..(281): NCBI GI: 108763983 Blast Desc: Ser/Thr protein phosphatase family protein [Myxococcus xanthus DK 1622] gi|18140054|gb|AAL60238.1|AF457462_3 phosphoesterase [Myxococcus xanthus] gi|108467863|gb|ABF93048.1|
  misc_feature (1)..(277): NCBI GI: 262193495 Blast Desc: metallophosphoesterase [Haliangium ochraceum DSM 14365] gi|262076842|gb|ACY12811.1| metallophosphoesterase [Haliangium ochraceum DSM 14365]
  misc_feature (1)..(272): NCBI GI: 114705382 Blast Desc: FP2506_10596 [Fulvimarina pelagi HTCC2506] gi|114540167|gb|EAU43287.1| FP2506_10596 [Fulvimarina pelagi HTCC2506]
MKLYAIGDLHLGYEFNKNALNDLEPHLEDGLILAGDVGEKPEHLELVFAICKNQFKEVFWVPGNHELYTMPPSKEPRGVAKYEQCVELARKHGVHTPDDDFFRWEGEGGPVIIAPIFTLYDYSFRPPDITRERAIKWAEEADTVATDEFILHTDPFDSKDDWCKVLISRFEKKLDETVAQNPGIPLIIINHWPLREDLVFIPRVPRFSLWCGTKATEDWHTRFNAKVVVSGHLHVRRTDWKDHVRFEECSLGYPKQWEDAREKAGRNINDMLREILPGPDPPESGFADTKWRRFG

SEQ ID NO: 26630 - DNA, 1311 bp, Muscodor strobelii
  misc_feature: SGI EST ID NO. CUFF.62878.0
  misc_feature: Variant of the nucleotide sequence at SEQ ID NO 26628
tgacgctacctgggaattgataaatgccccctccatgcaccaatccatgtggctgacagcgatctgcaacataagcaataagtgaattcatattcaaccgccgtttaactttcacggtagccagttgctctctcgcgatgaagctgtacgccatcggagacctgcatctcggatatgagttcaacaagaacgcactcaacgacctcgagccacaccttgaagatggtcttatattagcgggagatgtaggcgagaagcccgaacatctggaattggtgtttgcgatatgcaagaatcaattcaaggaagtgttctgggtaccggggaatcatgaactgtacaccatgccaccaagcaaagagccgcgcggtgtggcaaagtatgagcaatgtgttgaattagcgcgcaagcatggggttcacacacccgacgatgatttctttcgatgggaaggcgagggcggaccagtcatcattgcgccaatattcacactctacgactacagctttcgacctccggacatcacgcgcgagagggcaatcaaatgggcggaggaggccgatacggtcgcgactgatgaattcatcttacacacagatcctttcgattcaaaagacgactggtgtaaggtgttgatctcgcggtttgagaagaaactcgacgaaactgtcgcacagaaccccggcatcccactcatcatcataaatcactggccactgcgcgaagatctcgtcttcattccgcgagtaccgcgcttcagtctctggtgcggcacgaaggctactgaggactggcacactcgattcaatgccaaagtggtcgtgtccgggcacctgcatgtgcgccggacggattggaaagatcatgtgcgatttgaggaatgcagtctgggatatcctaagcaatgggaggatgcacgggaaaaggctggccggaatatcaacgacatgctccgagagatactacctggtcccgacccacccgaatctgggttcgcggatacgaaatggcgccggtttggttgatagagcacagatggaacggctggtcatctcttttctgctgcattgtatttctgtgactctgggttatagccaggcgcatgcgtacatctgagacatatgacttataccaagacacagtacgctcgtacatgggagaaattgtgcatgagtgatgaattctacgacgtgcaagattgacctcgtttccgagatgggtaacgaatatgaacgtttgcaatgaggcttttggaaactcctgaatttcttttacttatcctaggtttcttacagagtaaataacgtgcct

SEQ ID NO: 26631 - DNA, 1497 bp, Muscodor strobelii
  misc_feature: SGI cDNA ID NO. 569111
  misc_feature: Encodes the peptide sequence at SEQ ID NO 26632
atggcaaaatttgaatttgtcaatgtcgaccatccgaacgcattaaagaagcactcaacgaaaatccgccaacatgtgatgaaagatatcggcaagtcccggcgtcgaccgaagaaacagagatcaacgaccatcgcagagcttgtgccaaccgattctgaatctgcgtctactagctctgggaactcgtatgaattgacaatggtgaccgatccgctggccgacaacaagctccacaacctcatattccctgttgaaatggacgaggaacggagcaatcttgcacgatttttattatcagaagcgcaatcatcgtaccgtccatttcgggttccctggctgaccatgggcatgtcggattcggccgccttctacattacgctagcaaatgcagagctatttaaagtcatgaagccaggggagatgaagccagactatacgacaaatgagaaagccatgaaatggtatacgaaatcattggaaatggtgtctcaaagagtggttgacccaaagaaacacgatgagggtcttctcatcgcaattgctggacttgtgtgtcacgactcctcgataggcaattttgatcgacaagatattcacttgcagggcctgaagcgattgattgataggagaggtggcattcagacggtgacatatccattgcttcgactcatgatctcatggcatgatttgacgggtgcctcttatcgtaatacggtcccgtacttcgaagtgccaaatggcgctataacggacatcgatacagggaacgatacagtatatttgcaaagactgcttgataattggaaccagaaatgctcctatctcggtgatcttctaagcgcgcttaaagccaccgctgcagtcgcgagttacatcaaccggcgatcccacgaaccgaaattctggcaaggcgatgtcgtagctgcacagctcttagcgccagctcttcatgagctcctgagcttagaaggtcgagctttgccaaataatccttgcgacactcacttctcagggatcgcagcgcgggaggctttcagaaggagtgcgctcatcttcttggcatctatcaaagtcaagtttggcgctgtcgcatgggatttgaaaagacatgttgaagatttccgacagatttcgagaattccacgcgtagagtggccggtagtaccagaactaaatctctgggctcatactatcgcggcgctacaagatgatgacagtgagaacagagtccagcacatttctgtcattatcagtattatgggggcgcttggcctcgcatctgcggatcaagcactggaggttgtgagaggcatcatctgggttgaagacgttttcacagatcaggttcaatctctgcatgatgatattgacaactttttatccactcccattccagaacgactgccggcttcaaattattcctttgaatatactggcatatctaacagacttaacgaaactcacgtgccagctaacgactacgatgttttttga

SEQ ID NO: 26632 - protein, 498 aa, Muscodor strobelii
  misc_feature: SGI Peptide ID NO. 569111
  misc_feature (116)..(459): NCBI GI: 242804284 Blast Desc: TSTA_021670 [Talaromyces stipitatus ATCC 10500] gi|218717689|gb|EED17110.1| TSTA_021670 [Talaromyces stipitatus ATCC 10500]
  misc_feature (116)..(466): NCBI GI: 212539530 Blast Desc: PMAA_051220 [Penicillium marneffei ATCC 18224] gi|210067219|gb|EEA21311.1| PMAA_051220 [Penicillium marneffei ATCC 18224]
  misc_feature (88)..(455): NCBI GI: 212545536 Blast Desc: PMAA_007520 [Penicillium marneffei ATCC 18224] gi|210065891|gb|EEA19985.1| PMAA_007520 [Penicillium marneffei ATCC 18224]
  misc_feature (102)..(449): NCBI GI: 242815996 Blast Desc: TSTA_106530 [Talaromyces stipitatus ATCC 10500] gi|218715020|gb|EED14443.1| TSTA_106530 [Talaromyces stipitatus ATCC 10500]
  misc_feature (2)..(460): NCBI GI: 256721787 Blast Desc: NECHADRAFT_53329 [Nectria haematococca mpVI 77-13-4]
  misc_feature (16)..(321): NCBI GI: 256724718 Blast Desc: NECHADRAFT_48037 [Nectria haematococca mpVI 77-13-4]
  misc_feature (2)..(271): NCBI GI: 46139137 Blast Desc: FG11083.1 [Gibberella zeae PH-1]
  misc_feature (12)..(245): NCBI GI: 258573161 Blast Desc: [Uncinocarpus reesii 1704] gi|237901028|gb|EEP75429.1| [Uncinocarpus reesii 1704]
  misc_feature (87)..(457): NCBI GI: 154304571 Blast Desc: [Botryotinia fuckeliana B05.10] gi|150854141|gb|EDN29333.1| [Botryotinia fuckeliana B05.10]
  misc_feature (16)..(246): NCBI GI: 116194262 Blast Desc: CHGG_03729 [Chaetomium globosum CBS 148.51] gi|88179642|gb|EAQ87110.1| CHGG_03729 [Chaetomium globosum CBS 148.51]
MAKFEFVNVDHPNALKKHSTKIRQHVMKDIGKSRRRPKKQRSTTIAELVPTDSESASTSSGNSYELTMVTDPLADNKLHNLIFPVEMDEERSNLARFLLSEAQSSYRPFRVPWLTMGMSDSAAFYITLANAELFKVMKPGEMKPDYTTNEKAMKWYTKSLEMVSQRVVDPKKHDEGLLIAIAGLVCHDSSIGNFDRQDIHLQGLKRLIDRRGGIQTVTYPLLRLMISWHDLTGASYRNTVPYFEVPNGAITDIDTGNDTVYLQRLLDNWNQKCSYLGDLLSALKATAAVASYINRRSHEPKFWQGDVVAAQLLAPALHELLSLEGRALPNNPCDTHFSGIAAREAFRRSALIFLASIKVKFGAVAWDLKRHVEDFRQISRIPRVEWPVVPELNLWAHTIAALQDDDSENRVQHISVIISIMGALGLASADQALEVVRGIIWVEDVFTDQVQSLHDDIDNFLSTPIPERLPASNYSFEYTGISNRLNETHVPANDYDVF

SEQ ID NO: 26633 - DNA, 2607 bp, Muscodor strobelii
  misc_feature: SGI EST ID NO. CUFF.62882.0
  misc_feature: Variant of the nucleotide sequence at SEQ ID NO 26631
gagatttatctcgagcttgaaagctttcagattgatgagtatattgtcttcgccattgaagctctggaatggaagtcttgataaagtgcctgtccttgtcgtgtaattggagctttccctcattcatcttccatgcgcctatcgctcctgtggcacgtgcacccagaacgtgaaatcaatattcaacagctcaaaagagactcggaatacgtcaagaggacatatttctgttaaggaatcagtcgagacaacttagtaatgtccaaaagttgagatggcaaaatttgaatttgtcaatgtcgaccatccgaacgcattaaagaagcactcaacgaaaatccgccaacatgtgatgaaagatatcggcaagtcccggcgtcgaccgaagaaacagagatcaacgaccatcgcagagcttgtgccaaccgattctgaatctgcgtctactagctctgggaactcgtatgaattgacaatggtgaccgatccgctggccgacaacaagctccacaacctcatattccctgttgaaatggacgaggaacggagcaatcttgcacgatttttattatcagaagcgcaatcatcgtaccgtccatttcgggttccctggctgaccatgggcatgtcggattcggccgccttctacattacgctagcaaatgcagagctatttaaagtcatgaagccaggggagatgaagccagactatacgacaaatgagaaagccatgaaatggtatacgaaatcattggaaatggtgtctcaaagagtggttgacccaaagaaacacgatgagggtcttctcatcgcaattgctggacttgtgtgtcacgactcctcgataggcaattttgatcgacaagatattcacttgcagggcctgaagcgattgattgataggagaggtggcattcagacggtgacatatccattgcttcgactcatgatctcatggcatgatttgacgggtgcctcttatcgtaatacggtcccgtacttcgaagtgccaaatggcgctataacggacatcgatacagggaacgatacagtatatttgcaaagactgcttgataattggaaccagaaatgctcctatctcggtgatcttctaagcgcgcttaaagccaccgctgcagtcgcgagttacatcaaccggcgatcccacgaaccgaaattctggcaaggcgatgtcgtagctgcacagctcttagcgccagctcttcatgagctcctgagcttagaaggtcgagctttgccaaataatccttgcgacactcacttctcagggatcgcagcgcgggaggctttcagaaggagtgcgctcatcttcttggcatctatcaaagtcaagtttggcgctgtcgcatgggatttgaaaagacatgttgaagatttccgacagatttcgagaattccacgcgtagagtggccggtagtaccagaactaaatctctgggctcatactatcgcggcgctacaagatgatgacagtgagaacagagtccagcacatttctgtcattatcagtattatgggggcgcttggcctcgcatctgcggatcaagcactggaggttgtgagaggcatcatctgggttgaagacgttttcacagatcaggttcaatctctgcatgatgatattgacaactttttatccactcccattccagaacgactgccggcttcaaattattcctttgaatatactggcatatctaacagacttaacgaaactcacgtgccagctaacgactacgatgttttttgaaattactatccacccaaatgacggttcgaattaccgaaaccatatcgaaaacccacagaacgattagggaaatagctgaggcttaccctgtcgagatcagtcaccttcccggaaatcaatcatctacagagtaggtgggcacggtctcacaagatcgacaatatggagcgaaaagagtgtttgggctcagtagctctacatcaaccactacgtatcgagttttggtgcagcgacttgtaggctctgaaaacccaggtgctttctggtccgtctatttaaacaatgattcttccgagtctacatatagagctttggcaaaaggtcgggcccaagccattttccattcattaaccatgttactttcttaagccagtgtggcgtatctgggattttcggaaaactgatgtcggaaagcccgatatttgcgactaacgatcggtgctcatgaggataaaactcaacaagccgctcatggcttcgggtaagagagaatagccaagagatctctggaatgacgacatgatagagccattttgcatagatttccggggaacattagaccatttgatgggaatgccttaagcttacgataccatatcttacgaatctacctggtttagatattttgcacgaaatttgatgttgcaacgaagatgtcatatagcagctgataattgaaatcgaataatgaaagcaccatctaacaattcaatagtgaggcgacgcctgagctttacaaataaccacacaataaaacaatgctatttgttgctcctaacagaaggtagtaaactccagcttacgacgttgaatcaccgtcccttatcagcatgtgg

SEQ ID NO: 26634 - DNA, 1431 bp, Muscodor strobelii
  misc_feature: SGI cDNA ID NO. 569112
  misc_feature: Encodes the peptide sequence at SEQ ID NO 26635
atgaaattcacgacgagttctgcaatggcggtgatggttggtgttgcttcggctcgcccggatatcttaatttctggctcggcgaagaccaagagagaggtgccccaggagcactctcatgagcagtttctgaccggcgttggcgacgcgctgaacctgaacaacgtcgatcaagttcaagaccccgtctttgccctgcttggaaatgctgccgctgctgcgggtgctggtaatgttgaggatctcgactgtctccagcagcgtgttgcagaccaggccttcaccaatgctaaggcggctggtgatgttactgggatgaccaacgctctgatcttccgtgctctggaacgaaacaccggctcagttggcttggcttccgttctttgcacagagaccgccgtcaatcctgagattggtgccatctcacagcatcaagatccggcttccgacaatgctgcggaaacgaacaaggccatcactctcgctctcgctcagcagcttgcttcgattggtgccgaccctcaacttgctctccaagccggcaccttcgcacccggcgaggtcggtgacccgactggtgctggtaacacttgcgatgttgacaccgatccggtcggctgtatcttcacgcaaaacctcttggttaacgatgccactcctgatgagatcgatgccgccgtcgcaggtgctggagctggttccgccactccagttgcttctgaccctgcttcttctactgatgatgggtgcgctgcttcaggttctgctgttgccgatgctcccgctgccgatgctccagctgataacggtgctgccgacggcgctgctgatgctgcaaccccagccagcggtgctaacgtaaacgttttcactggtactctcggcgcagagcctgtcccagtcatcagcgatgccgccagcgacagacccttcagcgtcaacggcgacacgttcgtgaacgccggtgccgccctgcagcgtgcttgcgccgtacagaacaacgcttgtgccaatgctgcgaacagcggcgctatcgattcttccgtcggtgactgcaatgctcaagaacaggaatgcaacagtgccaactccgctgttgctaagcgcggtgtctccggtctgcgtgctcgccagaacgctaacgccaacgctggccttgacacaggtgcctgtggctcgcccgccatctccttcggtgtccaaaaggaccgtgctaatgaggagtctttcgctgctgtcaaccaggctgatttcaaccacgggtcggcgctgaatgctaaggtcattgttgactttatctgtgggcagctcgagagcaaatgtgatgcttcggctgctacggttgaggattgtcaacagggcgcggatgctgccgcttcattgaaaggtcaggctgctgctgatgctttcaaccaggctcttggtgtttag

SEQ ID NO: 26635 - protein, 476 aa, Muscodor strobelii
  misc_feature: SGI Peptide ID NO. 569112
  misc_feature (1)..(476): NCBI GI: 116195206 Blast Desc: CHGG_04201 [Chaetomium globosum CBS 148.51] gi|88180114|gb|EAQ87582.1| CHGG_04201 [Chaetomium globosum CBS 148.51]
  misc_feature (10)..(476): NCBI GI: 256727231 Blast Desc: NECHADRAFT_33829 [Nectria haematococca mpVI 77-13-4]
  misc_feature (1)..(368): NCBI GI: 154317316 Blast Desc: BC1G_03560 [Botryotinia fuckeliana B05.10] gi|150844977|gb|EDN20170.1| BC1G_03560 [Botryotinia fuckeliana B05.10]
  misc_feature (1)..(374): NCBI GI: 156059282 Blast Desc: SS1G_03653 [Sclerotinia sclerotiorum 1980] gi|154701440|gb|EDO01179.1| SS1G_03653 [Sclerotinia sclerotiorum 1980]
  misc_feature (1)..(476): NCBI GI: 171691150 Blast Desc: protein product [Podospora anserina] gi|170945523|emb|CAP71635.1| protein product [Podospora anserina]
  misc_feature (5)..(236): NCBI GI: 212536951 Blast Desc: conserved [Penicillium marneffei ATCC 18224] gi|210068373|gb|EEA22464.1| conserved [Penicillium marneffei ATCC 18224]
  misc_feature (1)..(224): NCBI GI: 242810590 Blast Desc: conserved [Talaromyces stipitatus ATCC 10500] gi|218716237|gb|EED15659.1| conserved [Talaromyces stipitatus ATCC 10500]
  misc_feature (33)..(345): NCBI GI: 39940296 Blast Desc: MGG_05092 [Magnaporthe grisea 70-15] gi|145010654|gb|EDJ95310.1| MGG_05092 [Magnaporthe grisea 70-15]
  misc_feature (1)..(230): NCBI GI: 226282669 Blast Desc: [Paracoccidioides brasiliensis Pb01]
  misc_feature (26)..(231): NCBI GI: 226292169 Blast Desc: [Paracoccidioides brasiliensis Pb18]
MKFTTSSAMAVMVGVASARPDILISGSAKTKREVPQEHSHEQFLTGVGDALNLNNVDQVQDPVFALLGNAAAAAGAGNVEDLDCLQQRVADQAFTNAKAAGDVTGMTNALIFRALERNTGSVGLASVLCTETAVNPEIGAISQHQDPASDNAAETNKAITLALAQQLASIGADPQLALQAGTFAPGEVGDPTGAGNTCDVDTDPVGCIFTQNLLVNDATPDEIDAAVAGAGAGSATPVASDPASSTDDGCAASGSAVADAPAADAPADNGAADGAADAATPASGANVNVFTGTLGAEPVPVISDAASDRPFSVNGDTFVNAGAALQRACAVQNNACANAANSGAIDSSVGDCNAQEQECNSANSAVAKRGVSGLRARQNANANAGLDTGACGSPAISFGVQKDRANEESFAAVNQADFNHGSALNAKVIVDFICGQLESKCDASAATVEDCQQGADAAASLKGQAAADAFNQALGV

SEQ ID NO: 26636 - DNA, 3167 bp, Muscodor strobelii
  misc_feature: SGI EST ID NO. CUFF.62918.1
  misc_feature: Variant of the nucleotide sequence at SEQ ID NO 26634
ccggtctcatcccaacttcatcggtctcaagacttgggatcaggcgctaaaaatcttcgtccttctgttcagctgtggggaaaatgggttgtgtgttataacttgacaaggcacgatctcgcttctgacgaaccacaagatcctgggtgccactacatcatttcggctgctacagccggaatggcgtctccttcaaatctcgccagtggcttggaagaaactaatcgcaatgcaatagagctggacagcagcaaatattcacggcttaatgctacatgattgacgattggcgagtattacatacctcttagccgcgtggccacggcataggtagaatcacgagaagcggcccctggcaataaactctcagtagcactcacgcttctgagttgcatatcttgtcttccccttgaagcttcgaggaatactccctgccggcatcaagtgcagccgacgtaaaccagctcccaaccttctcgttaagcgccataacgggccgccttccatgtgtctgaaatgttggaatgatgagaaagcagaaagagatctaccaaacaaggggcacctggtactggtagaagaccccgattccccatctgctatgagacgacgatccaaagtcgagcttggcgagcttgaaggggtcataggccgtggcggcataccccatatgtccttagtctctgagcaggttacacatcagatattcgcgtcgaacccttgctcgatgtctcgtgcatcgacaaggcggtcgtcattaggtgttcgaccgtttgtatatagagcatgccatgtaaactccagtcgtcacttttcactcttgcctcttctctatccaacaagtgtctaaacatcacagctctccttccgctctttttccttctctaggttctgtgaactaatctttcgcttctaacgctcttttacgtatacgttcaataaggccgggcctcttgtacgatatcaaatcactttctctatactaaaccttttgggtaattgtgttgtttggaagaaccgaatcctacgatcgtttacctgtccttgttcaaaatgaaattcacgacgagttctgcaatggcggtgatggttggtgttgcttcggctcgcccggatatcttaatttctggctcggcgaagaccaagagagaggtgccccaggagcactctcatgagcagtttctgaccggcgttggcgacgcgctgaacctgaacaacgtcgatcaagttcaagaccccgtctttgccctgcttggaaatgctgccgctgctgcgggtgctggtaatgttgaggatctcgactgtctccagcagcgtgttgcagaccaggccttcaccaatgctaaggcggctggtgatgttactgggatgaccaacgctctgatcttccgtgctctggaacgaaacaccggctcagttggcttggcttccgttctttgcacagagaccgccgtcaatcctgagattggtgccatctcacagcatcaagatccggcttccgacaatgctgcggaaacgaacaaggccatcactctcgctctcgctcagcagcttgcttcgattggtgccgaccctcaacttgctctccaagccggcaccttcgcacccggcgaggtcggtgacccgactggtgctggtaacacttgcgatgttgacaccgatccggtcggctgtatcttcacgcaaaacctcttggttaacgatgccactcctgatgagatcgatgccgccgtcgcaggtgctggagctggttccgccactccagttgcttctgaccctgcttcttctactgatgatgggtgcgctgcttcagggtacgtgcgttgtattttcacaagaaatagactaatatgtgtgtttacagttctgctgttgccgatgctcccgctgccgatgctccagctgataacggtgctgccgacggcgctgctgtaagataatagtggtccgaaacaagtaacaattagatattgactttcataataggatgctgcaaccccagccagcggtgctaacgtaaacgttttcactggtactctcggcgcagagcctgtcccagtcatcagcgatgccgccagcgacagacccttcagcgtcaacggcgacacgttcgtgaacgccggtgccgccctgcagcgtgcttgcgccgtacagaacaacgcttgtgccaatgctgcgaacagcggcgctatcgattcttccgtcggtgactgcaatgctcaagaacaggaatgcaacagtgccaactccgctgttgctaagcgcggtgtctccggtctgcgtgctcgccagaacgctaacgccaacgctggccttgacacaggtgcctgtggctcgcccgccatctccttcggtgtccaaaaggaccgtgctaatgaggagtctttcgctgctgtcaaccaggctgatttcaaccacgggtcggcgctgaatgctaaggtcattgttgactttatctgtgggcagctcgagagcaaatgtgatgcttcggctgctacggttgaggattgtcaacagggcgcggatgctgccgcttcattgaaaggtcaggctgctgctgatgctttcaaccaggctcttggtgtttagatcgtcggatgacaaagcgtgggaggggatagagggagtgcagtgggtgaagtcgatatacctcgggagttgtgtataggattgaagtttggtgtgaatgaatgattcatgagaccttgattatgattaattggcatggtgacgaattatataattagctgtgtgcttgaatggataaattcttcgctgaacccgattactcgtacttgtggttctagttggctggcgtcatcacagttgcttcctcgttccactattcacgacggcatcttcttcattgcggtgacgacttttcatgtttcgagattccctatgtgatccaagggcttactgagggcccgcgatcaagctattgaaatttttgtaagcttgcagacttgaatgtcgtcttcctgattacacttgatcgtctgttgtcgttgctcaagctttgatattttacgcgcgtccggttttataaatccggaaggcgatccagaatattcatcttatctgcagtgatggagaccaaccatcacaggtctatacatcgctaagaagaaatgtggcccaagtgaaactaaatcatgttatcttta

SEQ ID NO: 26637 - DNA, 693 bp, Muscodor strobelii
  misc_feature: SGI cDNA ID NO. 569113
  misc_feature: Reduced expression when VOC is produced
  misc_feature: Encodes the peptide sequence at SEQ ID NO 26638
atggcccccctcaccatcgcatcgcgtgccctcgcacgcggcgtctctcgccagacctgcgtccacgccgcccgcgcgctgtcgacgtcggcacagctgcaagaagcgtcatactcgagccccttcaaaggcgaatccaagtcgaccaagatcccagacttcggccactacgcgagcaaatctagcaacaacacgaacctgctcttccagtacttcatggtcggcaccatgggcgccatcaccgctgccggcgccaagtcgaccgtccaagagttcttgaagaacatgtccgcatcggccgatgtcctggccatggccaaggtcgaggtcgacctcaacgccatccccgagggcaagaacgtcatcatcaaatggagaggaaagcccgtcttcatccgccacagaaccgccgaggagattgacgaggccaacaaggtcaacgtcacctccttacgagatccccaggaggacgaggaccgtgtccagaagcccgagtggctggtcatgttgggtgtctgcacacatctgggttgtgtccccatcggcgaggccggcgagttcggtggatggttctgcccctgccacggttcccactacgacatctccggccgtataaggaagggccctgctcccctcaacctcgaaatccccgcatacgagttccctgaggaagacaagctggtcattggttaa

SEQ ID NO: 26638 - protein, 230 aa, Muscodor strobelii
  misc_feature: SGI Peptide ID NO. 569113
  misc_feature (130)..(222): Pfam Id: PF00355 Pfam Desc: Rieske [2Fe-2S] domain
  misc_feature (49)..(101): Pfam Id: PF02921 Pfam Desc: Ubiquinol cytochrome reductase transmembrane region
  misc_feature (71)..(101): Pfam Id: PF02921 Pfam Desc: Ubiquinol cytochrome reductase transmembrane region
  misc_feature (1)..(230): NCBI GI: 171691146 Blast Desc: protein product [Podospora anserina] gi|170945521|emb|CAP71633.1| protein product [Podospora anserina]
  misc_feature (1)..(230): NCBI GI: 39940294 Blast Desc: cytochrome c reductase iron-sulfur subunit [Magnaporthe grisea 70-15] gi|145010653|gb|EDJ95309.1| cytochrome c reductase iron-sulfur subunit [Magnaporthe grisea 70-15]
  misc_feature (1)..(230): NCBI GI: 85107305 Blast Desc: ubiquinol-cytochrome c reductase iron-sulfur subunit, mitochondrial [Neurospora crassa OR74A] gi|136704|sp|P07056.1|UCRI_NEUCR RecName: Full=Cytochrome b-c1 c
  misc_feature (1)..(230): NCBI GI: 261352649 Blast Desc: cytochrome b-c1 complex subunit Rieske [Verticillium albo-atrum VaMs.102]
  misc_feature (1)..(230): NCBI GI: 46121745 Blast Desc: FG05251.1 [Gibberella zeae PH-1]
  misc_feature (1)..(230): NCBI GI: 156049877 Blast Desc: conserved [Sclerotinia sclerotiorum 1980] gi|154693044|gb|EDN92782.1| conserved [Sclerotinia sclerotiorum 1980]
  misc_feature (1)..(230): NCBI GI: 154309173 Blast Desc: ubiquinol-cytochrome c reductase iron-sulphur subunit [Botryotinia fuckeliana B05.10] gi|150852524|gb|EDN27716.1| ubiquinol-cytochrome c reductase iron-sulphur subunit fuckeliana
  misc_feature (1)..(230): NCBI GI: 256726834 Blast Desc: [Nectria haematococca mpVI 77-13-4]
  misc_feature (1)..(230): NCBI GI: 189194245 Blast Desc: cytochrome b-c1 complex subunit Rieske, mitochondrial precursor [Pyrenophora tritici-repentis Pt-1C-BFP] gi|187979025|gb|EDU45651.1| cytochrome b-c1 complex subunit
  misc_feature (1)..(230): NCBI GI: 169611458 Blast Desc: SNOG_08842 [Phaeosphaeria nodorum SN15] gi|111062890|gb|EAT84010.1| SNOG_08842 [Phaeosphaeria nodorum SN15]
  misc_feature (1)..(230): SWISSPROT Homolog: EC 1.10.2.2 Ubiquinol--cytochrome-c reductase
  misc_feature: Useful for introducing or modulating the production of volatile compounds
MAPLTIASRALARGVSRQTCVHAARALSTSAQLQEASYSSPFKGESKSTKIPDFGHYASKSSNNTNLLFQYFMVGTMGAITAAGAKSTVQEFLKNMSASADVLAMAKVEVDLNAIPEGKNVIIKWRGKPVFIRHRTAEEIDEANKVNVTSLRDPQEDEDRVQKPEWLVMLGVCTHLGCVPIGEAGEFGGWFCPCHGSHYDISGRIRKGPAPLNLEIPAYEFPEEDKLVIG

SEQ ID NO: 26639 - DNA, 1146 bp, Muscodor strobelii
  misc_feature: SGI EST ID NO. CUFF.62894.0
  misc_feature: Variant of the nucleotide sequence at SEQ ID NO 26637
tgttgctcactgggaaagtcagccaggtattttgctgcagccgaaaaaagacctcaagctcacgacctgacgacatcgctttcgacgaccaattgactacccacacccatcgccatggcccccctcaccatcgcatcgcgtgccctcgcacgcggcgtctctcgccagacctgcgtccacgccgcccgcgcgctgtcgacgtcggcacagctgcaagaagcgtcatactcgagccccttcaaaggcgaatccaagtcgaccaagatcccagacttcggccactacgcgagcaaatctagcaacaacacgaacctgctcttccagtacttcatggtcggcaccatgggcgccatcaccgctgccggcgccaagtcgaccgtccaagagttcttgaagaacatgtccgcatcggccgatgtcctggccatggccaaggtcgaggtcgacctcaacgccatccccgagggcaagaacgtcatcatcaaatggagaggaaagcccgtcttcatccgccacagaaccgccgaggagattgacgaggccaacaaggtcaacgtcacctccttacgagatccccaggaggacgaggaccgtgtccagaagcccgagtggctggtcatgttgggtgtctgcacacatctgggttgtgtccccatcggcgaggccggcgagttcggtggatggttctgcccctgccacggttcccactacgacatctccggccgtataaggaagggccctgctcccctcaacctcgaaatccccgcatacgagttccctgaggaagacaagctggtcattggttaaagcacgcgctgtacgaatacgaaactggaggggcgaggctgccgggttagacatggcgcgatcatcgaggtttacaacgcattctctagactttttcttcccttggcatcggccaatgtgtacaaaacagacatgtcaagtgaacaaatatcattacacctaatccggccctggcaacgcgaattgtggctctcgtctgtgtgtatgtgttttccaggctttcggcagacgatcaaaacgtctaccaagaaatgagagcgtatatgatgacctatatacgagaatagtacctcattgagtgacggatctcgcgaaactgcgttgtctatcatatccagc

SEQ ID NO: 26640 - DNA, 3450 bp, Muscodor strobelii
  misc_feature: SGI cDNA ID NO. 569114
  misc_feature: Encodes the peptide sequence at SEQ ID NO 26641
atggcttatatagcacctatacaccggccaaacagtgtgaggcacgcagtccgtctcaacttaattcccgacgaggccgagtgtttagtcgttgccaaagccaaccgtttagaaatatggaatttacaagatacgggtgccttggtccagaaaagtacacatcatgtcaatggcacaatctctatgctgcagcgattgcaaccgcgtgatgccgagaccgatctgctcttcgtcggaacagataggtttcaatacttcactttcggttgggatgccgataaacaccgattagatactgtcgaaatgtttttcgacaagaatgaaaagtacatgcgtgacagccaaagtcaagacaagtgtatcgtcgactcgacagggcgtttcatggtcgcgctgttgtgggagggtgtcattaatgtcattcgtatgcagactttgaaaaaaaagaggcagtacttggaatggatggaccaggtccgaatatccgaactattcatcaagagcgcgacatttcttcatgtcgaaacaggtcatcccaagatcgcactacttcaccagccacggacaaccgataatttcgactgttacctcgtgacatatcgattgacggccgatgacagaaataccgaagtctcgaggttcgagcctaaagatcaaatcgaccgcatagagattgaggacacggggtccaacatgctaatacccgtcgccaagggcgaggaggatcagaaacgatatttaagtcgaaacgctacatcggcacgcgcccaactaggcggagtgattgttgtgggcgagagcagactgctctactacgatgatgctgccaagaagacggtcgaggcggcacttacagaaccatcaatattcgtcgcctgggtagagtatgatgtgtcacattacttgatcggtgatgattacgggcgtttatggctattagagattatccttgacggtgtcatcgtcgaagatctgtcaatggaggtgatcggaatgatttcacgtccgaattgtctcgtctacatgggtgataacatcctatttgtcggatcgcattatggcgactcgcaagtatttcacattgatcttgctcagcgctcgatacaactcttacaaacactacataatattgcgcctatcctggatctcacaatcatggacatgggaaatcgggaaggggaggaacagacctcaaacgagtattcgtcgggccaagcaagaattgtgactggtagtggtgtccataaagacggcagtttacgaagcgtgcgtagcggcgttggactggatgatatcggtattctgggggacatggagaatgttcgctcagtgttccccatccaatcttacggtgcaacaaagacggatatcctcattgtctcttttttaaccgagacaagaatttttatattcaatccgacaggcgaaatcgaagaagttgacaacttcaaaggaatgatactcacggagccaactcttctcatcaaaaatgcatcagatggtcgtctactccaggttacacctagaagtgtgctcttgattgacctggagagtggagttgccgtatcaacctggagcccagccgcaggagaggtcaccagtgtatctgcgaacgaggaatggattcttctctcagtcgatggcactgttcttttgtcattgaaaatcgaccaagatctcattaagatggagcaaaacgatctcgagggcaaggatcagattgcgtgtattcacttaccgcctcagtatcccaacattgctgttgtggggttttggaggtcaggggcggtctcaatcctcgatattgcgactttacaatccctacaaggtgtcaatctacgacggagagacgacaatgcttccataccacgcgaaattgcacttgcccaggttttaccaccagagtctgctggccctacattattcgttgcaatggaagacgggttcgtgaatacttttgaggtctccaaagacgatttctctctttcaaagcgaaagatggtcgttctaggaacgcgacattcgagacttcagctgcttccgcgtcctaacggtctttataacgtattcacgacaagtgaaatcccaaatctgatatacggttccgagggcagaatcgtctactcagcagtgacggcagaagacgctacatgtgtttgctggttcgacacagaggctttccctgagtctttagtagtggcaacagagaaggaggtgaagatcgcaaagatagatacagagcgtcggacacacgtcaatcctctaccgatgggcgaaactgtccgacgtattgcctactcacgatcagagcgggctttcgggctaggctgtttctcaagagaagtcaaagacaacgaagaaataatcctgagctcttttaagcttgtcgacgaggttgttttcaagccgctcggaaaccccttcatccttgacagctcacccagagtcgagcttatcgaggctgttattcgggcacaactgccagattcgtacgggaatgtggatgaaagattcatcgtcggcacgtcctataacgaggacccccagatagtgacggcacatagtgataaacggggtcggatcttggtacttggtatcgacagcgagagacaaccttacttggtgacaagtcgattactgaaaggggcttgcaggtctcttgccgtgatgggcgacaaaatcgtcgccggattgaccaagacggtgatcgtctactcttacgacgagacgtctaccacttctgccgagttaaagctgctggcatcgtatcggcccgctagtttcccggtggatctggttgtcgagggaaacataatagccgtagccgatctcatgaaatcaatgacgctagtcgaattcacgccggcaagcgagggccgacctcccaagctatcagaaatcgcaagacattaccagtcaatctgggctacggctatatgtcacatagaggcggacacatggctagaggccgacgcggcaggcaaccttgtagtgctgcggaagaacgccagtggagtcacattggaagataaaagaaggatggaggtgacgagcgaattcaatctcggagagatggtcaaccgcatgcgcaagatcacggtcgaagcaagcccgaatgccattcttgtaccgaaggcatttgttggcacgatcgaagggggtgtctatctatttggaatgattgcaccagaccaaacggatctgttgatacggttccagaccaagctgttcgatgagatcgagactaccggcaacatcgagttctcgatgtatcgatcgttccggaatgaagaacgagagtcggacggcccattccgctttgttgatggggaactgctcgagcgtttcctggacctcgacgaagatgtccaggatcgggtctgtgagggtctagggccgaacgctgaggagatgcggaacttagttgaagagttgaaacggatgcattga

SEQ ID NO: 26641 - protein, 1149 aa, Muscodor strobelii
  misc_feature: SGI Peptide ID NO. 569114
  misc_feature (787)..(1087): Pfam Id: PF03178 Pfam Desc: CPSF A subunit region
  misc_feature (836)..(1087): Pfam Id: PF03178 Pfam Desc: CPSF A subunit region
  misc_feature (1)..(1149): NCBI GI: 85107301 Blast Desc: NCU06605 [Neurospora crassa OR74A] gi|28923951|gb|EAA33111.1| conserved [Neurospora crassa OR74A]
  misc_feature (1)..(1149): NCBI GI: 171691144 Blast Desc: protein product [Podospora anserina] gi|170945520|emb|CAP71632.1| protein product [Podospora anserina]
  misc_feature (56)..(1149): NCBI GI: 116195210 Blast Desc: CHGG_04203 [Chaetomium globosum CBS 148.51] gi|88180116|gb|EAQ87584.1| CHGG_04203 [Chaetomium globosum CBS 148.51]
  misc_feature (1)..(1149): NCBI GI: 256726833 Blast Desc: [Nectria haematococca mpVI 77-13-4]
  misc_feature (1)..(1149): NCBI GI: 46121747 Blast Desc: FG05252.1 [Gibberella zeae PH-1]
  misc_feature (1)..(1148): NCBI GI: 156049323 Blast Desc: SS1G_08368 [Sclerotinia sclerotiorum 1980] gi|154692767|gb|EDN92505.1| SS1G_08368 [Sclerotinia sclerotiorum 1980]
  misc_feature (1)..(1149): NCBI GI: 145602217 Blast Desc: MGG_12941 [Magnaporthe grisea 70-15] gi|145010652|gb|EDJ95308.1| MGG_12941 [Magnaporthe grisea 70-15]
  misc_feature (1)..(1149): NCBI GI: 261352648 Blast Desc: DNA damage-binding protein 1b [Verticillium albo-atrum VaMs.102]
  misc_feature (1)..(1149): NCBI GI: 189205943 Blast Desc: DNA damage-binding protein 1 [Pyrenophora tritici-repentis Pt-1C-BFP] gi|187975399|gb|EDU42025.1| DNA damage-binding protein 1 [Pyrenophora tritici-repentis Pt-1C-BFP]
  misc_feature (32)..(1149): NCBI GI: 169611218 Blast Desc: SNOG_08717 [Phaeosphaeria nodorum SN15] gi|160702249|gb|EAT83885.2| SNOG_08717 [Phaeosphaeria nodorum SN15]
MAYIAPIHRPNSVRHAVRLNLIPDEAECLVVAKANRLEIWNLQDTGALVQKSTHHVNGTISMLQRLQPRDAETDLLFVGTDRFQYFTFGWDADKHRLDTVEMFFDKNEKYMRDSQSQDKCIVDSTGRFMVALLWEGVINVIRMQTLKKKRQYLEWMDQVRISELFIKSATFLHVETGHPKIALLHQPRTTDNFDCYLVTYRLTADDRNTEVSRFEPKDQIDRIEIEDTGSNMLIPVAKGEEDQKRYLSRNATSARAQLGGVIVVGESRLLYYDDAAKKTVEAALTEPSIFVAWVEYDVSHYLIGDDYGRLWLLEIILDGVIVEDLSMEVIGMISRPNCLVYMGDNILFVGSHYGDSQVFHIDLAQRSIQLLQTLHNIAPILDLTIMDMGNREGEEQTSNEYSSGQARIVTGSGVHKDGSLRSVRSGVGLDDIGILGDMENVRSVFPIQSYGATKTDILIVSFLTETRIFIFNPTGEIEEVDNFKGMILTEPTLLIKNASDGRLLQVTPRSVLLIDLESGVAVSTWSPAAGEVTSVSANEEWILLSVDGTVLLSLKIDQDLIKMEQNDLEGKDQIACIHLPPQYPNIAVVGFWRSGAVSILDIATLQSLQGVNLRRRDDNASIPREIALAQVLPPESAGPTLFVAMEDGFVNTFEVSKDDFSLSKRKMVVLGTRHSRLQLLPRPNGLYNVFTTSEIPNLIYGSEGRIVYSAVTAEDATCVCWFDTEAFPESLVVATEKEVKIAKIDTERRTHVNPLPMGETVRRIAYSRSERAFGLGCFSREVKDNEEIILSSFKLVDEVVFKPLGNPFILDSSPRVELIEAVIRAQLPDSYGNVDERFIVGTSYNEDPQIVTAHSDKRGRILVLGIDSERQPYLVTSRLLKGACRSLAVMGDKIVAGLTKTVIVYSYDETSTTSAELKLLASYRPASFPVDLVVEGNIIAVADLMKSMTLVEFTPASEGRPPKLSEIARHYQSIWATAICHIEADTWLEADAAGNLVVLRKNASGVTLEDKRRMEVTSEFNLGEMVNRMRKITVEASPNAILVPKAFVGTIEGGVYLFGMIAPDQTDLLIRFQTKLFDEIETTGNIEFSMYRSFRNEERESDGPFRFVDGELLERFLDLDEDVQDRVCEGLGPNAEEMRNLVEELKRMH

SEQ ID NO: 26642 - DNA, 3789 bp, Muscodor strobelii
  misc_feature: SGI EST ID NO. CUFF.62897.0
  misc_feature: Variant of the nucleotide sequence at SEQ ID NO 26640
ggaaattcgccattactatttgcctcgtgttcagcctgttcaggccactttttagtccctttttctctctctacacatatgccatgaaatctcttacagtatggcttatatagcacctatacaccggccaaacagtgtgaggcacgcagtccgtctcaacttaattcccgacgaggccgagtgtttagtcgttgccaaagccaaccgtttagaaatatggaatttacaagatacgggtgccttggtccagaaaagtacacatcatgtcaatggcacaatctctatgctgcagcgattgcaaccgcgtgatgccgagaccgatctgctcttcgtcggaacagataggtttcaatacttcactttcggttgggatgccgataaacaccgattagatactgtcgaaatgtttttcgacaagaatgaaaagtacatgcgtgacagccaaagtcaagacaagtgtatcgtcgactcgacagggcgtttcatggtcgcgctgttgtgggagggtgtcattaatgtcattcgtatgcagactttgaaaaaaaagaggcagtacttggaatggatggaccaggtccgaatatccgaactattcatcaagagcgcgacatttcttcatgtcgaaacaggtcatcccaagatcgcactacttcaccagccacggacaaccgataatttcgactgttacctcgtgacatatcgattgacggccgatgacagaaataccgaagtctcgaggttcgagcctaaagatcaaatcgaccgcatagagattgaggacacggggtccaacatgctaatacccgtcgccaagggcgaggaggatcagaaacgatatttaagtcgaaacgctacatcggcacgcgcccaactaggcggagtgattgttgtgggcgagagcagactgctctactacgatgatgctgccaagaagacggtcgaggcggcacttacagaaccatcaatattcgtcgcctgggtagagtatgatgtgtcacattacttgatcggtgatgattacgggcgtttatggctattagagattatccttgacggtgtcatcgtcgaagatctgtcaatggaggtgatcggaatgatttcacgtccgaattgtctcgtctacatgggtgataacatcctatttgtcggatcgcattatggcgactcgcaagtatttcacattgatcttgctcagcgctcgatacaactcttacaaacactacataatattgcgcctatcctggatctcacaatcatggacatgggaaatcgggaaggggaggaacagacctcaaacgagtattcgtcgggccaagcaagaattgtgactggtagtggtgtccataaagacggcagtttacgaagcgtgcgtagcggcgttggactggatgatatcggtattctgggggacatggagaatgttcgctcagtgttccccatccaatcttacggtgcaacaaagacggatatcctcattgtctcttttttaaccgagacaagaatttttatattcaatccgacaggcgaaatcgaagaagttgacaacttcaaaggaatgatactcacggagccaactcttctcatcaaaaatgcatcagatggtcgtctactccaggttacacctagaagtgtgctcttgattgacctggagagtggagttgccgtatcaacctggagcccagccgcaggagaggtcaccagtgtatctgcgaacgaggaatggattcttctctcagtcgatggcactgttcttttgtcattgaaaatcgaccaagatctcattaagatggagcaaaacgatctcgagggcaaggatcagattgcgtgtattcacttaccgcctcagtatcccaacattgctgttgtggggttttggaggtcaggggcggtctcaatcctcgatattgcgactttacaatccctacaaggtgtcaatctacgacggagagacgacaatgcttccataccacgcgaaattgcacttgcccaggttttaccaccagagtctgctggccctacattattcgttgcaatggaagacgggttcgtgaatacttttgaggtctccaaagacgatttctctctttcaaagcgaaagatggtcgttctaggaacgcgacattcgagacttcagctgcttccgcgtcctaacggtctttataacgtattcacgacaagtgaaatcccaaatctgatatacggttccgagggcagaatcgtctactcagcagtgacggcagaagacgctacatgtgtttgctggttcgacacagaggctttccctgagtctttagtagtggcaacagagaaggaggtgaagatcgcaaagatagatacagagcgtcggacacacgtcaatcctctaccgatgggcgaaactgtccgacgtattgcctactcacgatcagagcgggctttcgggctaggctgtttctcaagagaagtcaaagacaacgaagaaataatcctgagctcttttaagcttgtcgacgaggttgttttcaagccgctcggaaaccccttcatccttgacagctcacccagagtcgagcttatcgaggctgttattcgggcacaactgccagattcgtacgggaatgtggatgaaagattcatcgtcggcacgtcctataacgaggacccccagatagtgacggcacatagtgataaacggggtcggatcttggtacttggtatcgacagcgagagacaaccttacttggtgacaagtcgattactgaaaggggcttgcaggtctcttgccgtgatgggcgacaaaatcgtcgccggattgaccaagacggtgatcgtctactcttacgacgagacgtctaccacttctgccgagttaaagctgctggcatcgtatcggcccgctagtttcccggtggatctggttgtcgagggaaacataatagccgtagccgatctcatgaaatcaatgacgctagtcgaattcacgccggcaagcgagggccgacctcccaagctatcagaaatcgcaagacattaccagtcaatctgggctacggctatatgtcacatagaggcggacacatggctagaggccgacgcggcaggcaaccttgtagtgctgcggaagaacgccagtggagtcacattggaagataaaagaaggatggaggtgacgagcgaattcaatctcggagagatggtcaaccgcatgcgcaagatcacggtcgaagcaagcccgaatgccattcttgtaccgaaggcatttgttggcacgatcgaagggggtgtctatctatttggaatgattgcaccagaccaaacggatctgttgatacggttccagaccaagctgttcgatgagatcgagactaccggcaacatcgagttctcgatgtatcgatcgttccggaatgaagaacgagagtcggacggcccattccgctttgttgatggggaactgctcgagcgtttcctggacctcgacgaagatgtccaggatcgggtctgtgagggtctagggccgaacgctgaggagatgcggaacttagttgaagagttgaaacggatgcattgatgaatgtgatataacctagacaattgtcaatggcatagtgtatagtacatccttgccaagttgccaaacactgtacacacgaacttcatgtagagtgcgttcatcacatgtagacgtccagtttataagactaagatagtcaaaacttgtgggcgactcgtacatattataggatgaacgccagacatccacaagatggaaatgagcctatgagatggagtcaaccgtatcgaaattaa

SEQ ID NO: 26643 - DNA, 978 bp, Muscodor strobelii
  misc_feature: SGI cDNA ID NO. 569115
  misc_feature: Elevated expression when VOC is produced
  misc_feature: Encodes the peptide sequence at SEQ ID NO 26644
atggctttccaactggcctcgatcccagcgccagcccgcaacaacccgcaaatttcatccgagaagagctcagatttcatcgaagaagaagacgagcaagacacatggacggatctacaaatcgcctccaaagacggcgatctcacccgcgtctcacagctcctcacccgaggtgacgacgtcaatgccccagctaagggctattatggcaacacagcactgcaagcagcttgcttattcggcaacgaggacgtcgtccggaagctcattgagcatggtgctgatgtcaatggtgcatctggggggaataacgggagtctgaatgctcttagccaagcgtgcgttaagggtaatctgactattgtcgaatttttggtggagtcaggggctgagataaatgcaccggcgaaaagataccatggtcgcaccgcgttacagactgctgccgaggcgggacagattgatactgtgagatatctgctcgatgccggagccgaagtaaatgcaccgatcgcgggaacgggtggcctgaccgcattggccgccgcagcttctggagaaccggaatcagagggacatagggaaatcgtaaagctgctgttggaaaagggagcaaatgtcgacgcgccaccatcaaaaagcaagggtctaaccgccctccaagccgcatcactcaacggcaatctcgagatcgtaaatatcctaatctcagcaggcgccgatgtcaacgcaccaggaagttcattcaaaggcggcacagctttacacgcagccaccgaaaaggggcacatcgagattgcacgacgacttctcgaagtcggcgcaaacgtcgaggcacagtcaggatggggcaaacaaacaccattacaaagcgctgccgtatgtggacaagaggagatcgcgcgattattgatagccaagctgaaagagttacctgatccttcatatgttacctctggaggacagattctgttctag

SEQ ID NO: 26644 - protein, 325 aa, Muscodor strobelii
  misc_feature: SGI Peptide ID NO. 569115
  misc_feature (215)..(247): Pfam Id: PF00023 Pfam Desc: Ankyrin repeat
  misc_feature (140)..(172): Pfam Id: PF00023 Pfam Desc: Ankyrin repeat
  misc_feature (69)..(101): Pfam Id: PF00023 Pfam Desc: Ankyrin repeat
  misc_feature (250)..(282): Pfam Id: PF00023 Pfam Desc: Ankyrin repeat
  misc_feature (175)..(212): Pfam Id: PF00023 Pfam Desc: Ankyrin repeat
  misc_feature (69)..(97): Pfam Id: PF00023 Pfam Desc: Ankyrin repeat
  misc_feature (29)..(304): NCBI GI: 242772263 Blast Desc: ankyrin repeat-containing protein, [Talaromyces stipitatus ATCC 10500] gi|218721624|gb|EED21042.1| ankyrin repeat-containing protein, [Talaromyces stipitatus ATCC 10500]
  misc_feature (11)..(304): NCBI GI: 212531205 Blast Desc: ankyrin repeat-containing protein, [Penicillium marneffei ATCC 18224] gi|210071123|gb|EEA25212.1| ankyrin repeat-containing protein, [Penicillium marneffei ATCC 18224]
  misc_feature (16)..(304): NCBI GI: 145236769 Blast Desc: An06g02110 [Aspergillus niger] gi|134075493|emb|CAK48054.1| protein product [Aspergillus niger]
  misc_feature (37)..(307): NCBI GI: 169617347 Blast Desc: SNOG_11851 [Phaeosphaeria nodorum SN15] gi|111059775|gb|EAT80895.1| SNOG_11851 [Phaeosphaeria nodorum SN15]
  misc_feature (37)..(307): NCBI GI: 242827177 Blast Desc: multiple ankyrin repeats single kh domain protein, [Talaromyces stipitatus ATCC 10500] gi|218712034|gb|EED11462.1| multiple ankyrin repeats single kh domain protein, [Talaromyces
  misc_feature (39)..(307): NCBI GI: 116203745 Blast Desc: CHGG_09756 [Chaetomium globosum CBS 148.51] gi|88175884|gb|EAQ83352.1| CHGG_09756 [Chaetomium globosum CBS 148.51]
  misc_feature (37)..(307): NCBI GI: 242760147 Blast Desc: Pfs, NACHT and Ankyrin domain protein [Talaromyces stipitatus ATCC 10500] gi|218723125|gb|EED22542.1| Pfs, NACHT and Ankyrin domain protein [Talaromyces stipitatus ATCC 10500]
  misc_feature (39)..(307): NCBI GI: 116203745 Blast Desc: CHGG_09756 [Chaetomium globosum CBS 148.51] gi|88175884|gb|EAQ83352.1| CHGG_09756 [Chaetomium globosum CBS 148.51]
  misc_feature (39)..(304): NCBI GI: 116203745 Blast Desc: CHGG_09756 [Chaetomium globosum CBS 148.51] gi|88175884|gb|EAQ83352.1| CHGG_09756 [Chaetomium globosum CBS 148.51]
  misc_feature (39)..(307): NCBI GI: 242827177 Blast Desc: multiple ankyrin repeats single kh domain protein, [Talaromyces stipitatus ATCC 10500] gi|218712034|gb|EED11462.1| multiple ankyrin repeats single kh domain protein, [Talaromyces
  misc_feature (32)..(271): SWISSPROT Homolog: EC 2.7.11.1 Non-specific serine/threonine protein kinase
  misc_feature: Useful for introducing or modulating the production of volatile compounds
MAFQLASIPAPARNNPQISSEKSSDFIEEEDEQDTWTDLQIASKDGDLTRVSQLLTRGDDVNAPAKGYYGNTALQAACLFGNEDVVRKLIEHGADVNGASGGNNGSLNALSQACVKGNLTIVEFLVESGAEINAPAKRYHGRTALQTAAEAGQIDTVRYLLDAGAEVNAPIAGTGGLTALAAAASGEPESEGHREIVKLLLEKGANVDAPPSKSKGLTALQAASLNGNLEIVNILISAGADVNAPGSSFKGGTALHAATEKGHIEIARRLLEVGANVEAQSGWGKQTPLQSAAVCGQEEIARLLIAKLKELPDPSYVTSGGQILF

SEQ ID NO: 26645 - DNA, 974 bp, Muscodor strobelii
  misc_feature: SGI EST ID NO. CUFF.62902.0
  misc_feature: Variant of the nucleotide sequence at SEQ ID NO 26643
gtcgtttttgtttaatcgaacacacggcaacgccaggaagattctagaacatagcgattctttcctggcccattacgataaagaaaaggagttaatatgttttgctgaaccaggcatctggggggaataacgggagtctgaatgctcttagccaagcgtgcgttaagggtaatctgactattgtcgaatttttggtggagtcaggggctgagataaatgcaccggcgaaaagataccatggtcgcaccgcgttacagactgctgccgaggcgggacagattgatactgtgagatatctgctcgatgccggagccgaagtaaatgcaccgatcgcgggaacgggtggcctgaccgcattggccgccgcagcttctggagaaccggaatcagagggacatagggaaatcgtaaagctgctgttggaaaagggagcaaatgtcgacgcgccaccatcaaaaagcaagggtctaaccgccctccaagccgcatcactcaacggcaatctcgagatcgtaaatatcctaatctcagcaggcgccgatgtcaacgcaccaggaagttcattcaaaggcggcacagctttacacgcagccaccgaaaaggggcacatcgagattgcacgacgacttctcgaagtcggcgcaaacgtcgaggcacagtcaggatggggcaaacaaacaccattacaaagcgctgccgtatgtggacaagaggagatcgcgcgattattgatagccaagctgaaagagttacctgatccttcatatgttacctctggaggacagattctgttctaggattagggtttagttgcgactgcgagaattttaacgcactataactgacaatagggcccagtcgtgtgtcaggggcttacaaaagggatgttactacatcgcatgacatcccagcattggctggcatttcagtcctctgaatacctttgagcatatttcaaatacagtacatttatg

SEQ ID NO: 26646 - DNA, 2229 bp, Muscodor strobelii
  misc_feature: SGI cDNA ID NO. 569116
  misc_feature: Encodes the peptide sequence at SEQ ID NO 26647
atggccaggtcccagacggtcatcgatctcactccggatagtccgctcggttctcaggatcccgagattgactgcaagaatgaggtcctcatggtttttcctaacatctgcccggactatctcgtacagatcacggctgaacatgtttacgacgcaactgcgactatatctgccattctagataaacaagataaaggcgaacactacccgaaggctcagcgtgattcaagatttcctttaaagcggaagcgtcgggttgcgagtgacggctcgggaagcggcctcgatgtggttgacgatgacggagatgatgaagacccaaatagcggcgaggacgatccggcttgcgttcgaagtatcagggctcaaattgacagtcctctttacgccacaaatactagctcgtcaaaatatcgtgatatggcccgacttctaatctcgcaagactttccgcgagcgccagtccaagcaatacgcaactttttattggcaaaccgaggatccttgttcgacacctatacgttgatggatgataaatcacgtaactggactgaagaaaacgcgccttggaaagggaagaaaattccaacaaaaaagagggcggaatttgccccggaggcatttgccaacatcgatttgagccagtacaaccacgaagagaatgctgcactaacggaattcaaggccgcgagagaattccgtgccatcaaagaagcgaaaatacgcgcaatagccgaggaacaagtcaaatttcttcaggcgaaacaagacggacagaccatcgagtgcggtatttgctttgatgaattcgtattggcgcaaatggtcagctgccagagtgaaaacatgcactggttttgccgaagctgcctcagaactcaagcagagacacagataggcatgggcaagtacgagctgacctgcatgtcgatggatggatgctcagccgagttttcgcgcgaccagaagaatcttttcctagacaggaaattgaggacagcattagatcgcatagaacaagaggctatgctccggatggccggcattgaaaatctcgagacgtgtcctttttgcccttatgccgccgagtatcctcccgtggaggttgacaaagagtttcgctgcgataatcccgattgtcagcaaattagttgtcgtttatgtcggagagagacacatattcccaagtcttgcgctgaggcggatgaggaccgcggacttgacgcccggcatcgcctagaagaggctatgtctgacgcactcatcagaagatgcaaccagtgtcaaagcccatttgtgaaggacgaaggttgcaacaagatgaggtgcagcaagtgcggcacaatgatgtgcgacgtctgccgacagacaatcaaggattacacccacttcaatgatgtttcaagaggaggcaagaccggccgatgtcctctatatgatcagtctgaaacgcgatatgaagaagaagtgcgcaaagctgaagagtcaactcggaagaaagtgaaagaagacaatcctgaagtggacgataccaagctacatatcaagttttctcaaaagatccttcaagatgacgaagagagaaaagtaagatctggttttcctcgacctaatgtgccaagacgcaataatcttgcagtccgcgtcggaaacttcagacgagagattattagggcacgacgagacatggaaatacgagcattgggtttgcctgctcttcagcctccgcctgctgtacccccagttccagctccaatgctccctcatcagcccgcaccgggactcaacgcattgccagcaccgaatttaccttataatctaggtgacttcccaatcagacctcccggtcgaccccccggcccaggaaatgtaccagatgcctatgaagaagatgccaaaggcatggactatacaatgcccctccacaaaaaccaacttggctttgaagcagatgatctccatcgccaactcatggggcatcaacctcaagggggacaaaatctgattatgccccctgctttgcaatatcctgccgacatttggaatcagctacctcagggagctgcccaagacgttgcgctagacaatgcatatttgtacggctatgctggagagcaagacaatggtctcccacttggtccacagcagaatttgcccgttaatgaacaagaccgccaacagaatcagaaccataatttcggctatgtcgatttccctgattggttctga

SEQ ID NO: 26647 - protein, 742 aa, Muscodor strobelii
  misc_feature: SGI Peptide ID NO. 569116
  misc_feature (25)..(549): NCBI GI: 116195142 Blast Desc: CHGG_04169 [Chaetomium globosum CBS 148.51] gi|88180082|gb|EAQ87550.1| CHGG_04169 [Chaetomium globosum CBS 148.51]
  misc_feature (220)..(590): NCBI GI: 171691032 Blast Desc: protein product [Podospora anserina] gi|170945464|emb|CAP71576.1| protein product [Podospora anserina]
  misc_feature (193)..(530): NCBI GI: 156032754 Blast Desc: SS1G_13782 [Sclerotinia sclerotiorum 1980] gi|154699185|gb|EDN98923.1| SS1G_13782 [Sclerotinia sclerotiorum 1980]
  misc_feature (18)..(568): NCBI GI: 46121785 Blast Desc: FG05270.1 [Gibberella zeae PH-1]
  misc_feature (242)..(539): NCBI GI: 145613377 Blast Desc: MGG_11164 [Magnaporthe grisea 70-15] gi|145020460|gb|EDK04589.1| MGG_11164 [Magnaporthe grisea 70-15]
  misc_feature (8)..(532): NCBI GI: 169607687 Blast Desc: SNOG_06902 [Phaeosphaeria nodorum SN15] gi|160701469|gb|EAT85553.2| SNOG_06902 [Phaeosphaeria nodorum SN15]
  misc_feature (29)..(431): NCBI GI: 164425002 Blast Desc: NCU06584 [Neurospora crassa OR74A] gi|157070748|gb|EAA32708.2| [Neurospora crassa OR74A]
  misc_feature (28)..(673): NCBI GI: 119482047 Blast Desc: RING finger protein, [Neosartorya fischeri NRRL 181] gi|119409206|gb|EAW19155.1| RING finger protein, [Neosartorya fischeri NRRL 181]
  misc_feature (12)..(607): NCBI GI: 67523413 Blast Desc: AN2162.2 [Aspergillus nidulans FGSC A4] gi|40745050|gb|EAA64206.1| AN2162.2 [Aspergillus nidulans FGSC A4] gi|259487541|tpe|CBF86296.1| TPA: RING finger protein, FGSC
  misc_feature (29)..(524): NCBI GI: 119191858 Blast Desc: CIMG_00306 [Coccidioides immitis RS]
MARSQTVIDLTPDSPLGSQDPEIDCKNEVLMVFPNICPDYLVQITAEHVYDATATISAILDKQDKGEHYPKAQRDSRFPLKRKRRVASDGSGSGLDVVDDDGDDEDPNSGEDDPACVRSIRAQIDSPLYATNTSSSKYRDMARLLISQDFPRAPVQAIRNFLLANRGSLFDTYTLMDDKSRNWTEENAPWKGKKIPTKKRAEFAPEAFANIDLSQYNHEENAALTEFKAAREFRAIKEAKIRAIAEEQVKFLQAKQDGQTIECGICFDEFVLAQMVSCQSENMHWFCRSCLRTQAETQIGMGKYELTCMSMDGCSAEFSRDQKNLFLDRKLRTALDRIEQEAMLRMAGIENLETCPFCPYAAEYPPVEVDKEFRCDNPDCQQISCRLCRRETHIPKSCAEADEDRGLDARHRLEEAMSDALIRRCNQCQSPFVKDEGCNKMRCSKCGTMMCDVCRQTIKDYTHFNDVSRGGKTGRCPLYDQSETRYEEEVRKAEESTRKKVKEDNPEVDDTKLHIKFSQKILQDDEERKVRSGFPRPNVPRRNNLAVRVGNFRREIIRARRDMEIRALGLPALQPPPAVPPVPAPMLPHQPAPGLNALPAPNLPYNLGDFPIRPPGRPPGPGNVPDAYEEDAKGMDYTMPLHKNQLGFEADDLHRQLMGHQPQGGQNLIMPPALQYPADIWNQLPQGAAQDVALDNAYLYGYAGEQDNGLPLGPQQNLPVNEQDRQQNQNHNFGYVDFPDWF

SEQ ID NO: 26648 - DNA, 2058 bp, Muscodor strobelii
  misc_feature: SGI EST ID NO. CUFF.62908.0
  misc_feature: Variant of the nucleotide sequence at SEQ ID NO 26646
agggaagaaaattccaacaaaaaagagggcggaatttgccccggaggcatttgccaacatcgatttgagccagtacaaccacgaagagaatgctgcactaacggaattcaaggccgcgagagaattccgtgccatcaaagaagcgaaaatacgcgcaatagccgaggaacaagtcaaatttcttcaggcgaaacaagacggacagaccatcgagtgcggtatttgctttgatgaattcgtattggcgcaaatggtcagctgccagagtgaaaacatgcactggttttgccgaagctgcctcagaactcaagcagagacacagataggcatgggcaagtacgagctgacctgcatgtcgatggatggatgctcagccgagttttcgcgcgaccagaagaatcttttcctagacaggaaattgaggacagcattagatcgcatagaacaagaggctatgctccggatggccggcattgaaaatctcgagacgtgtcctttttgcccttatgccgccgagtatcctcccgtggaggttgacaaagagtttcgctgcgataatcccgattgtcagcaaattagttgtcgtttatgtcggagagagacacatattcccaagtcttgcgctgaggcggatgaggaccgcggacttgacgcccggcatcgcctagaagaggctatgtctgacgcactcatcagaagatgcaaccagtgtcaaagcccatttgtgaaggacgaaggttgcaacaagatgaggtgcagcaagtgcggcacaatgatgtgcgacgtctgccgacagacaatcaaggattacacccacttcaatgatgtttcaagaggaggcaagaccggccgatgtcctctatatgatcagtctgaaacgcgatatgaagaagaagtgcgcaaagctgaagagtcaactcggaagaaagtgaaagaagacaatcctgaagtggacgataccaagctacatatcaagttttctcaaaagatccttcaagatgacgaagagagaaaagtaagatctggttttcctcgacctaatgtgccaagacgcaataatcttgcagtccgcgtcggaaacttcagacgagagattattagggcacgacgagacatggaaatacgagcattgggtttgcctgctcttcagcctccgcctgctgtacccccagttccagctccaatgctccctcatcagcccgcaccgggactcaacgcattgccagcaccgaatttaccttataatctaggtgacttcccaatcagacctcccggtcgaccccccggcccaggaaatgtaccagatgcctatgaagaagatgccaaaggcatggactatacaatgcccctccacaaaaaccaacttggctttgaagcagatgatctccatcgccaactcatggggcatcaacctcaagggggacaaaatctgattatgccccctgctttgcaatatcctgccgacatttggaatcagctacctcagggagctgcccaagacgttgcgctagacaatgcatatttgtacggctatgctggagagcaagacaatggtctcccacttggtccacagcagaatttgcccgttaatgaacaagaccgccaacagaatcagaaccataatttcggctatgtcgatttccctgattggttctgaacctgcgcccttccagaattctcgatgtttctaatcaacggctctagcagagctagaagtacaatcagcggacacctcgaggtatgtcaccagtgaaccgtctcagctggtaccaggtaccaaaaacggtgcaccagaggacaagtctcccgtacatttcaccattctgccactgaaatggtccctctgggctcatagtggctatgtgaaccacaatcgcatgaacgcatgcatgggagcctcacgtaatatcttcctccaactttgcctttactctctactaagcatagtgaacggagctggaggtttcgtggagaatatatagaataagcgcatcaatagcaacgctctacatgaaatgcttacaaacgtatagctaaaataggctacctgtactcgtg

SEQ ID NO: 26649 - DNA, 381 bp, Muscodor strobelii
  misc_feature: SGI cDNA ID NO. 569117
  misc_feature: Encodes the peptide sequence at SEQ ID NO 26650
atgtcgacgcaaactgatacaggcgtctctgtgtctcacgccctggacggtgtagcgtacaagcttttggagcttccccctgagctgctcgaggctctcgagtctgatcagcctcctgagctcatcttagagtcctcttcgcccgctgctgttctcaaacacgggtccaagtcttggaatctccgccagaagaacacctctaatgccatcatcttgctcaagcccgtccattccaccacgcccgccgatggccttcctcagaccagcctcgccatcatttctaccctccatgatactatcgaattggtcgctgagtcgaccgcgcaacccgtcaacagcgccaaagggaaatggcacgagaaatttgcacgtgctagatga

SEQ ID NO: 26650 - protein, 126 aa, Muscodor strobelii
  misc_feature: SGI Peptide ID NO. 569117
  misc_feature (1)..(126): NCBI GI: 256726823 Blast Desc: NECHADRAFT_76204 [Nectria haematococca mpVI 77-13-4]
  misc_feature (1)..(119): NCBI GI: 39952107 Blast Desc: [Magnaporthe grisea 70-15] gi|145020461|gb|EDK04590.1| [Magnaporthe grisea 70-15]
  misc_feature (1)..(126): NCBI GI: 261354949 Blast Desc: conserved [Verticillium albo-atrum VaMs.102]
  misc_feature (1)..(126): NCBI GI: 46121787 Blast Desc: FG05271.1 [Gibberella zeae PH-1]
  misc_feature (1)..(126): NCBI GI: 116195140 Blast Desc: [Chaetomium globosum CBS 148.51] gi|88180081|gb|EAQ87549.1| [Chaetomium globosum CBS 148.51]
  misc_feature (56)..(126): NCBI GI: 171691034 Blast Desc: protein product [Podospora anserina] gi|170945465|emb|CAP71577.1| protein product [Podospora anserina]
  misc_feature (4)..(106): NCBI GI: 189205819 Blast Desc: conserved [Pyrenophora tritici-repentis Pt-1C-BFP] gi|187975337|gb|EDU41963.1| conserved [Pyrenophora tritici-repentis Pt-1C-BFP]
  misc_feature (1)..(80): NCBI GI: 67523409 Blast Desc: AN2160.2 [Aspergillus nidulans FGSC A4] gi|40745048|gb|EAA64204.1| AN2160.2 [Aspergillus nidulans FGSC A4] gi|259487539|tpe|CBF86292.1| TPA: sister chromatid cohesion
  misc_feature (1)..(75): NCBI GI: 115388281 Blast Desc: [Aspergillus terreus NIH2624] gi|114195730|gb|EAU37430.1| [Aspergillus terreus NIH2624]
  misc_feature (19)..(74): NCBI GI: 255731398 Blast Desc: conserved [Candida tropicalis MYA-3404] gi|240131632|gb|EER31191.1| conserved [Candida tropicalis MYA-3404]
MSTQTDTGVSVSHALDGVAYKLLELPPELLEALESDQPPELILESSSPAAVLKHGSKSWNLRQKNTSNAIILLKPVHSTTPADGLPQTSLAIISTLHDTIELVAESTAQPVNSAKGKWHEKFARAR

SEQ ID NO: 26651 - DNA, 2705 bp, Muscodor strobelii
  misc_feature: SGI EST ID NO. CUFF.62931.0
  misc_feature: Variant of the nucleotide sequence at SEQ ID NO 26649
ccgtttcgcctagttggagacttgcttgctttagaccaattggctttgattctggcacgccatgacacgcctccagtcgcgttgtctgcttcttttttccacgttttgttcttaaccccaccatgtttccttcccacgtaaaaacctaccccaccatgccgttaaggaaagcactatctactgtcttaaacctgatcccattttgaggtagccgctgcatcatatgaactgcactgtaggtgcaaaagccttatgtcaaattgagaattcgccttcctttcgtctacccggttgaaccacggtttgaaatcatcctagcgcaaaattcagtcccaactcgcggcctagcatgtcgacgcaaactgatacaggcgtctctgtgtctcacgccctggacggtgtagcgtacaagcttttggagcttccccctgagctgctcgaggctctcgagtctgatcagcctcctgagctcatcttagagtcctcttcgcccgctgctgttctcaaacacgggtccaagtcttggaatctccgccagaagaacacctctaatgccatcatcttgctcaagcccgtccattccaccacgcccgccgatggccttcctcagaccagcctcgccatcatttctaccctccatgatactatcgaattggtcgctgagtcgaccgcgcaacccgtcaacagcgccaaagggaaatggcacgagaaatttgcacgtgctagatgaacccaaaaacgacatcgggagaggcagaaagctaaaagcttggaagggtctctagtgatattagctcatctctcaatgctgcaaaccacagctggcagcctttcatcttttcctcgacgcagtcttgtagactcgtcgactttatgggtagcctggtacgctctatgtatatgctcgcatattatgcccgctgcctcgggtgcagacagatgggtcacatccaactcaagctcataatcgtcgttaaagtggaagatgtcttcagtctctctgatgtgagacaagacgttcaagtcgtccctcgctgattcgcttccgagagtgctcgaccgttgatcagtaaatattcaggtgacccctcgggttgattgagcgtcgacaatggatttcaagagtaaacgccgctaagcaaaatcagctttcgattttacgtcataattcaaaaagcacttaccaattctgtacgtaaatgcagatattctggatgacatctttcaaatactgctgcgacaggatcaataaagagatgattatcgagaatcttcgcatatttgagcatctggcttaactccttggccacggtgagcttgcttacaccaggatagccgttaatgtaaataaatggtggcgtgtctgtgtccatcttatttgattcagacacgcgtctagtactgcttttagaatggcatttgattgtcggttttttcttatttcaaaaatagtgtgagcctttggtgttcgacatagaagatatggaggattcgcctaagcttgcgcgaagacaatggtttgttgtaagcaagatggggcagtgtgcgaaagcgataatcacctgcaatagagacctaccgatttatacccttttctcatgctcctgaagaaacctagccagctaaatgactccttcgccgccacaacttgcgtggtaaaaagtcactgtctgctgtttgcaaatgttatttttggcctacatgtattatacgacggtactagacttactgggtggacccctctattcatcatagaattgtacagggtacctcgtttcccacccaaagtatgcgcgttcgtttgtaggtggactatatgtatgtaagatttggtatctaccaggcagatcagtattatagtctcataacccaatacggccttagagcctccagtcatatagtagtgaagagaagtgatatatcacaatgatggtctcgttttcatccaggctgcggacactcatatcgctgcaaacacgaatgacaagggtccgaagtttgtccactgaaggatgtatgtgaataccagatgtaggacagaagtatgggagtctagaatgcaaacagatgtgtcgcccccattggcgccatgtccaaattaaatggacgtgtctactgaccaacgttcgatggagtcaacttagaagaaatatgccttccgactatgtcctgcccaaccgcagcgcaaagtttccgcttgtgatacggccacccgccaatgcacaataaatgctcataggcacagaaggcacagctgtcatagctctgcgcttaccatttcagcttcagcttcagcccattgcctgatcaagtcgcttcgactgtctcccgctttcactctcattctactgcgtcaagtacctaacgtaattgagaaatacttcgtgagcagaccagcgtctgcacgtggagaaccctctgccttttcctgagtttcattatagataggtacattcgcaagtgccatcctgtggtctgcgccttttggcgttcttctcctcggtctccatttcatcacgatacaccttcatctgcagcctggagaggtcgatcacggttgtcctcagcaacccctcgcatgtgtccatgggcactatctcaggctcttggtcacttcattcgttttagacaagaaaacaaacactgtcttggccacaaaaccggctccagtcacaatcaattatgacctttttaagggctggctc

SEQ ID NO: 26652 - DNA, 4578 bp, Muscodor strobelii
  misc_feature: SGI cDNA ID NO. 569118
  misc_feature: Encodes the peptide sequence at SEQ ID NO 26653
atggtccgcatcaccgaagacctggcgctctcgccagaaaacgtcactctctaccaggcgaccgacccgctgctgggccacctgcccgtcctcgtgctgcacggcctctgcactacgcacaactatacgtacaacagctcgcgcgtccagatccacgtctacaccgccgccggcttccagtccttcccgcgcctgaccatctcgcccaactcgcccttctacggcgtcgtcagccacctgccccgcgagttccaaggagacgaggtctatcgcgccatcgccttcggcttgtccaagtacttccacgagctgcccgaccccgtcaaggcccacatcaagcaactgtatcccaccacccgcggccgccgccccggctcttcgcccgccctcttcaccgaccaacatgccgccgacctcgccaaggctatggtccgcgccgacaacaccgccgacgtcatccccaagctgcacgccgccctgcagacccagcacgtcaacaatgtcgacatcgacctcgtcctgccccccggctccatcgtgcccctccagcccgccgacttcgacgacgtgcccgaggacgaggacgacatcttggaccccacgctgcgccaatacggcatgtacacgcccctcgtcaagctcttcggcgagcccatgttcctgcccaccacgcgactgcggcgcgccccgtcaaagcccagcgccctgaaccgatccaagtccttctccaaggaccagaaggtcgagctgaggaagaagatggccgagctggtggagacggaggagcgatatgtggctaaagtcggtgaactggtcagccaggtggccgccgagtaccgccagaaagccaaagagcgccagccggggagcttcagcccgtccgagaaagacgtcgacaggctcttcccgaggtcgtcggatcagatactgcaggtcaacaccgcattcatgcgcgaactgcgcaaagtattggacgagaccgaagagagtgccaagaaggacgcggagtcaggtgtctcatcatcaagagtcggcccatccggcagtctgctggggaagtcgaaagacgcaagtggtgccctgtccatggccaaagtcatgctggagtggtttcccaagttcacggattgctatcaggactacatccgggccagccaaaacttccctcagcttatcacctcgttcgtcaaccaacaatcgacgtttacgcagcgggtggtcgtcacgggcgaacagcatttacgctcgaccgtcatcgagcctgtgcagcgcctgccgcgttacagtttgatgatcgaccagatcgtgagctgtttgccaatcacgcaccccgcgcttcagcctatgttgaaggcacgagatatcatcgccaacatatgttccatggacgatcctatggcggacaacccgcacgtgagcacgcgcctccgcaatatgatcgagagctggcctcccgatctcgatcctcagggtcgcttgatcacggcagctgatttcatcgagattgcggccccgtatgacaataccaacgtggccgagacgcagtcggatgaacgaggtggcttgtttctggtcttctccgactccatcgttctcgtcaagaagatgtatggtgtgaaaatgaccgcacgagatctcctacgtgagatcgacaagccttcgcctgcagggttgctggcttccatgaccaatgccgccggtggacctggttcgtatgatctggcatttgccggctggcacgagctggccaacatccgcttcacagagtcggccgatggtcgcatgacttggatgacgtccgcgaaagaaatgaatggcgcgtatgctagtgacttcgtgtccaacattgccgttacttcgcgatgcttcatgctgctggaatcgtatgaaggcaagtctgccaagtggactgaggatattgttaaggcgcgagtagagaatcgatttgcggaagcggagcgtgaggatccttgttggacattgagatctgtgagaatgccagatacaggattgggactgtttgcggccgtgttccaagagggcattgaccaaattctcgaagggcgcaaagagcccgcccccatccgcattgtcgttgaccatgaaaaaggtactaagggctccccagttggccattacggcgtggagatttgctcggatgtaaaagctggcgatctgaagaaaattgtgatgattaccgtgggtctgcatggaaaaaggactacggatgaggtggccctggacgacttccttcctacacttgctaggagaatcatacactatctcagcacgcagttcaacgttaccaatcccggtcttacatctgcgttggtgaacacgcacaccaagattctccacgaattgcgcgtgacgaacagaacagagaaaacaaggtcgttcttagcaagttcaccagtcaaatatctatctagcttcctcagtagctctagcgttacagaagctacagctcccggcaagttacaacgggcactcacagacagctcaaccctcagcctgggattcttccccggacagatcagccgttcgaatagtagtcgagatgctgcttccctatatgggtcgataaagagtagagacgggcagcgagtcgggccgggagagccggaacccgagaaccccatcatgcaaacggagcagacttttacggggtatataatgaatctgcttgcacttaaaggaagcttcaacgtccgaacgctgatgaacagatctacggtcgacgagacgttgatcaatgacgtctacaacaagcttatgggaagtccttttgatcccttgaactcccctgacttcacagcagacgtcgtattcgcatccttcgaaaaatttgtggccaacggttggcgcaaccaaatgggtcacatcataacaaccaaagctcttgatgcccttcaagaaagagcgtccaaacggttgccgggagactttgcagactttgttcattacttgtttgccgacatggctcctcagaatcgccgcgcgtttagtgcactcgtcaggcttttgaatgagttgcttgatggatgcaatagcgatagcgacaggggctctttaacactagcatttgctgagctccttgtcgacactgacattgcccctcagtatatcaatcttctcgatagacttgtggaagattgtgaccgcattttcgacgaaggaactgccggcttcaacatgagcactggcacgggcggatcagtctacgagtcaatgacctcggcgactcgcagtgggaagtctcacaccggctcggtcacgtcgaatacatcgtccctgagaaagaaatttgggttgggtgattttctcatgcgccaaaacagcaagaccgaaacagaaagtcgctcctcgatttggcgtagcttaagtaagcatggacggaatccgggcacaggggaacctgcaagcctctcacgtggttctatggcaaggacacgatctgtcgacattgtaggcggcaccaacaagttgagacggcctgggtctagggacagaccactggtcgccggcgctttcgatgatacgttcagccgccccacgagctcacagagactagaaacaattggagagcctggggaaaccattgccaaggctcccaggaagaagcgacgtagctcattgtcagatctaaagagtctcatggaagcagcgagacttgatgacgacgacgaaccgctacagccactttcgcatatgaaagagacatcggaaaaattcaactcgacccctcgactaccatctccctcgaaaattcctattagtcccaagacacaccaacaaattactcaacaaatcactgcccctgtcatgcagcagtccgccaaacagaaagagaacataaaggagaacatcgacgaccccttcaggacacccacgacatcgaacgaatccccgaggaagggccacttgaagcttctctccacgtcaaatatcccgaccctcaagccttcccgcacagacccaggcccggacacctctcccacgaggcctacgaccagcccatctaaagcacccggcaaactacgactgcagtcgcctcagaaactccgcgaacgccttcaagtcgaaaagaaagccgtggagcaggtcgacgccaacctccaatcagaactatccaagatatccctagaaatgggcaaagtaaactccaaccttccccgcagcagcacaacagatctcaagaaactctctacctcggtccaaggactcgaggagcgtctcccagccatgctggcgcagatcacagagcgacaggagcaactacagaaagacatggagagcacgctaaaggctaccgaggcaaaagtcaaagccatcgatcaattgtacaaggagacgaaagcggagaacgagctcctgtacgagaagttcaattctgagctaggcaagatcgtgaaagcattgaagggaaaaggaagagaggataaagaggaattactggcgaaggtgagagatgctaatgaggagacggcgaggacgaagaaggagaacgctagattacgacgggaaatggtcagtctgagggcgctagtaaagagcgggagcggtggcgacgcttag

SEQ ID NO: 26653 - protein, 1525 aa, Muscodor strobelii
  misc_feature: SGI Peptide ID NO. 569118
  misc_feature (1)..(1520): NCBI GI: 145613379 Blast Desc: MGG_01695 [Magnaporthe grisea 70-15] gi|145020462|gb|EDK04591.1| MGG_01695 [Magnaporthe grisea 70-15]
  misc_feature (1)..(1518): NCBI GI: 256727390 Blast Desc: [Nectria haematococca mpVI 77-13-4]
  misc_feature (1)..(1525): NCBI GI: 261354948 Blast Desc: conserved [Verticillium albo-atrum VaMs.102]
  misc_feature (1)..(1521): NCBI GI: 116195132 Blast Desc: CHGG_04164 [Chaetomium globosum CBS 148.51] gi|88180077|gb|EAQ87545.1| CHGG_04164 [Chaetomium globosum CBS 148.51]
  misc_feature (1)..(1524): NCBI GI: 171691000 Blast Desc: protein product [Podospora anserina] gi|170945448|emb|CAP71560.1| protein product [Podospora anserina]
  misc_feature (1)..(1518): NCBI GI: 46121791 Blast Desc: FG05273.1 [Gibberella zeae PH-1]
  misc_feature (1)..(1116): NCBI GI: 164424998 Blast Desc: NCU06579 [Neurospora crassa OR74A] gi|157070746|gb|EAA32703.2| conserved [Neurospora crassa OR74A]
  misc_feature (1)..(1525): NCBI GI: 154301670 Blast Desc: BC1G_10162 [Botryotinia fuckeliana B05.10] gi|150855824|gb|EDN31016.1| BC1G_10162 [Botryotinia fuckeliana B05.10]
  misc_feature (1)..(1518): NCBI GI: 189205817 Blast Desc: conserved [Pyrenophora tritici-repentis Pt-1C-BFP] gi|187975336|gb|EDU41962.1| conserved [Pyrenophora tritici-repentis Pt-1C-BFP]
  misc_feature (7)..(1515): NCBI GI: 238499737 Blast Desc: Rho guanyl nucleotide exchange factor, [Aspergillus flavus NRRL3357] gi|220692856|gb|EED49202.1| Rho guanyl nucleotide exchange factor, [Aspergillus flavus NRRL3357]
MVRITEDLALSPENVTLYQATDPLLGHLPVLVLHGLCTTHNYTYNSSRVQIHVYTAAGFQSFPRLTISPNSPFYGVVSHLPREFQGDEVYRAIAFGLSKYFHELPDPVKAHIKQLYPTTRGRRPGSSPALFTDQHAADLAKAMVRADNTADVIPKLHAALQTQHVNNVDIDLVLPPGSIVPLQPADFDDVPEDEDDILDPTLRQYGMYTPLVKLFGEPMFLPTTRLRRAPSKPSALNRSKSFSKDQKVELRKKMAELVETEERYVAKVGELVSQVAAEYRQKAKERQPGSFSPSEKDVDRLFPRSSDQILQVNTAFMRELRKVLDETEESAKKDAESGVSSSRVGPSGSLLGKSKDASGALSMAKVMLEWFPKFTDCYQDYIRASQNFPQLITSFVNQQSTFTQRVVVTGEQHLRSTVIEPVQRLPRYSLMIDQIVSCLPITHPALQPMLKARDIIANICSMDDPMADNPHVSTRLRNMIESWPPDLDPQGRLITAADFIEIAAPYDNTNVAETQSDERGGLFLVFSDSIVLVKKMYGVKMTARDLLREIDKPSPAGLLASMTNAAGGPGSYDLAFAGWHELANIRFTESADGRMTWMTSAKEMNGAYASDFVSNIAVTSRCFMLLESYEGKSAKWTEDIVKARVENRFAEAEREDPCWTLRSVRMPDTGLGLFAAVFQEGIDQILEGRKEPAPIRIVVDHEKGTKGSPVGHYGVEICSDVKAGDLKKIVMITVGLHGKRTTDEVALDDFLPTLARRIIHYLSTQFNVTNPGLTSALVNTHTKILHELRVTNRTEKTRSFLASSPVKYLSSFLSSSSVTEATAPGKLQRALTDSSTLSLGFFPGQISRSNSSRDAASLYGSIKSRDGQRVGPGEPEPENPIMQTEQTFTGYIMNLLALKGSFNVRTLMNRSTVDETLINDVYNKLMGSPFDPLNSPDFTADVVFASFEKFVANGWRNQMGHIITTKALDALQERASKRLPGDFADFVHYLFADMAPQNRRAFSALVRLLNELLDGCNSDSDRGSLTLAFAELLVDTDIAPQYINLLDRLVEDCDRIFDEGTAGFNMSTGTGGSVYESMTSATRSGKSHTGSVTSNTSSLRKKFGLGDFLMRQNSKTETESRSSIWRSLSKHGRNPGTGEPASLSRGSMARTRSVDIVGGTNKLRRPGSRDRPLVAGAFDDTFSRPTSSQRLETIGEPGETIAKAPRKKRRSSLSDLKSLMEAARLDDDDEPLQPLSHMKETSEKFNSTPRLPSPSKIPISPKTHQQITQQITAPVMQQSAKQKENIKENIDDPFRTPTTSNESPRKGHLKLLSTSNIPTLKPSRTDPGPDTSPTRPTTSPSKAPGKLRLQSPQKLRERLQVEKKAVEQVDANLQSELSKISLEMGKVNSNLPRSSTTDLKKLSTSVQGLEERLPAMLAQITERQEQLQKDMESTLKATEAKVKAIDQLYKETKAENELLYEKFNSELGKIVKALKGKGREDKEELLAKVRDANEETARTKKENARLRREMVSLRALVKSGSGGDA

SEQ ID NO: 26654 - DNA, 5560 bp, Muscodor strobelii
  misc_feature: SGI EST ID NO. CUFF.62923.0
  misc_feature: Variant of the nucleotide sequence at SEQ ID NO 26652
ttcagccttatacaacaagcttaattggttcttgtgctctggttctggattgaatcgaatcgagctttgtgagaattgtttcttattcctgactcgtttgaaatttgttatgtactcttctaccgttgggcgcatttcatctatggaataacggagtgttgtttttggagaggcgtcgatcagcacccgaagtaaacaaaccatctgcgggtgtccacggtcaaccaccggaacgcgcccgcatcaacgcccacgcccacgcttcgcacctcatgcacactggcgacatccgtcgcattgtgaacccctcgctggctggctgtcgacacgggttatgacttgtttcagagttctggttaacgactaggcacaaagcttcctagatacattatacactatacactgtacactacacgctcgtttgcttcatccgggggccaccatgacccagtaggccgaccatggtccgcatcaccgaagacctggcgctctcgccagaaaacgtcactctctaccaggcgaccgacccgctgctgggccacctgcccgtcctcgtgctgcacggcctctgcactacgcacaactatacgtacaacagctcgcgcgtccagatccacgtctacaccgccgccggcttccagtccttcccgcgcctgaccatctcgcccaactcgcccttctacggcgtcgtcagccacctgccccgcgagttccaaggagacgaggtctatcgcgccatcgccttcggcttgtccaagtacttccacgagctgcccgaccccgtcaaggcccacatcaagcaactgtatcccaccacccgcggccgccgccccggctcttcgcccgccctcttcaccgaccaacatgccgccgacctcgccaaggctatggtccgcgccgacaacaccgccgacgtcatccccaagctgcacgccgccctgcagacccagcacgtcaacaatgtcgacatcgacctcgtcctgccccccggctccatcgtgcccctccagcccgccgacttcgacgacgtgcccgaggacgaggacgacatcttggaccccacgctgcgccaatacggcatgtacacgcccctcgtcaagctcttcggcgagcccatgttcctgcccaccacgcgactgcggcgcgccccgtcaaagcccagcgccctgaaccgatccaagtccttctccaaggaccagaaggtcgagctgaggaagaagatggccgagctggtggagacggaggagcgatatgtggctaaagtcggtgaactggtcagccaggtggccgccgagtaccgccagaaagccaaagagcgccagccggggagcttcagcccgtccgagaaagacgtcgacaggctcttcccgaggtcgtcggatcagatactgcaggtcaacaccgcattcatgcgcgaactgcgcaaagtattggacgagaccgaagagagtgccaagaaggacgcggagtcaggtgtctcatcatcaagagtcggcccatccggcagtctgctggggaagtcgaaagacgcaagtggtgccctgtccatggccaaagtcatgctggagtggtttcccaagttcacggattgctatcaggactacatccgggccagccaaaacttccctcagcttatcacctcgttcgtcaaccaacaatcgacgtttacgcagcgggtggtcgtcacgggcgaacagcatttacgctcgaccgtcatcgagcctgtgcagcgcctgccgcgttacagtttgatgatcgaccagatcgtgagctgtttgccaatcacgcaccccgcgcttcagcctatgttgaaggcacgagatatcatcgccaacatatgttccatggacgatcctatggcggacaacccgcacgtgagcacgcgcctccgcaatatgatcgagagctggcctcccgatctcgatcctcagggtcgcttgatcacggcagctgatttcatcgagattgcggccccgtatgacaataccaacgtggccgagacgcagtcggatgaacgaggtggcttgtttctggtcttctccgactccatcgttctcgtcaagaagatgtatggtgtgaaaatgaccgcacgagatctcctacgtgagatcgacaagccttcgcctgcagggttgctggcttccatgaccaatgccgccggtggacctggttcgtatgatctggcatttgccggctggcacgagctggccaacatccgcttcacagagtcggccgatggtcgcatgacttggatgacgtccgcgaaagaaatgaatggcgcgtatgctagtgacttcgtgtccaacattgccgttacttcgcgatgcttcatgctgctggaatcgtatgaaggcaagtctgccaagtggactgaggatattgttaaggcgcgagtagagaatcgatttgcggaagcggagcgtgaggatccttgttggacattgagatctgtgagaatgccagatacaggattgggactgtttgcggccgtgttccaagagggcattgaccaaattctcgaagggcgcaaagagcccgcccccatccgcattgtcgttgaccatgaaaaaggtactaagggctccccagttggccattacggcgtggagatttgctcggatgtaaaagctggcgatctgaagaaaattgtgatgattaccgtgggtctgcatggaaaaaggactacggatgaggtggccctggacgacttccttcctacacttgctaggagaatcatacactatctcagcacgcagttcaacgttaccaatcccggtcttacatctgcgttggtgaacacgcacaccaagattctccacgaattgcgcgtgacgaacagaacagagaaaacaaggtcgttcttagcaagttcaccagtcaaatatctatctagcttcctcagtagctctagcgttacagaagctacagctcccggcaagttacaacgggcactcacagacagctcaaccctcagcctgggattcttccccggacagatcagccgttcgaatagtagtcgagatgctgcttccctatatgggtcgataaagagtagagacgggcagcgagtcgggccgggagagccggaacccgagaaccccatcatgcaaacggagcagacttttacggggtatataatgaatctgcttgcacttaaaggaagcttcaacgtccgaacgctgatgaacagatctacggtcgacgagacgttgatcaatgacgtctacaacaagcttatgggaagtccttttgatcccttgaactcccctgacttcacagcagacgtcgtattcgcatccttcgaaaaatttgtggccaacggttggcgcaaccaaatgggtcacatcataacaaccaaagctcttgatgcccttcaagaaagagcgtccaaacggttgccgggagactttgcagactttgttcattacttgtttgccgacatggctcctcagaatcgccgcgcgtttagtgcactcgtcaggcttttgaatgagttgcttgatggatgcaatagcgatagcgacaggggctctttaacactagcatttgctgagctccttgtcgacactgacattgcccctcagtatatcaatcttctcgatagacttgtggaagattgtgaccgcattttcgacgaaggaactgccggcttcaacatgagcactggcacgggcggatcagtctacgagtcaatgacctcggcgactcgcagtgggaagtctcacaccggctcggtcacgtcgaatacatcgtccctgagaaagaaatttgggttgggtgattttctcatgcgccaaaacagcaagaccgaaacagaaagtcgctcctcgatttggcgtagcttaagtaagcatggacggaatccgggcacaggggaacctgcaagcctctcacgtggttctatggcaaggacacgatctgtcgacattgtaggcggcaccaacaagttgagacggcctgggtctagggacagaccactggtcgccggcgctttcgatgatacgttcagccgccccacgagctcacagagactagaaacaattggagagcctggggaaaccattgccaaggctcccaggaagaagcgacgtagctcattgtcagatctaaagagtctcatggaagcagcgagacttgatgacgacgacgaaccgctacagccactttcgcatatgaaagagacatcggaaaaattcaactcgacccctcgactaccatctccctcgaaaattcctattagtcccaagacacaccaacaaattactcaacaaatcactgcccctgtcatgcagcagtccgccaaacagaaagagaacataaaggagaacatcgacgaccccttcaggacacccacgacatcgaacgaatccccgaggaagggccacttgaagcttctctccacgtcaaatatcccgaccctcaagccttcccgcacagacccaggcccggacacctctcccacgaggcctacgaccagcccatctaaagcacccggcaaactacgactgcagtcgcctcagaaactccgcgaacgccttcaagtcgaaaagaaagccgtggagcaggtcgacgccaacctccaatcagaactatccaagatatccctagaaatgggcaaagtaaactccaaccttccccgcagcagcacaacagatctcaagaaactctctacctcggtccaaggactcgaggagcgtctcccagccatgctggcgcagatcacagagcgacaggagcaactacagaaagacatggagagcacgctaaaggctaccgaggcaaaagtcaaagccatcgatcaattgtacaaggagacgaaagcggagaacgagctcctgtacgagaagttcaattctgagctaggcaagatcgtgaaagcattgaagggaaaaggaagagaggataaagaggaattactggcgaaggtgagagatgctaatgaggagacggcgaggacgaagaaggagaacgctagattacgacgggaaatggtcagtctgagggcgctagtaaagagcgggagcggtggcgacgcttagaaggggtcgagaacgaagacaattacatcgtgggcgttttgggtgttggcgctcgggtttagatgtctggaaaaaatgacgaggaagattctatgtgtgggcatgagtgtggtttggctgggtagatggattttgtattatactgagtgacggctgatacccctgcctgcctatctacacttgcatgggcaccgaatggttccttgggcggaaggggagaggagctcagtcgtgccgtttcctacttttgtgtgcttcgggggatgaggttatagtcatggcttttggcgtttgggaggctggagtctttgtgttgaggacatcgaccgcatttgttggctggtggttgtataggtcttgtgtatagctgactgactcttgactgcatggcctggcatggcatggcttgagaggtcttgcttgatgagtaaatgatatgattaaaacgaaatcacgtttacagcagttttattactgatgcttgacatgtcatcgtgacctttagacagatacaaaaaaag

SEQ ID NO: 26655 - DNA, 675 bp, Muscodor strobelii
  misc_feature: SGI cDNA ID NO. 569119
  misc_feature: Reduced expression when VOC is produced
  misc_feature: Encodes the peptide sequence at SEQ ID NO 26656
ctgcgccgaggcttccaggtctaccgcgaggtctgcatggcctgccactcgctcagccgcatcccctaccgatcgctcgtcggcaccatcctgaccgtcgacgaggccaaggccatggccgaggagaacgagtacgacagcgagcccaacgacgagggcgagatcgagcagcgccccggcaagctgtccgactacatccccgccccctacaagaacgacgaggccgcccgggccgccaacaacggcgccctgcccccggacctgtccctcatcgtcaagggccgccacggcggctgcgactacatcttcagcctgctgaccggctaccccgaggagccccccgccggcgcccaggtcggcgccggcctcaacttcaacccctacttccccggcaccggcatcgccatggcccgcgtgctctacgacggcctggtcgagtacgaggacgagacccccgccaccacctcccagatggccaaggacgtcgtcgagttcctcaactgggccgccgagcccgagatggacgaccgcaagcgcatgggcctgaaggtcctgaccgtcaccaccgtcctcttcgccctcagcgtctgggtcaagcgatacaagtgggcctcggtcaagtcgaggaagatcgtctacgacccgcccaaggccaccacctcgacccgctcctag

SEQ ID NO: 26656 - protein, 224 aa, Muscodor strobelii
  misc_feature: SGI Peptide ID NO. 569119
  misc_feature (1)..(207): Pfam Id: PF02167 Pfam Desc: Cytochrome C1 family
  misc_feature (1)..(221): NCBI GI: 85111062 Blast Desc: cytochrome c1, mitochondrial precursor [Neurospora crassa OR74A] gi|28925483|gb|EAA34520.1| cytochrome c1, mitochondrial precursor [Neurospora crassa OR74A]
  misc_feature (1)..(217): NCBI GI: 171687971 Blast Desc: protein product [Podospora anserina] gi|170943947|emb|CAP69599.1| protein product [Podospora anserina]
  misc_feature (1)..(218): NCBI GI: 117760 Blast Desc: CY1_NEUCR RecName: Full=Cytochrome c1, heme protein, mitochondrial; AltName: Full=Ubiquinol-cytochrome-c reductase complex cytochrome c1 subunit; Short=Cytochrome c-1; AltName: 4;
  misc_feature (1)..(220): NCBI GI: 145615665 Blast Desc: cytochrome c1 precursor [Magnaporthe grisea 70-15] gi|145022451|gb|EDK06471.1| cytochrome c1 precursor [Magnaporthe grisea 70-15]
  misc_feature (1)..(220): NCBI GI: 116180254 Blast Desc: cytochrome c1, heme protein, mitochondrial precursor [Chaetomium globosum CBS 148.51] gi|88185052|gb|EAQ92520.1| cytochrome c1, heme protein, mitochondrial precursor [Chaetomium
  misc_feature (1)..(223): NCBI GI: 261356370 Blast Desc: cytochrome c1 [Verticillium albo-atrum VaMs.102]
  misc_feature (1)..(216): NCBI GI: 258569204 Blast Desc: cytochrome c1 [Uncinocarpus reesii 1704] gi|237906792|gb|EEP81193.1| cytochrome c1 [Uncinocarpus reesii 1704]
  misc_feature (1)..(216): NCBI GI: 225558126 Blast Desc: cytochrome c1 [Ajellomyces capsulatus G186AR]
  misc_feature (1)..(216): NCBI GI: 240273365 Blast Desc: cytochrome c1 [Ajellomyces capsulatus H143]
  misc_feature (1)..(216): NCBI GI: 242796079 Blast Desc: cytochrome C1/Cyt1, [Talaromyces stipitatus ATCC 10500] gi|218719312|gb|EED18732.1| cytochrome C1/Cyt1, [Talaromyces stipitatus ATCC 10500]
  misc_feature: Useful for introducing or modulating the production of volatile compounds
LRRGFQVYREVCMACHSLSRIPYRSLVGTILTVDEAKAMAEENEYDSEPNDEGEIEQRPGKLSDYIPAPYKNDEAARAANNGALPPDLSLIVKGRHGGCDYIFSLLTGYPEEPPAGAQVGAGLNFNPYFPGTGIAMARVLYDGLVEYEDETPATTSQMAKDVVEFLNWAAEPEMDDRKRMGLKVLTVTTVLFALSVWVKRYKWASVKSRKIVYDPPKATTSTRS

SEQ ID NO: 26657 - DNA, 1152 bp, Muscodor strobelii
  misc_feature: SGI EST ID NO. CUFF.62920.0
  misc_feature: Variant of the nucleotide sequence at SEQ ID NO 26655
caagcgtaagcctgcccgcttctcctcccctgctctctgctctctactctccgctcttcgtgctcacccacgtccgccgccgccagcctgcgccgaggcttccaggtctaccgcgaggtctgcatggcctgccactcgctcagccgcatcccctaccgatcgctcgtcggcaccatcctgaccgtcgacgaggccaaggccatggccgaggagaacgagtacgacagcgagcccaacgacgagggcgagatcgagcagcgccccggcaagctgtccgactacatccccgccccctacaagaacgacgaggccgcccgggccgccaacaacggcgccctgcccccggacctgtccctcatcgtcaagggccgccacggcggctgcgactacatcttcagcctgctgaccggctaccccgaggagccccccgccggcgcccaggtcggcgccggcctcaacttcaacccctacttccccggcaccggcatcgccatggcccgcgtgctctacgacggcctggtcgagtacgaggacgagacccccgccaccacctcccagatggccaaggacgtcgtcgagttcctcaactgggccgccgagcccgagatggacgaccgcaagcgcatgggcctgaaggtcctgaccgtcaccaccgtcctcttcgccctcagcgtctgggtcaagcgatacaagtgggcctcggtcaagtcgaggaagatcgtctacgacccgcccaaggccaccacctcgacccgctcctagacacccgctcgtctttgcatgtactactactgcctatggtttccccttgccgttcctttgtatccgtgagaaagggggggagggagctggaggctgccgactgccggctgccggcccatcgggtcgcaccattctagagtgtaaatcacaagtttctcattttagacaattgcacatgaatcatccgtcctgtagatgaggctctccggagacagcgtgcgggtgaagaaaaaaaacaaagccgtgacgaatttgactacacatgctacatttaatccatctttagcttcgtctagactcgtagttgtactttccaaagtggtgtgatgcgtcatcggaccagaggtagaaaccatcaacaaagatagatacatatagattcaatgctcg

SEQ ID NO: 26658 - DNA, 1815 bp, Muscodor strobelii
  misc_feature: SGI cDNA ID NO. 569120
  misc_feature: Encodes the peptide sequence at SEQ ID NO 26659
atgatggcatcgtatgaagacgacagtcaagctcagtctgcagccgagatcctggctcacgacctgatgttcggttttggcggcgtcaaagacgacgatgagaggcaattcctagctgggcttatcattgacggcgtgggtgacgcggaagacatcaacgagttcttacagcttagtgttcttcaaggggttgagcaatgggagcaagccatgtgttgtggcaagtcgctgcaagagcaagacccatccagcgacttgcttgaagggaacgatgctctgacattcctggcaaaagtttatgggctctcgcctgccgttggcgataccgatactcaaaaggggccgcctagagcggttcattcaaggcatctccgtaagccacgcaagaagaatgattgcagagacaatgatacgacgcctgcctcggagagcctagtcacaacacgcgtcaaaaaagatcaaaaggccacgccaaaggccatatctccatactggcatcacaccaatcgaaatgccagcaaatacgatgccgagattgacaatacgcatcggcagcctcggaaaccaccaaaacgtgtttcggagcccgctgtgcccggatcactggctgtaggaatgtatgctttagatgagcacgtctccctccgattgccaccaagtcaacacagtcacaatggatctgatgatgtccagcctgtcactcgtttggacgctcggtgctttcaggacggccccgccggtcaccatcaagcttctgtagaaactacgacgggccaagtagcggaagataccgtgataaatgcaggcccgccattgcctcatgttctcattcatagatcgtttccggagggttcggatctcaattctgaggatgcggaaacgggtgaggatgcaagattcgcaacttgcccgatggctggtgataccaaaggttcatcgccgcagaagcagccaacgaaacgcgtatcaaagtcgccattctttcacaacgagagcccctcgaagtcaccaagaaattcacggccacctaggggtatagtatcatccataccgtttccccggctcgatgcgccagagtttgggctcatacaggaagaacttgcccatgatcctttctggctattaattgcggtcacattcctcattcgcacagcagggaagacagcgattccagttttccgagcattgatgaagagataccctacaccccgagctctcgcggaggcagattctcacgacgtgcttgtgatgattcaacatctaggactcggtgttcagagatacgcgcgcgtatggatggaaaatccacctcgaaacggcgtgcgctatggtgtcaagaattatccccgtctcagagatggtgcggacgtcaaggctggggaaatgcttgaagatggagacacgcgcgcttcaggatgggaaatcggtcacgtacggactcctccgttccccgtcgtatatgggacccgagcgtctcacctgtatctacattctgaccgcctacagattacgaacggaccgtacgccattgacagctggcgcatcttctgccgtgatgcgttgcggggtgttgcatcggactggaaaggtcgaggacgtgatgggtcattccaacctgagtggatgcgagtcctacctcaggataaagagttacgagcttgtctgcgctggaaatggatgcaagaaggatgggaatgggaccccgagacaggcgagagagaggtcttatcggctgacttgtacaatgccgtgcagaaagggagagttgggtacgatgatacggggggtctgaagatattggcggagacagcctga

SEQ ID NO: 26659 - protein, 604 aa, Muscodor strobelii
  misc_feature: SGI Peptide ID NO. 569120
  misc_feature (313)..(600): NCBI GI: 145615663 Blast Desc: MGG_13169 [Magnaporthe grisea 70-15] gi|145022450|gb|EDK06470.1| MGG_13169 [Magnaporthe grisea 70-15]
  misc_feature (18)..(594): NCBI GI: 85111060 Blast Desc: NCU09815 [Neurospora crassa OR74A] gi|28925482|gb|EAA34519.1| [Neurospora crassa OR74A]
  misc_feature (290)..(602): NCBI GI: 256735233 Blast Desc: NECHADRAFT_90114 [Nectria haematococca mpVI 77-13-4]
  misc_feature (330)..(600): NCBI GI: 171687969 Blast Desc: protein product [Podospora anserina] gi|170943946|emb|CAP69598.1| protein product [Podospora anserina]
  misc_feature (325)..(599): NCBI GI: 46107308 Blast Desc: FG00537.1 [Gibberella zeae PH-1]
  misc_feature (333)..(587): NCBI GI: 225678163 Blast Desc: conserved [Paracoccidioides brasiliensis Pb03]
  misc_feature (325)..(604): NCBI GI: 239610225 Blast Desc: pre-mRNA splicing factor [Ajellomyces dermatitidis ER-3]
  misc_feature (333)..(595): NCBI GI: 226279510 Blast Desc: conserved [Paracoccidioides brasiliensis Pb01]
  misc_feature (325)..(604): NCBI GI: 261192703 Blast Desc: methyl-CpG-binding domain-containing protein 4 [Ajellomyces dermatitidis SLH14081] gi|239589240|gb|EEQ71883.1| methyl-CpG-binding domain-containing protein 4 [Ajellomyces
  misc_feature (333)..(595): NCBI GI: 226287660 Blast Desc: conserved [Paracoccidioides brasiliensis Pb18]
MMASYEDDSQAQSAAEILAHDLMFGFGGVKDDDERQFLAGLIIDGVGDAEDINEFLQLSVLQGVEQWEQAMCCGKSLQEQDPSSDLLEGNDALTFLAKVYGLSPAVGDTDTQKGPPRAVHSRHLRKPRKKNDCRDNDTTPASESLVTTRVKKDQKATPKAISPYWHHTNRNASKYDAEIDNTHRQPRKPPKRVSEPAVPGSLAVGMYALDEHVSLRLPPSQHSHNGSDDVQPVTRLDARCFQDGPAGHHQASVETTTGQVAEDTVINAGPPLPHVLIHRSFPEGSDLNSEDAETGEDARFATCPMAGDTKGSSPQKQPTKRVSKSPFFHNESPSKSPRNSRPPRGIVSSIPFPRLDAPEFGLIQEELAHDPFWLLIAVTFLIRTAGKTAIPVFRALMKRYPTPRALAEADSHDVLVMIQHLGLGVQRYARVWMENPPRNGVRYGVKNYPRLRDGADVKAGEMLEDGDTRASGWEIGHVRTPPFPVVYGTRASHLYLHSDRLQITNGPYAIDSWRIFCRDALRGVASDWKGRGRDGSFQPEWMRVLPQDKELRACLRWKWMQEGWEWDPETGEREVLSADLYNAVQKGRVGYDDTGGLKILAETA

SEQ ID NO: 26660 - DNA, 5985 bp, Muscodor strobelii
  misc_feature: SGI EST ID NO. CUFF.63026.1
  misc_feature: Variant of the nucleotide sequence at SEQ ID NO 26658
tagccgggacttgctagccctctgttgactagatatgtgcatacacttgttcaagtgatcttagtcctacagcccattatcccgcccattctatgcgacgcaattaattcactaagcaggatcaagccgagccagacggaacccattggcgctcttcattcgcctctatggcgtgtgcgcttgcgcccagatagtcatcgctcgattcatcctttgcgctttgcgccgcgatgatggcatcgtatgaagacgacagtcaagctcagtctgcagccgagatcctggctcacgacctgatgttcggttttggcggcgtcaaagacgacgatgagaggcaattcctagctgggcttatcattgacggcgtgggtgacgcggaagacatcaacgagttcttacagcttagtgttcttcaaggggttgagcaatgggagcaagccatgtgttgtggcaagtcgctgcaagagcaagacccatccagcgacttgcttgaagggaacgatgctctgacattcctggcaaaagtttatgggctctcgcctgccgttggcgataccgatactcaaaaggggccgcctagagcggttcattcaaggcatctccgtaagccacgcaagaagaatgattgcagagacaatgatacgacgcctgcctcggagagcctagtcacaacacgcgtcaaaaaagatcaaaaggccacgccaaaggccatatctccatactggcatcacaccaatcgaaatgccagcaaatacgatgccgagattgacaatacgcatcggcagcctcggaaaccaccaaaacgtgtttcggagcccgctgtgcccggatcactggctgtaggaatgtatgctttagatgagcacgtctccctccgattgccaccaagtcaacacagtcacaatggatctgatgatgtccagcctgtcactcgtttggacgctcggtgctttcaggacggccccgccggtcaccatcaagcttctgtagaaactacgacgggccaagtagcggaagataccgtgataaatgcaggcccgccattgcctcatgttctcattcatagatcgtttccggagggttcggatctcaattctgaggatgcggaaacgggtgaggatgcaagattcgcaacttgcccgatggctggtgataccaaaggttcatcgccgcagaagcagccaacgaaacgcgtatcaaagtcgccattctttcacaacgagagcccctcgaagtcaccaagaaattcacggccacctaggggtatagtatcatccataccgtttccccggctcgatgcgccagagtttgggctcatacaggaagaacttgcccatgatcctttctggctattaattgcggtcacattcctcattcgcacagcagggaagacagcgattccagttttccgagcattgatgaagagataccctacaccccgagctctcgcggaggcagattctcacgacgtgcttgtgatgattcaacatctaggactcggtgttgttcgcaccgcggccatcggtatgtgtgaatacgtcctgcggtagtcattcctacctcactcctgagacagtatactaaattatatatagtaagtataatcggagactcgtcggacagttaaagtcacatatttgtctcgcgatctggaccacgcccattaatatgaatcttgggagataactaacatatctttctggctattagcagagatacgcgcgcgtatggatggaaaatccacctcgaaacggcgtgcgctatggtgtcaagaattatccccgtctcagagatggtgcggacgtcaaggctggggaaatgcttgaagatggagacacgcgcgcttcaggatgggaaatcggtcacgtacggactcctccgttccccgtcgtatatgggacccgagcgtctcacctgtatctacattctgaccgcctacagattacgaacggaccgtacgccattgacagctggcgcatcttctgccgtgatgcgttgcggggtgttgcatcggactggaaaggtcgaggacgtgatgggtcattccaacctgagtggatgcgagtcctacctcaggataaagagttacgagcttgtctgcgctggaaatggatgcaagaaggatgggaatgggaccccgagacaggcgagagagaggtcttatcggctgacttgtacaatgccgtgcagaaagggagagttgggtacgatgatacggggggtctgaagatattggcggagacagcctgattatctctgctcgaggactaaagcaccgagctcgctaaggaacgtcgacaataatgagaaaataatgtctctacaaactgcccggcatgtcagctgaactcatctggtgtgtgtagagcactgcgcatcgaggcttgaggttgctataagcgtagagaccaggtattatacacgtaccttttgctatgaaatgctactcgtagacacatagtggcaagcaagctccgatttgcgggttttagatgcgggaaagattcagtccagttattgtgctaatctggctagcttcatggtagacagaccccgttcattctacgcttaatcatacacattgagcccaatgcggcatattttgttttcatccccccccccctcccccgggcgccgcgcctggtttgttttgccgacatgacagccttcaaagtagttccgagtacgggtgaaagtagtacaacacagctaccgacttatgcaacataggtactcctgtctatgtgctggctgttttcctccgctccttgacggcatttgccagcgagtcgaggaccgcaactgtgtcctgccaaccgatacaagcatcggttatgctcaccccgtacttgagtccttccttgccttgtttgggtaccttttggttgcctaagataattatgtttagtcgtgatcttggttgtaagacttcgagaataacggtaccttcattgatattgctttctatcattacccccattatgccgtgttcgcctttagcaagctgctccgctatgctggcagctactttgggctggttgctgtggttcttttcggaatttccgtggctgcagtcgaccatgaggcgttgcgcaaccccagccctctgcagggcttctttggcctcttgtatgctcttcgcatcgtaatttgtgccgcgcttgccgcctcggaggatgacgaaacagtcctcgtttccggcggtgccaacgacagcaaccacgccgggctttgtgacggacaggaagtggtgggggtgcttgacggcgccaatagcatcgatggcaacgccgagggtgccgtcggtgccattcttgaagccgacgggaaaagagagaccgctggccagctctctgtgcagctgactctctgtggtcctggcgccgacggcaccggcggacaggagatcggccaggaactggggcgagatggtgtcgagcatctcgcttgcgatgggcatgcccttgtcggtcaagtcgacgaagagctgcctcgacatgcgcagtcccttgttgatcttgaagctgttgtcgatgtcggggtcgttgatgaggcccttccagccgaccgtcgtcctcggcttctccaagtaggcacgcatcacaatgagcagctcatcccggtgcctagccttctccttcagcaagagatcgcagtactcgagggcggcgtgggggtcgtgtatggagcaggggccaacgatgacgagcagtctctgcttctcgtcggtgccattgacgacggcgacggcctcctcgcggcttgccagcacggtgtccttggagttgggggtctgggggatctcgtgctgcaggacgtcgggggcggtgagagggttgtagccacgaactagacgcccaagtcagtgcatgcccaagctggcgacggcgggggctctgggggagtcaagggggagtcaagggggccactgactgcgccaatcctcgttggtcgtcttgttgcccagatgagggttctcgatgaagaagctctgcacggcgaggtcaattcacatggactatggacgtagatgtggacgtggacatgggcgtagacatggacatcctcggtacacgcaccgacatgatcggatgggaagggacgggacagctaacaggtagtccctctcacgcccgcggagtagatcgccggccgacaattgcgccgtccaaagttgcgaagtgtgtctataactaaatgattagctagacagcagcagtctaagcttaacctgtacgcctaacttgtgacgggggaaaacagtgtcgagaagctatttacaaagtcctggagctactatggattgtgactcgaccttgtgaggtggggtgaactggtggtgggggaggggttgttggcccttttttttttggcattaaacttgtccaatgctccgggtgttcgacgacttgtccaatcgataagtcactttctatctgtacccacggcatgcactttagtagtatgcctgctcgcctgttcgcctgtgtaacaccgttgaacccgcctcctgtaggaaagctacatttgacacagtatacccgcgtattgaccagcggtatcgtctactgtcctggcaaatcgtggtggaagcgaagaattcgagacgttgatctcaattttttgacatggtatctctggaggtcacgtcgaagctttcgaaggaatttcggcaactgcctcggagatgatatatgtgttacgagtcgcattatatatccgcacccatgcattcaacgatgagaaactcgcgagtagtgtcgttatactttcgggcggcgtcttcgtgcgtttatatcggatccacttaacgggtcatcgcctccattgacccacgcatacagccttttgagtagcagagtgctacctgtcatcaaaattgctgacacggtgaacaaggcggcacgctgccaagtgctaagaagatcaaatatgggataagggtacctatccagtctctcagaagcagtattcaacccagtaccaatacgagaacgccagcgcctgactcaggcccatggccgacacgcccgttattgtccaaggcgggctcaagagaatgagatctgtggcaaggaaaaggccgggcgccgcgtggaacccaaagtctggaagaaaatcaagctgaaactctggaggaaagaccagattcttgtcgatagcacatagcccccagtagagtattgatattctagtgtgtgtcatcatatcagtctgtctgctaaaccataatgctgtacatcaaaatcccaactgctactggatggaccggctcaacactctacatcactcactatgacacaacgttagtatgattctcgggggaaatgacgatgtgtaaaacggggctctgcgcaccaagacttctaatggtgccgatgcaacggcaagtaggcacttggcgtggaacaacgtcggtgacaatgttaggtcagccattaatgccacgacgaaggtggcaagcgctaatgcgagcccaataatggtcagaaattgaaagtgaccgccgtacgcagcagacatcggagtctcccaggcgttcagaaaacgaaaggaagcaacaaacgaggcaatgccagcggcgtgccacacaatcgagaaccgcctacaaggtaagtgaagataatgctgagccatgtctacatgcagcgaaagcgatgactacaagatgagaaagacgcgcccgaacgaaatagaggaaaggtcagtgagtagtagatgagatcgggcagcaaaggacgctgcaagttccaaggcgagccgaggtgccagggtgtaagtcgcgattaaacaatttattccacgaagatgccactctcgacgcgtcaataatgtacttgcagtcccgcaatcgagtttggtgtttattttcgcaccttcttcacgaacggggcgtgatgggttgaatggctttactcgcggtagctaccttacctatgtaggcattcactctttatctgtggcgatgagatgatggcttacaag

SEQ ID NO: 26661 - DNA, 1116 bp, Muscodor strobelii
  misc_feature: SGI cDNA ID NO. 569121
  misc_feature: Encodes the peptide sequence at SEQ ID NO 26662
atgtcgagcttcttcatcgagaaccctcatctgggcaacaagacgaccaacgaggattggcgcattcgtggctacaaccctctcaccgcccccgacgtcctgcagcacgagatcccccagacccccaactccaaggacaccgtgctggcaagccgcgaggaggccgtcgccgtcgtcaatggcaccgacgagaagcagagactgctcgtcatcgttggcccctgctccatacacgacccccacgccgccctcgagtactgcgatctcttgctgaaggagaaggctaggcaccgggatgagctgctcattgtgatgcgtgcctacttggagaagccgaggacgacggtcggctggaagggcctcatcaacgaccccgacatcgacaacagcttcaagatcaacaagggactgcgcatgtcgaggcagctcttcgtcgacttgaccgacaagggcatgcccatcgcaagcgagatgctcgacaccatctcgccccagttcctggccgatctcctgtccgccggtgccgtcggcgccaggaccacagagagtcagctgcacagagagctggccagcggtctctcttttcccgtcggcttcaagaatggcaccgacggcaccctcggcgttgccatcgatgctattggcgccgtcaagcacccccaccacttcctgtccgtcacaaagcccggcgtggttgctgtcgttggcaccgccggaaacgaggactgtttcgtcatcctccgaggcggcaagcgcggcacaaattacgatgcgaagagcatacaagaggccaaagaagccctgcagagggctggggttgcgcaacgcctcatggtcgactgcagccacggaaattccgaaaagaaccacagcaaccagcccaaagtagctgccagcatagcggagcagcttgctaaaggcgaacacggcataatgggggtaatgatagaaagcaatatcaatgaaggcaaccaaaaggtacccaaacaaggcaaggaaggactcaagtacggggtgagcataaccgatgcttgtatcggttggcaggacacagttgcggtcctcgactcgctggcaaatgccgtcaaggagcggaggaaaacagccagcacatag

SEQ ID NO: 26662 - protein, 371 aa, Muscodor strobelii
  misc_feature: SGI Peptide ID NO. 569121
  misc_feature (37)..(356): Pfam Id: PF00793 Pfam Desc: DAHP synthetase I family
  misc_feature (1)..(367): NCBI GI: 116180256 Blast Desc: conserved [Chaetomium globosum CBS 148.51] gi|88185053|gb|EAQ92521.1| conserved [Chaetomium globosum CBS 148.51]
  misc_feature (1)..(371): NCBI GI: 261356372 Blast Desc: phospho-2-dehydro-3-deoxyheptonate aldolase [Verticillium albo-atrum VaMs.102]
  misc_feature (1)..(370): NCBI GI: 171687973 Blast Desc: protein product [Podospora anserina] gi|170943948|emb|CAP69600.1| protein product [Podospora anserina]
  misc_feature (3)..(369): NCBI GI: 39941646 Blast Desc: MGG_05734 [Magnaporthe grisea 70-15] gi|145022439|gb|EDK06459.1| MGG_05734 [Magnaporthe grisea 70-15]
  misc_feature (2)..(371): NCBI GI: 46107190 Blast Desc: FG00478.1 [Gibberella zeae PH-1]
  misc_feature (1)..(369): NCBI GI: 256734547 Blast Desc: [Nectria haematococca mpVI 77-13-4]
  misc_feature (1)..(367): NCBI GI: 154314365 Blast Desc: phospho-2-dehydro-3-deoxyheptonate aldolase [Botryotinia fuckeliana B05.10] gi|150848921|gb|EDN24114.1| phospho-2-dehydro-3-deoxyheptonate aldolase [Botryotinia B05.10]
  misc_feature (1)..(367): NCBI GI: 156036210 Blast Desc: conserved [Sclerotinia sclerotiorum 1980] gi|154698199|gb|EDN97937.1| conserved [Sclerotinia sclerotiorum 1980]
  misc_feature (4)..(370): NCBI GI: 85111064 Blast Desc: DAHP synthase (Phe) [Neurospora crassa OR74A] gi|28925484|gb|EAA34521.1| DAHP synthase (Phe) [Neurospora crassa OR74A]
  misc_feature (2)..(369): NCBI GI: 154280721 Blast Desc: phospho-2-dehydro-3-deoxyheptonate aldolase [Ajellomyces capsulatus NAm1] gi|150411352|gb|EDN06740.1| phospho-2-dehydro-3-deoxyheptonate aldolase [Ajellomyces NAm1]
  misc_feature (4)..(367): SWISSPROT Homolog: EC 2.5.1.54 3-deoxy-7-phosphoheptulonate synthase
MSSFFIENPHLGNKTTNEDWRIRGYNPLTAPDVLQHEIPQTPNSKDTVLASREEAVAVVNGTDEKQRLLVIVGPCSIHDPHAALEYCDLLLKEKARHRDELLIVMRAYLEKPRTTVGWKGLINDPDIDNSFKINKGLRMSRQLFVDLTDKGMPIASEMLDTISPQFLADLLSAGAVGARTTESQLHRELASGLSFPVGFKNGTDGTLGVAIDAIGAVKHPHHFLSVTKPGVVAVVGTAGNEDCFVILRGGKRGTNYDAKSIQEAKEALQRAGVAQRLMVDCSHGNSEKNHSNQPKVAASIAEQLAKGEHGIMGVMIESNINEGNQKVPKQGKEGLKYGVSITDACIGWQDTVAVLDSLANAVKERRKTAST

SEQ ID NO: 26663 - DNA, 5900 bp, Muscodor strobelii
  misc_feature: SGI EST ID NO. CUFF.63027.0
  misc_feature: Variant of the nucleotide sequence at SEQ ID NO 26661
tgcctacataggtaaggtagctaccgcgagtaaagccattcaacccatcacgccccgttcgtgaagaaggtgcgaaaataaacaccaaactcgattgcgggactgcaagtacattattgacgcgtcgagagtggcatcttcgtggaataaattgtttaatcgcgacttacaccctggcacctcggctcgccttggaacttgcagcgtcctttgctgcccgatctcatctactactcactgacctttcctctatttcgttcgggcgcgtctttctcatcttgtagtcatcgctttcgctgcatgtagacatggctcagcattatcttcacttaccttgtaggcggttctcgattgtgtggcacgccgctggcattgcctcgtttgttgcttcctttcgttttctgaacgcctgggagactccgatgtctgctgcgtacggcggtcactttcaatttctgaccattattgggctcgcattagcgcttgccaccttcgtcgtggcattaatggctgacctaacattgtcaccgacgttgttccacgccaagtgcctacttgccgttgcatcggcaccattagaagtcttggtgcgcagagccccgttttacacatcgtcatttcccccgagaatcatactaacgttgtgtcatagtgagtgatgtagagtgttgagccggtccatccagtagcagttgggattttgatgtacagcattatggtttagcagacagactgatatgatgacacacactagaatatcaatactctactgggggctatgtgctatcgacaagaatctggtctttcctccagagtttcagcttgattttcttccagactttgggttccacgcggcgcccggccttttccttgccacagatctcattctcttgagcccgccttggacaataacgggcgtgtcggccatgggcctgagtcaggcgctggcgttctcgtattggtactgggttgaatactgcttctctaagaatggctggtacccttatcccatatttgatcttcttagcacttggcagcgtgccgccttgttcaccgtgtcagcaattttgatgacaggtagcactctgctactcaaaaggctgtatgcgtgggtcaatggaggcgatgacccgttaagtggatccgatataaacgcacgaagacgccgcccgaaagtataacgacactactcgcgagtttctcatcgttgaatgcatgggtgcggatatataatgcgactcgtaacacatatatcatctccgaggcagttgccgaaattccttcgaaagcttcgacgtgacctccagagataccatgtcaaaaaattgagatcaacgtctcgaattcttcgcttccaccacgatttgccaggacagtagacgataccgctggtcaatacgcgggtatactgtgtcaaatgtagctttcctacaggaggcgggttcaacggtgttacacaggcgaacaggcgagcaggcatactactaaagtgcatgccgtgggtacagatagaaagtgacttatcgattggacaagtcgtcgaacacccggagcattggacaagtttaatgccaaaaaaaaaagggccaacaacccctcccccaccaccagttcaccccacctcacaaggtcgagtcacaatccatagtagctccaggactttgtaaatagcttctcgacactgttttcccccgtcacaagttaggcgtacaggttaagcttagactgctgctgtctagctaatcatttagttatagacacacttcgcaactttggacggcgcaattgtcggccggcgatctactccgcgggcgtgagagggactacctgttagctgtcccgtcccttcccatccgatcatgtcgagcttcttcatcgagaaccctcatctgggcaacaagacgaccaacgaggattggcgcattcgtggctacaaccctctcaccgcccccgacgtcctgcagcacgagatcccccagacccccaactccaaggacaccgtgctggcaagccgcgaggaggccgtcgccgtcgtcaatggcaccgacgagaagcagagactgctcgtcatcgttggcccctgctccatacacgacccccacgccgccctcgagtactgcgatctcttgctgaaggagaaggctaggcaccgggatgagctgctcattgtgatgcgtgcctacttggagaagccgaggacgacggtcggctggaagggcctcatcaacgaccccgacatcgacaacagcttcaagatcaacaagggactgcgcatgtcgaggcagctcttcgtcgacttgaccgacaagggcatgcccatcgcaagcgagatgctcgacaccatctcgccccagttcctggccgatctcctgtccgccggtgccgtcggcgccaggaccacagagagtcagctgcacagagagctggccagcggtctctcttttcccgtcggcttcaagaatggcaccgacggcaccctcggcgttgccatcgatgctattggcgccgtcaagcacccccaccacttcctgtccgtcacaaagcccggcgtggttgctgtcgttggcaccgccggaaacgaggactgtttcgtcatcctccgaggcggcaagcgcggcacaaattacgatgcgaagagcatacaagaggccaaagaagccctgcagagggctggggttgcgcaacgcctcatggtcgactgcagccacggaaattccgaaaagaaccacagcaaccagcccaaagtagctgccagcatagcggagcagcttgctaaaggcgaacacggcataatgggggtaatgatagaaagcaatatcaatgaaggcaaccaaaaggtacccaaacaaggcaaggaaggactcaagtacggggtgagcataaccgatgcttgtatcggttggcaggacacagttgcggtcctcgactcgctggcaaatgccgtcaaggagcggaggaaaacagccagcacatagacaggagtacctatgttgcataagtcggtagctgtgttgtactactttcacccgtactcggaactactttgaaggctgtcatgtcggcaaaacaaaccaggcgcggcgcccgggggagggggggggggatgaaaacaaaatatgccgcattgggctcaatgtgtatgattaagcgtagaatgaacggggtctgtctaccatgaagctagccagattagcacaataactggactgaatctttcccgcatctaaaacccgcaaatcggagcttgcttgccactatgtgtctacgagtagcatttcatagcaaaaggtacgtgtataatacctggtctctacgcttatagcaacctcaagcctcgatgcgcagtgctctacacacaccagatgagttcagctgacatgccgggcagtttgtagagacattattttctcattattgtcgacgttccttagcgagctcggtgctttagtcctcgagcagagataatcaggctgtctccgccaatatcttcagaccccccgtatcatcgtacccaactctccctttctgcacggcattgtacaagtcagccgataagacctctctctcgcctgtctcggggtcccattcccatccttcttgcatccatttccagcgcagacaagctcgtaactctttatcctgaggtaggactcgcatccactcaggttggaatgacccatcacgtcctcgacctttccagtccgatgcaacaccccgcaacgcatcacggcagaagatgcgccagctgtcaatggcgtacggtccgttcgtaatctgtaggcggtcagaatgtagatacaggtgagacgctcgggtcccatatacgacggggaacggaggagtccgtactgtagtccgtatcagcttcataatacgcttaattctacctagcaaaatctcgtgaaggcaatgaggcaggttgacacaccgtgaccgatttcccatcctgaagcgcgcgtgtctccatcttcaagcatttccccagccttgacgtccgcaccatctctgagacggggataattcttgacaccatagcgcacgccgtttcgaggtggattttccatccatacgcgcgcgtatctctgctaatagccagaaagatatgttagttatctcccaagattcatattaatgggcgtggtccagatcgcgagacaaatatgtgactttaactgtccgacgagtctccgattatacttactatatataatttagtatactgtctcaggagtgaggtaggaatgactaccgcaggacgtattcacacataccgatggccgcggtgcgaacaacaccgagtcctagatgttgaatcatcacaagcacgtcgtgagaatctgcctccgcgagagctcggggtgtagggtatctcttcatcaatgctcggaaaactggaatcgctgtcttccctgctgtgcgaatgaggaatgtgaccgcaattaatagccagaaaggatcatgggcaagttcttcctgtatgagcccaaactctggcgcatcgagccggggaaacggtatggatgatactatacccctaggtggccgtgaatttcttggtgacttcgaggggctctcgttgtgaaagaatggcgactttgatacgcgtttcgttggctgcttctgcggcgatgaacctttggtatcaccagccatcgggcaagttgcgaatcttgcatcctcacccgtttccgcatcctcagaattgagatccgaaccctccggaaacgatctatgaatgagaacatgaggcaatggcgggcctgcatttatcacggtatcttccgctacttggcccgtcgtagtttctacagaagcttgatggtgaccggcggggccgtcctgaaagcaccgagcgtccaaacgagtgacaggctggacatcatcagatccattgtgactgtgttgacttggtggcaatcggagggagacgtgctcatctaaagcatacattcctacagccagtgatccgggcacagcgggctccgaaacacgttttggtggtttccgaggctgccgatgcgtattgtcaatctcggcatcgtatttgctggcatttcgattggtgtgatgccagtatggagatatggcctttggcgtggccttttgatcttttttgacgcgtgttgtgactaggctctccgaggcaggcgtcgtatcattgtctctgcaatcattcttcttgcgtggcttacggagatgccttgaatgaaccgctctaggcggccccttttgagtatcggtatcgccaacggcaggcgagagcccataaacttttgccaggaatgtcagagcatcgttcccttcaagcaagtcgctggatgggtcttgctcttgcagcgacttgccacaacacatggcttgctcccattgctcaaccccttgaagaacactaagctgtaagaactcgttgatgtcttccgcgtcacccacgccgtcaatgataagcccagctaggaattgcctctcatcgtcgtctttgacgccgccaaaaccgaacatcaggtcgtgagccaggatctcggctgcagactgagcttgactgtcgtcttcatacgatgccatcatcgcggcgcaaagcgcaaaggatgaatcgagcgatgactatctgggcgcaagcgcacacgccatagaggcgaatgaagagcgccaatgggttccgtctggctcggcttgatcctgcttagtgaattaattgcgtcgcatagaatgggcgggataatgggctgtaggactaagatcacttgaacaagtgtatgcacatatctagtcaacagagggcttcgcgagatccaaccatcagtgttgtgtgatagggttgaatgtttgaatggcacatacctagcaagtcccggctattcaaagcgtacatgtctagaatttggcggggcggaacaggacca

SEQ ID NO: 26664 - DNA, 2073 bp, Muscodor strobelii
  misc_feature: SGI cDNA ID NO. 569122
  misc_feature: Encodes the peptide sequence at SEQ ID NO 26665
atgccagcggcgtgccacacaatcgagaaccgcctacaagatgagaaagacgcgcccgaacgaaatagaggaaaggatttggtctcgaacctccgttcatctattccacctaaccatcccagagttcggcctctgggccagcaacttccaccgccggccggccacatcctttcgttcgacctcctgcttcgtgatcgtgcgactaccggcgacatggccgatactgctagcaagcgcagccacgacgagtttgtcgacaatggccccgaagatgagagctcctccgacgatgacatgggtcctcggctgccctcggcggctgcgcccaagaagaaacgacgcgtcctgccctacgagaagctctacgtcgacgctctgcccaagggcgcccgctactccaagtccctgatgcacaaggagcaactgtccttcgtcaccgtcacccgcaccgaattcctcatcaccagctccgccgatggcgtcgtcaagttttggaagaagattgcccagggcatcgagttcgtcaaggagttcaaggcccatcagggcgacatccgctccgtctccgccagccatgatggctccagctttgccaccgccggcgccgacaagaccatcaagatattcgatgtcatcaccttcgacctcctagccatgctagccttagaatttgtgcccaagtgtgtctgctgggttcacaagcgtgggtcttcgctgcccctgcttgccgtatccgacgccgagaagccgctgattcatatctacgatggtcgcggggaggacccggcacctctgcacaccatcaaaggcttgcaccggaatgttgtctcggccatggcttttaacgatccctgcgactgtgtcatctcagccgacgacggcggcatggtcgaatactggtcgccaaatgctcactacgaaaagcccgagaatgtgttccaatataaaagcgcaacaaatctctttgatttcaaaaaggccaagtcagtgccggtttctctggctgtgtcgccgtcgggccatcaatttgtgtccttctctctgcccgaccgcaagatccgtatattcgacttcatctcggccaagctgtatcgtacatacgacgagtcgcttcaggccatacaggagatgcagcaggccgggacttccgctcagaagttggacgacgtagacttcggcaggaggctagccacagaacgcgagatagaatcgggccccctccgggacaaggtgaatgttatattcgacgagtcaggtcattttattctatacggctccatgatcggagtcaaacttctgaatacacacacaaatcaagtgaccacggtgtacgggaaagatgaacatttacgacctgtcactctagccttatatcaaggtcagccccagaagaagggcgtaacgaccgtggctatggcagcctcaaacaacccgctcttgcaagagtccgaagcacgggacccgatcttattcgccacgtcggtaggcaaacagcgattctacatgtttacgaacgagcaagagatatcccgatcggaacgggacgttcagaatgaaaagccgactttgctcaactccaaaaaagcggcgcaggccagaaaaatagaaacaggtacctcagcggttattcataccagctacggcgacatccatatccgcctgttccctgatgcggcgccgaaagctgtcgaaaacttcgtcacacattcgaaacgaagttactacaatggcaccatatttcatcgagtgatccggaagttcatgatacaaggcggtgacccactgggagatggaactggaggagaaagcatatggggccgtgaattcgaggacgaattcagtacactcaaacatgacaagccttacacagttagtatggccaacgcgggccccaacaccaacggcagccagttctttatcacgacagagaaggcgccgtggttagataacaagcacacggtgtttggcagggccgttcaggggttggatgtcatccataagatagagaatgcgcggacacacaaggaaaagcccgaggaggacatcaagatcctcagtatcgacattacgtag

SEQ ID NO: 26665 - protein, 690 aa, Muscodor strobelii
  misc_feature: SGI Peptide ID NO. 569122
  misc_feature (172)..(210): Pfam Id: PF00400 Pfam Desc: WD domain, G-beta repeat
  misc_feature (540)..(690): Pfam Id: PF00160 Pfam Desc: Cyclophilin type peptidyl-prolyl cis-trans isomerase/CLD
  misc_feature (69)..(690): NCBI GI: 171687977 Blast Desc: protein product [Podospora anserina] gi|170943950|emb|CAP69602.1| protein product [Podospora anserina]
  misc_feature (76)..(689): NCBI GI: 85111068 Blast Desc: NCU09819 [Neurospora crassa OR74A] gi|28925486|gb|EAA34523.1| NCU09819 [Neurospora crassa OR74A]
  misc_feature (76)..(689): NCBI GI: 208658290 Blast Desc: cyclophilin-type peptidyl-prolyl cis-trans isomerase [Beauveria bassiana]
  misc_feature (76)..(689): NCBI GI: 116180258 Blast Desc: conserved [Chaetomium globosum CBS 148.51] gi|88185054|gb|EAQ92522.1| conserved [Chaetomium globosum CBS 148.51]
  misc_feature (71)..(689): NCBI GI: 256734546 Blast Desc: [Nectria haematococca mpVI 77-13-4]
  misc_feature (78)..(689): NCBI GI: 145615645 Blast Desc: MGG_05731 [Magnaporthe grisea 70-15] gi|145022436|gb|EDK06456.1| MGG_05731 [Magnaporthe grisea 70-15]
  misc_feature (71)..(689): NCBI GI: 46107194 Blast Desc: FG00480.1 [Gibberella zeae PH-1]
  misc_feature (90)..(689): NCBI GI: 158534854 Blast Desc: peptidyl-prolyl-cis-trans isomerase [Blumeria graminis f. sp. hordei]
  misc_feature (67)..(690): NCBI GI: 159130407 Blast Desc: peptidyl-prolyl cis-trans isomerase, [Aspergillus fumigatus A1163]
  misc_feature (67)..(690): NCBI GI: 70990152 Blast Desc: peptidyl-prolyl cis-trans isomerase [Aspergillus fumigatus Af293] gi|66847557|gb|EAL87887.1| peptidyl-prolyl cis-trans isomerase, [Aspergillus fumigatus Af293]
  misc_feature (86)..(675): SWISSPROT Homolog: EC 5.2.1.8 Peptidylprolyl isomerase
MPAACHTIENRLQDEKDAPERNRGKDLVSNLRSSIPPNHPRVRPLGQQLPPPAGHILSFDLLLRDRATTGDMADTASKRSHDEFVDNGPEDESSSDDDMGPRLPSAAAPKKKRRVLPYEKLYVDALPKGARYSKSLMHKEQLSFVTVTRTEFLITSSADGVVKFWKKIAQGIEFVKEFKAHQGDIRSVSASHDGSSFATAGADKTIKIFDVITFDLLAMLALEFVPKCVCWVHKRGSSLPLLAVSDAEKPLIHIYDGRGEDPAPLHTIKGLHRNVVSAMAFNDPCDCVISADDGGMVEYWSPNAHYEKPENVFQYKSATNLFDFKKAKSVPVSLAVSPSGHQFVSFSLPDRKIRIFDFISAKLYRTYDESLQAIQEMQQAGTSAQKLDDVDFGRRLATEREIESGPLRDKVNVIFDESGHFILYGSMIGVKLLNTHTNQVTTVYGKDEHLRPVTLALYQGQPQKKGVTTVAMAASNNPLLQESEARDPILFATSVGKQRFYMFTNEQEISRSERDVQNEKPTLLNSKKAAQARKIETGTSAVIHTSYGDIHIRLFPDAAPKAVENFVTHSKRSYYNGTIFHRVIRKFMIQGGDPLGDGTGGESIWGREFEDEFSTLKHDKPYTVSMANAGPNTNGSQFFITTEKAPWLDNKHTVFGRAVQGLDVIHKIENARTHKEKPEEDIKILSIDIT

SEQ ID NO: 26666 - DNA, 6848 bp, Muscodor strobelii
  misc_feature: SGI EST ID NO. CUFF.63016.0
  misc_feature: Variant of the nucleotide sequence at SEQ ID NO 26664
ttccacctaaccatcccagagttcggcctctgggccagcaacttccaccgccggccggccacatcctttcgttcgacctcctgcttcgtgatcgtgcgactaccggcgacatggccgatactgctagcaagcgcagccacgacgagtttgtcgacaatggccccgaagatgagagctcctccgacgatgacatgggtcctcggctgccctcggcggctgcgcccaagaagaaacgacgcgtcctgccctacgagaagctctacgtcgacgctctgcccaagggcgcccgctactccaagtccctgatgcacaaggagcaactgtccttcgtcaccgtcacccgcaccgaattcctcatcaccagctccgccgatggcgtcgtcaagttttggaagaagattgcccagggcatcgagttcgtcaaggagttcaaggcccatcagggcgacatccgctccgtctccgccagccatgatggctccagctttgccaccgccggcgccgacaagaccatcaagatattcgatgtcatcaccttcgacctcctagccatgctagccttagaatttgtgcccaagtgtgtctgctgggttcacaagcgtgggtcttcgctgcccctgcttgccgtatccgacgccgagaagccgctgattcatatctacgatggtcgcggggaggacccggcacctctgcacaccatcaaaggcttgcaccggaatgttgtctcggccatggcttttaacgatccctgcgactgtgtcatctcagccgacgacggcggcatggtcgaatactggtcgccaaatgctcactacgaaaagcccgagaatgtgttccaatataaaagcgcaacaaatctctttgatttcaaaaaggccaagtcagtgccggtttctctggctgtgtcgccgtcgggccatcaatttgtgtccttctctctgcccgaccgcaagatccgtatattcgacttcatctcggccaagctgtatcgtacatacgacgagtcgcttcaggccatacaggagatgcagcaggccgggacttccgctcagaagttggacgacgtagacttcggcaggaggctagccacagaacgcgagatagaatcgggccccctccgggacaaggtgaatgttatattcgacgagtcaggtcattttattctatacggctccatgatcggagtcaaacttctgaatacacacacaaatcaagtgaccacggtgtacgggaaagatgaacatttacgacctgtcactctagccttatatcaaggtcagccccagaagaagggcgtaacgaccgtggctatggcagcctcaaacaacccgctcttgcaagagtccgaagcacgggacccgatcttattcgccacgtcggtaggcaaacagcgattctacatgtttacgaacgagcaagagatatcccgatcggaacgggacgttcagaatgaaaagccgactttgctcaactccaaaaaagcggcgcaggccagaaaaatagaaacaggtacctcagcggttattcataccagctacggcgacatccatatccgcctgttccctgatgcggcgccgaaagctgtcgaaaacttcgtcacacattcgaaacgaagttactacaatggcaccatatttcatcgagtgatccggaagttcatgatacaaggcggtgacccactgggagatggaactggaggagaaagcatatggggccgtgaattcgaggacgaattcagtacactcaaacatgacaagccttacacagttagtatggccaacgcgggccccaacaccaacggcagccagttctttatcacgacagagaaggcgccgtggttagataacaagcacacggtgtttggcagggccgttcaggggttggatgtcatccataagatagagaatgcgcggacacacaaggaaaagcccgaggaggacatcaagatcctcagtatcgacattacgtaggctttttgcacgttagactttggggcagccgtagaattccactagactgagaggttaactgaagtgaattaagcaaatcttctccacaggccactgggtgtcgtaatacatacataccctggaattgcttgacaaattggacaatgtggcagcggtcagagacgagaggcgaatggcgagtcatttgacccaagtaatagatagagagacgcaggtggtcgcacctggccgcccaagcccatcccgtcgatcatctgcttctcgggtatgtcggtattcccgaaatgctatactctgccaagaagtgaaaccactcctcacctgaactccggttatctcaagtccttcgccgcccgtccggcctcactctgttccgcccctgcccggtgaatataccaacgtattctgtaacgtgccccgtctatctggatcattatcatcttcccgtccgcccttcgtttcgaagaacaagcaaataacatttttgcttacgctcagttaatggcgatcacttcttgactcgccagattctcgtgggcttagagacatatcaaaaactgtcaccagattgcagaaattcattcaacgccggggatctggaggttggtttgctttttgaccatgactggccaccagctatcgcgcaagggattcatctgcactcgtctggcaatcagttgtccatagtcgctgtgctcctgtgaaatcgcactgccctcttgtatcatgccacgaccaagaaagagtgacgcgcctgaacccaagcgacgcagtcgaaatggatgctggccatgtaagaatcgaaaggtcaaatgcggagaggagcatccggcatgtctgaactgtcagagaacgggcgagacatgtgattatagcatacggctaaattgggatgggcggagaggcaagcaagccgatgcaaatctggttgatacgagccaagcggccatctctgccatcccagccaggggttttaagcttgttcaccaggatttacaatcagataatcgcgccgcccggagactcgaacccctgaccaacacttttagtcagttggaatctttcagcaaagcttctccttctcagactgggcttgaaactgcagacagtccagcctcgtccgcacgtgaatcagatcggcctcctagtaaaagagccagactgaatgacacatcgtataccgaatacgagagacggccgtactcttctcacagctctgtgttggattccactacgacaacacgaagaccgcctgtaagctccaatgcatctgccgcctcgccattgactcccgccacatcctcaacatacagtgacgatgagtatcgccaaccgcaccgcacggaacataacactaccaagatgtctgtgagttctttgctagctgggcccccaagccttcgagccttgtatggcgacggcacgagccatgctagaggtatgttacccccgttagacacacgggtacggaatgcgagcgaaccaacattttacggcatcgaccgaggacttccggactatgatttgggcaagaacgatgacatgaacgcaattggaggatcttcgcctttacttcagagggatatgcgcgacaagggccccgaagtggctggagaagagtactcctggaacgagtttggtttcggcgtggaaaccaatgattccgacgatccaagtggtggatactattccaagccagtgtctatttgcgtgagtaatctatatattggatattagggccttaagcatgaacaccggacatctacaatttgtctaagtgtctaacgaatgtggaattttccttatcactagatacctaggaatctagaaccccttcctctgaaacttgtagaaaaccctatgaacctgctcgtgagcaaagccgcagtatctcatcccattcatgcgctgacgttggtagtattttgtatgctagtgtaccagcggatgctttgtctatcgtagctcacagtgttagcatcatttcttgaaccatactgcgcgagttctcgttccgtacgatgacccccacgccaatccttttcgtacgatactgcctcagatggctgtgaggaacgataatttactggctttactattagcatattctgcatcacatcgcgctcgtgttttgaaccacaaagagccaacattgagaatcgcattctgggttgatgatatatttcccaccctccgcgaagctctcaacgaccctgatcggaacttttcgaacgctaaccttgctactgctataatgcttgcgtcgctggatatcatttctcctcaagtttttggatacgatattccttggcagagacatcttagtcttgcgcgagaggtcattatggttcggcctggtgggttgcgtggcttccaccagaattttcgccaggatcccatttgctcctttctctggagctgggctgcttatttagatgtaattgggagcctgagcgggggaccaaaagatgcctcctcagcatggatatttgactatgaacttgacgatattgacgatggatacgacgaaattgattgtattatggggttcacgacacgatgcgtctaccttttatcaaaaatcgcagaccttgcacgcaagtgcgatgccgagcgaatcgacgaagagaggaatatacgcagagagtggcaaccaagtcatgaaattgctgaacaagcagctaagcttgagttggcagtgagagaatcaatggtgcaacaaccagtcccttgtaaacatatccacactgagggcgacatcgaaaaatgggattcggaaggattaggcgcgaccaactcggcattccactgggctgcactcgttcacttgtatcgtcgtgtaatggggagaaagtccgaagatgagactgttcagcaagccgtagaagagattatatcgtgtcttggtcgtattcaactaggcggaacggccgaatcctgcctcttgttccccatgttcacggcaggttgtgacacacagagcgagtcacatagagccctgatactcagccgtttcatgtccgctgaaaaccatggcatgacgcaggtgagcttttcgatcctcgatcctggatatgcccgccctggaaataaggtgcacaatgcccgtcgtctgatgcaaagagtatgggagactgagaagccgtgggagacacttgtcagcacggagttcattggatgaaatggtttgcctctgatgaaatggattcgatcctacaacgcgagaactcaaactgcgtgcctatctatttatcttgacatgtatggtgtggcacgtattatatactttaagtagcttgtcacaccaagtgaagatctcaaggtacgtgccaaaggctgaagcacgtgaagggtttgtgtggatagatacctgtattgcactcgccctgaacccacttgaattgtgtttgtgctggatatacacaggatgaccagaaaatgatgaagattacacagtcatcgatacaagttacatgtatgcactagagacatcttcaaaggctcgatttcgtatctccgccatatgagatcctcctcaaatttgccttgttcagttctgccacacttttgataccagccaggcccatggtcacatccacttcagctaatagtgaagccaagatatgtttcgcgccctcctttccgccaattcctagcccgtacatgatcggccgaccaactagcacggcctcagcaccaagacttagtgcctttatgatatcggcacctgtccggatgccagagtcgaagaggattgtcattttactccccactgccttgacgatgtcaggcagcactagaatactaaggttagttcccgtgaaccgcaaggggcggagcaaatatcaaaatggtaacaggctcgcaggacatgtctcatataaccgtgcatcccttcgttgtgcagatgtgcacagcaagtaacaacaggaacgactgaacacttactatccagcgcacccacagaaccatcgatatttcggccgccatggttgcttacgattatgccgtcaacaccatgttgacatgccagttctgcatcttcaggatgtagaatccccttgagaagtagtgggccctgtatcgcttgtgcattagtcccatcctcaaggtgcatcatttaagcatttgaatctcttccacctcgagagctaagcccctctctcgaggatgaccccttagaatcgaatattcgaagtgaacgaaacaacgtgggtgaacttgggagcgtttcttacatcccatagttggcgcaagactttaagatgttcccacgaatggctatcgccggagaacgcttcgctgacccagtaccttgaggcaacaatgacgctatcctcaggtgaatctccgtcgttctgctccgcaaattttcgacgaaacacagggtcctcaaatgcgatacggttaccctggccggtcatgaaggggagaaaagagcagtcaagatctgccggcctccaagccatcgtggccgtgtccagtgtcacaaccactgcaaaaactcacgttagtagccactctccatgagaaatttctgaatgtcttccgccatagctctgaatttttagagcatgtccattgagcgcttgctccagagggtagaaaaactggctccgcaacctttcttgaacaagtagacgtaaacccctaaaatcgcttacgggccgtgaagccggatgctcttgctgtcttgagaatcgaggcggttatctcatcatccatgggccagtatagctggaaccaacgtggctgctcaccacaggctgcagcaacctctggaatactactggtggacgccgtgctgaggacaaaaggcacccgaagttcggcgcaggctgatgccgtcccgatttccttatctttgtgatatacttc

SEQ ID NO: 26667 - DNA, 2235 bp, Muscodor strobelii
  misc_feature: SGI cDNA ID NO. 569123
  misc_feature: Encodes the peptide sequence at SEQ ID NO 26668
atgccacgaccaagaaagagtgacgcgcctgaacccaagcgacgcagtcgaaatggatgctggccatgtaagaatcgaaaggtcaaatgcggagaggagcatccggcatgtctgaactgtcagagaacgggcgagacatgtgattatagcatacggctaaattgggatgggcggagaggcaagcaagccgatgcaaatctggttgatacgagccaagcggccatctctgccatcccagccaggggttttaagcttgttcaccaggatttacaatcagataatcgcgccgcccggagactcgaacccctgaccaacacttttagtcagttggaatctttcagcaaagcttctccttctcagactgggcttgaaactgcagacagtccagcctcgtccgcacgtgaatcagatcggcctcctagtaaaagagccagactgaatgacacatcgtataccgaatacgagagacggccgtactcttctcacagctctgtgttggattccactacgacaacacgaagaccgcctgtaagctccaatgcatctgccgcctcgccattgactcccgccacatcctcaacatacagtgacgatgagtatcgccaaccgcaccgcacggaacataacactaccaagatgtctgtgagttctttgctagctgggcccccaagccttcgagccttgtatggcgacggcacgagccatgctagaggtatgttacccccgttagacacacgggtacggaatgcgagcgaaccaacattttacggcatcgaccgaggacttccggactatgatttgggcaagaacgatgacatgaacgcaattggaggatcttcgcctttacttcagagggatatgcgcgacaagggccccgaagtggctggagaagagtactcctggaacgagtttggtttcggcgtggaaaccaatgattccgacgatccaagtggtggatactattccaagccagtgtctatttgcgaaaaccctatgaacctgctcgtgagcaaagccgcagtatctcatcccattcatgcgctgacgttggtagtattttttctcgttccgtacgatgacccccacgccaatccttttcgtacgatactgcctcagatggctgtgaggaacgataatttactggctttactattagcatattctgcatcacatcgcgctcgtgttttgaaccacaaagagccaacattgagaatcgcattctgggttgatgatatatttcccaccctccgcgaagctctcaacgaccctgatcggaacttttcgaacgctaaccttgctactgctataatgcttgcgtcgctggatatcatttctcctcaagtttttggatacgatattccttggcagagacatcttagtcttgcgcgagaggtcattatggttcggcctggtgggttgcgtggcttccaccagaattttcgccaggatcccatttgctcctttctctggagctgggctgcttatttagatgtaattgggagcctgagcgggggaccaaaagatgcctcctcagcatggatatttgactatgaacttgacgatattgacgatggatacgacgaaattgattgtattatggggttcacgacacgatgcgtctaccttttatcaaaaatcgcagaccttgcacgcaagtgcgatgccgagcgaatcgacgaagagaggaatatacgcagagagtggcaaccaagtcatgaaattgctgaacaagcagctaagcttgagttggcagtgagagaatcaatggtgcaacaaccagtcccttgtaaacatatccacactgagggcgacatcgaaaaatgggattcggaaggattaggcgcgaccaactcggcattccactgggctgcactcgttcacttgtatcgtcgtgtaatggggagaaagtccgaagatgagactgttcagcaagccgtagaagagattatatcgtgtcttggtcgtattcaactaggcggaacggccgaatcctgcctcttgttccccatgttcacggcaggttgtgacacacagagcgagtcacatagagccctgatactcagccgtttcatgtccgctgaaaaccatggcatgacgcaggtgagcttttcgatcctcgatcctggatatgcccgccctggaaataaggtgcacaatgcccgtcgtctgatgcaaagagtatgggagactgagaagccgtgggagacacttgtcagcacggagttcattggatga

SEQ ID NO: 26668 - protein, 744 aa, Muscodor strobelii
  misc_feature: SGI Peptide ID NO. 569123
  misc_feature (18)..(56): Pfam Id: PF00172 Pfam Desc: Fungal Zn(2)-Cys(6) binuclear cluster domain
  misc_feature (128)..(744): NCBI GI: 154314375 Blast Desc: BC1G_05281 [Botryotinia fuckeliana B05.10] gi|150848926|gb|EDN24119.1| BC1G_05281 [Botryotinia fuckeliana B05.10]
  misc_feature (212)..(744): NCBI GI: 156036222 Blast Desc: SS1G_12799 [Sclerotinia sclerotiorum 1980] gi|154698205|gb|EDN97943.1| SS1G_12799 [Sclerotinia sclerotiorum 1980]
  misc_feature (1)..(744): NCBI GI: 212536540 Blast Desc: C6 finger domain protein, [Penicillium marneffei ATCC 18224] gi|210070825|gb|EEA24915.1| C6 finger domain protein, [Penicillium marneffei ATCC 18224]
  misc_feature (1)..(744): NCBI GI: 242796001 Blast Desc: C6 finger domain protein, [Talaromyces stipitatus ATCC 10500] gi|218719295|gb|EED18715.1| C6 finger domain protein, [Talaromyces stipitatus ATCC 10500]
  misc_feature (1)..(744): NCBI GI: 238843000 Blast Desc: C6 zinc finger domain-containing protein [Microsporum canis CBS 113480]
  misc_feature (254)..(744): NCBI GI: 189193991 Blast Desc: C6 zinc finger domain containing protein [Pyrenophora tritici-repentis Pt-1C-BFP] gi|187978898|gb|EDU45524.1| C6 zinc finger domain containing protein [Pyrenophora tritici-repentis
  misc_feature (391)..(744): NCBI GI: 145615623 Blast Desc: MGG_05724 [Magnaporthe grisea 70-15] gi|145022424|gb|EDK06444.1| MGG_05724 [Magnaporthe grisea 70-15]
  misc_feature (381)..(744): NCBI GI: 169601712 Blast Desc: SNOG_03728 [Phaeosphaeria nodorum SN15] gi|160705998|gb|EAT88933.2| SNOG_03728 [Phaeosphaeria nodorum SN15]
  misc_feature (256)..(744): NCBI GI: 121703385 Blast Desc: C6 zinc finger domain protein [Aspergillus clavatus NRRL 1] gi|119398100|gb|EAW08531.1| C6 zinc finger domain protein [Aspergillus clavatus NRRL 1]
  misc_feature (256)..(744): NCBI GI: 259489387 Blast Desc: TPA: C6 finger domain protein, (AFU_orthologue; AFUA_1G01850) [Aspergillus nidulans FGSC A4]
MPRPRKSDAPEPKRRSRNGCWPCKNRKVKCGEEHPACLNCQRTGETCDYSIRLNWDGRRGKQADANLVDTSQAAISAIPARGFKLVHQDLQSDNRAARRLEPLTNTFSQLESFSKASPSQTGLETADSPASSARESDRPPSKRARLNDTSYTEYERRPYSSHSSVLDSTTTTRRPPVSSNASAASPLTPATSSTYSDDEYRQPHRTEHNTTKMSVSSLLAGPPSLRALYGDGTSHARGMLPPLDTRVRNASEPTFYGIDRGLPDYDLGKNDDMNAIGGSSPLLQRDMRDKGPEVAGEEYSWNEFGFGVETNDSDDPSGGYYSKPVSICENPMNLLVSKAAVSHPIHALTLVVFFLVPYDDPHANPFRTILPQMAVRNDNLLALLLAYSASHRARVLNHKEPTLRIAFWVDDIFPTLREALNDPDRNFSNANLATAIMLASLDIISPQVFGYDIPWQRHLSLAREVIMVRPGGLRGFHQNFRQDPICSFLWSWAAYLDVIGSLSGGPKDASSAWIFDYELDDIDDGYDEIDCIMGFTTRCVYLLSKIADLARKCDAERIDEERNIRREWQPSHEIAEQAAKLELAVRESMVQQPVPCKHIHTEGDIEKWDSEGLGATNSAFHWAALVHLYRRVMGRKSEDETVQQAVEEIISCLGRIQLGGTAESCLLFPMFTAGCDTQSESHRALILSRFMSAENHGMTQVSFSILDPGYARPGNKVHNARRLMQRVWETEKPWETLVSTEFIG

SEQ ID NO: 26669 - DNA, 6848 bp, Muscodor strobelii; identical to SEQ ID NO: 26666
  misc_feature: SGI EST ID NO. CUFF.63016.0
  misc_feature: Variant of the nucleotide sequence at SEQ ID NO 26667

SEQ ID NO: 26670 - DNA, 2178 bp, Muscodor strobelii
  misc_feature: SGI cDNA ID NO. 569124
  misc_feature: Encodes the peptide sequence at SEQ ID NO 26671
atgccacgaccaagaaagagtgacgcgcctgaacccaagcgacgcagtcgaaatggatgctggccatgtaagaatcgaaaggtcaaatgcggagaggagcatccggcatgtctgaactgtcagagaacgggcgagacatgtgattatagcatacggctaaattgggatgggcggagaggcaagcaagccgatgcaaatctggttgatacgagccaagcggccatctctgccatcccagccaggggttttaagcttgttcaccaggatttacaatcagataatcgcgccgcccggagactcgaacccctgaccaacacttttagtcagttggaatctttcagcaaagcttctccttctcagactgggcttgaaactgcagacagtccagcctcgtccgcacgtgaatcagatcggcctcctagtaaaagagccagactgaatgacacatcgtataccgaatacgagagacggccgtactcttctcacagctctgtgttggattccactacgacaacacgaagaccgcctgtaagctccaatgcatctgccgcctcgccattgactcccgccacatcctcaacatacagtgacgatgagtatcgccaaccgcaccgcacggaacataacactaccaagatgtctgtgagttctttgctagctgggcccccaagccttcgagccttgtatggcgacggcacgagccatgctagaggtatgttacccccgttagacacacgggtacggaatgcgagcgaaccaacattttacggcatcgaccgaggacttccggactatgatttgggcaagaacgatgacatgaacgcaattggaggatcttcgcctttacttcagagggatatgcgcgacaagggccccgaagtggctggagaagagtactcctggaacgagtttggtttcggcgtggaaaccaatgattccgacgatccaagtggtggatactattccaagccagtgtctatttgcgaaaaccctatgaacctgctcgtgagcaaagccgcagtatctcatcccattcatgcgctgacgttggtagtattttttctcgttccgtacgatgacccccacgccaatccttttctcttggtagcatcacatcgcgctcgtgttttgaaccacaaagagccaacattgagaatcgcattctgggttgatgatatatttcccaccctccgcgaagctctcaacgaccctgatcggaacttttcgaacgctaaccttgctactgctataatgcttgcgtcgctggatatcatttctcctcaagtttttggatacgatattccttggcagagacatcttagtcttgcgcgagaggtcattatggttcggcctggtgggttgcgtggcttccaccagaattttcgccaggatcccatttgctcctttctctggagctgggctgcttatttagatgtaattgggagcctgagcgggggaccaaaagatgcctcctcagcatggatatttgactatgaacttgacgatattgacgatggatacgacgaaattgattgtattatggggttcacgacacgatgcgtctaccttttatcaaaaatcgcagaccttgcacgcaagtgcgatgccgagcgaatcgacgaagagaggaatatacgcagagagtggcaaccaagtcatgaaattgctgaacaagcagctaagcttgagttggcagtgagagaatcaatggtgcaacaaccagtcccttgtaaacatatccacactgagggcgacatcgaaaaatgggattcggaaggattaggcgcgaccaactcggcattccactgggctgcactcgttcacttgtatcgtcgtgtaatggggagaaagtccgaagatgagactgttcagcaagccgtagaagagattatatcgtgtcttggtcgtattcaactaggcggaacggccgaatcctgcctcttgttccccatgttcacggcaggttgtgacacacagagcgagtcacatagagccctgatactcagccgtttcatgtccgctgaaaaccatggcatgacgcaggtgagcttttcgatcctcgatcctggatatgcccgccctggaaataaggtgcacaatgcccgtcgtctgatgcaaagagtatgggagactgagaagccgtgggagacacttgtcagcacggagttcattggatga

SEQ ID NO: 26671 - protein, 725 aa, Muscodor strobelii
  misc_feature: SGI Peptide ID NO. 569124
  misc_feature (18)..(56): Pfam Id: PF00172 Pfam Desc: Fungal Zn(2)-Cys(6) binuclear cluster domain
  misc_feature (128)..(725): NCBI GI: 154314375 Blast Desc: BC1G_05281 [Botryotinia fuckeliana B05.10] gi|150848926|gb|EDN24119.1| BC1G_05281 [Botryotinia fuckeliana B05.10]
  misc_feature (212)..(725): NCBI GI: 156036222 Blast Desc: SS1G_12799 [Sclerotinia sclerotiorum 1980] gi|154698205|gb|EDN97943.1| SS1G_12799 [Sclerotinia sclerotiorum 1980]
  misc_feature (1)..(725): NCBI GI: 212536540 Blast Desc: C6 finger domain protein, [Penicillium marneffei ATCC 18224] gi|210070825|gb|EEA24915.1| C6 finger domain protein, [Penicillium marneffei ATCC 18224]
  misc_feature (1)..(725): NCBI GI: 242796001 Blast Desc: C6 finger domain protein, [Talaromyces stipitatus ATCC 10500] gi|218719295|gb|EED18715.1| C6 finger domain protein, [Talaromyces stipitatus ATCC 10500]
  misc_feature (1)..(725): NCBI GI: 238843000 Blast Desc: C6 zinc finger domain-containing protein [Microsporum canis CBS 113480]
  misc_feature (372)..(725): NCBI GI: 145615623 Blast Desc: MGG_05724 [Magnaporthe grisea 70-15] gi|145022424|gb|EDK06444.1| MGG_05724 [Magnaporthe grisea 70-15]
  misc_feature (254)..(725): NCBI GI: 189193991 Blast Desc: C6 zinc finger domain containing protein [Pyrenophora tritici-repentis Pt-1C-BFP] gi|187978898|gb|EDU45524.1| C6 zinc finger domain containing protein [Pyrenophora tritici-repentis
  misc_feature (370)..(725): NCBI GI: 169601712 Blast Desc: SNOG_03728 [Phaeosphaeria nodorum SN15] gi|160705998|gb|EAT88933.2| SNOG_03728 [Phaeosphaeria nodorum SN15]
  misc_feature (256)..(725): NCBI GI: 121703385 Blast Desc: C6 zinc finger domain protein [Aspergillus clavatus NRRL 1] gi|119398100|gb|EAW08531.1| C6 zinc finger domain protein [Aspergillus clavatus NRRL 1]
  misc_feature (256)..(725): NCBI GI: 145229511 Blast Desc: An01g06390 [Aspergillus niger] gi|134055172|emb|CAK43759.1| protein product [Aspergillus niger]
MPRPRKSDAPEPKRRSRNGCWPCKNRKVKCGEEHPACLNCQRTGETCDYSIRLNWDGRRGKQADANLVDTSQAAISAIPARGFKLVHQDLQSDNRAARRLEPLTNTFSQLESFSKASPSQTGLETADSPASSARESDRPPSKRARLNDTSYTEYERRPYSSHSSVLDSTTTTRRPPVSSNASAASPLTPATSSTYSDDEYRQPHRTEHNTTKMSVSSLLAGPPSLRALYGDGTSHARGMLPPLDTRVRNASEPTFYGIDRGLPDYDLGKNDDMNAIGGSSPLLQRDMRDKGPEVAGEEYSWNEFGFGVETNDSDDPSGGYYSKPVSICENPMNLLVSKAAVSHPIHALTLVVFFLVPYDDPHANPFLLVASHRARVLNHKEPTLRIAFWVDDIFPTLREALNDPDRNFSNANLATAIMLASLDIISPQVFGYDIPWQRHLSLAREVIMVRPGGLRGFHQNFRQDPICSFLWSWAAYLDVIGSLSGGPKDASSAWIFDYELDDIDDGYDEIDCIMGFTTRCVYLLSKIADLARKCDAERIDEERNIRREWQPSHEIAEQAAKLELAVRESMVQQPVPCKHIHTEGDIEKWDSEGLGATNSAFHWAALVHLYRRVMGRKSEDETVQQAVEEIISCLGRIQLGGTAESCLLFPMFTAGCDTQSESHRALILSRFMSAENHGMTQVSFSILDPGYARPGNKVHNARRLMQRVWETEKPWETLVSTEFIG

SEQ ID NO: 26672 - DNA, 6848 bp, Muscodor strobelii; identical to SEQ ID NO: 26666
  misc_feature: SGI EST ID NO. CUFF.63016.0
  misc_feature: Variant of the nucleotide sequence at SEQ ID NO 26670

SEQ ID NO: 26673 - DNA, 2130 bp, Muscodor strobelii
  misc_feature: SGI cDNA ID NO. 569125
  misc_feature: Encodes the peptide sequence at SEQ ID NO 26674
atgccacgaccaagaaagagtgacgcgcctgaacccaagcgacgcagtcgaaatggatgctggccatgtaagaatcgaaaggtcaaatgcggagaggagcatccggcatgtctgaactgtcagagaacgggcgagacatgtgattatagcatacggctaaattgggatgggcggagaggcaagcaagccgatgcaaatctggttgatacgagccaagcggccatctctgccatcccagccaggggttttaagcttgttcaccaggatttacaatcagataatcgcgccgcccggagactcgaacccctgaccaacacttttagtcagttggaatctttcagcaaagcttctccttctcagactgggcttgaaactgcagacagtccagcctcgtccgcacgtgaatcagatcggcctcctagtaaaagagccagactgaatgacacatcgtataccgaatacgagagacggccgtactcttctcacagctctgtgttggattccactacgacaacacgaagaccgcctgtaagctccaatgcatctgccgcctcgccattgactcccgccacatcctcaacatacagtgacgatgagtatcgccaaccgcaccgcacggaacataacactaccaagatgtctgtgagttctttgctagctgggcccccaagccttcgagccttgtatggcgacggcacgagccatgctagaggtatgttacccccgttagacacacgggtacggaatgcgagcgaaccaacattttacggcatcgaccgaggacttccggactatgatttgggcaagaacgatgacatgaacgcaattggaggatcttcgcctttacttcagagggatatgcgcgacaagggccccgaagtggctggagaagagtactcctggaacgagtttggtttcggcgtggaaaccaatgattccgacgatccaagtggtggatactattccaagccagtgtctatttgcgaaaaccctatgaacctgctcgtgagcaaagccgcagtatctcatcccattcatgcgctgacgttggtagtattttttctcgttccgtacgatgacccccacgccaatccttttctcttggtagcatcacatcgcgctcgtgttttgaaccacaaagagccaacattgagaatcgcattctgggttgatgatatatttcccaccctccgcgaagctctcaacgaccctgatcggaacttttcgaacgctaaccttgctactgctataatgcttgcgtcgctggatatcatttctcctcaagtttttggatacgatattccttggcagagacatcttagtcttgcgcgagaggtcattatggttcggcctggtgggttgcgtggcttccaccagaattttcgccaggatcccatttgctcctttctctggagctgggctgcttatttagatgtaattgggagcctgagcgggggaccaaaagatgcctcctcagcatggatatttgactatgaacttgacgatattgacgatggatacgacgaaattgattgtattatggggttcacgacacgatgcgtctaccttttatcaaaaatcgcagaccttgcacgcaagtgcgatgccgagcgaatcgacgaagagaggaatatacgcagagagtggcaaccaagtcatgaaattgctgaacaagcagctaagcttgagttggcagtgagagaatcaatggtgcaacaaccagtcccttgtaaacatatccacactgagggcgacatcgaaaaatgggattcggaaggattaggcgcgaccaactcggcattccactgggctgcactcgttcacttgtatcgtcgtgtaatggggagaaagtccgaagatgagactgttcagcaagccgtagaagagattatatcgtgtcttggtcgtattcaactaggcggaacggccgaatcctgcctcttgttccccatgttcacggcaggttgtgacacacagagcgagtcacatagagccctgatactcagccgtttcatgtccgctgaaaaccatggcatgacgcaggtgcacaatgcccgtcgtctgatgcaaagagtatgggagactgagaagccgtgggagacacttgtcagcacggagttcattggatga

SEQ ID NO: 26674 - protein, 709 aa, Muscodor strobelii
  misc_feature: SGI Peptide ID NO. 569125
  misc_feature (18)..(56): Pfam Id: PF00172 Pfam Desc: Fungal Zn(2)-Cys(6) binuclear cluster domain
  misc_feature (128)..(709): NCBI GI: 154314375 Blast Desc: BC1G_05281 [Botryotinia fuckeliana B05.10] gi|150848926|gb|EDN24119.1| BC1G_05281 [Botryotinia fuckeliana B05.10]
  misc_feature (212)..(709): NCBI GI: 156036222 Blast Desc: SS1G_12799 [Sclerotinia sclerotiorum 1980] gi|154698205|gb|EDN97943.1| SS1G_12799 [Sclerotinia sclerotiorum 1980]
  misc_feature (1)..(709): NCBI GI: 212536540 Blast Desc: C6 finger domain protein, [Penicillium marneffei ATCC 18224] gi|210070825|gb|EEA24915.1| C6 finger domain protein, [Penicillium marneffei ATCC 18224]
  misc_feature (1)..(709): NCBI GI: 242796001 Blast Desc: C6 finger domain protein, [Talaromyces stipitatus ATCC 10500] gi|218719295|gb|EED18715.1| C6 finger domain protein, [Talaromyces stipitatus ATCC 10500]
  misc_feature (1)..(709): NCBI GI: 238843000 Blast Desc: C6 zinc finger domain-containing protein [Microsporum canis CBS 113480]
  misc_feature (372)..(709): NCBI GI: 145615623 Blast Desc: MGG_05724 [Magnaporthe grisea 70-15] gi|145022424|gb|EDK06444.1| MGG_05724 [Magnaporthe grisea 70-15]
  misc_feature (254)..(709): NCBI GI: 189193991 Blast Desc: C6 zinc finger domain containing protein [Pyrenophora tritici-repentis Pt-1C-BFP] gi|187978898|gb|EDU45524.1| C6 zinc finger domain containing protein [Pyrenophora tritici-repentis
  misc_feature (370)..(709): NCBI GI: 169601712 Blast Desc: SNOG_03728 [Phaeosphaeria nodorum SN15] gi|160705998|gb|EAT88933.2| SNOG_03728 [Phaeosphaeria nodorum SN15]
  misc_feature (256)..(709): NCBI GI: 121703385 Blast Desc: C6 zinc finger domain protein [Aspergillus clavatus NRRL 1] gi|119398100|gb|EAW08531.1| C6 zinc finger domain protein [Aspergillus clavatus NRRL 1]
  misc_feature (256)..(709): NCBI GI: 145229511 Blast Desc: An01g06390 [Aspergillus niger] gi|134055172|emb|CAK43759.1| protein product [Aspergillus niger]
MPRPRKSDAPEPKRRSRNGCWPCKNRKVKCGEEHPACLNCQRTGETCDYSIRLNWDGRRGKQADANLVDTSQAAISAIPARGFKLVHQDLQSDNRAARRLEPLTNTFSQLESFSKASPSQTGLETADSPASSARESDRPPSKRARLNDTSYTEYERRPYSSHSSVLDSTTTTRRPPVSSNASAASPLTPATSSTYSDDEYRQPHRTEHNTTKMSVSSLLAGPPSLRALYGDGTSHARGMLPPLDTRVRNASEPTFYGIDRGLPDYDLGKNDDMNAIGGSSPLLQRDMRDKGPEVAGEEYSWNEFGFGVETNDSDDPSGGYYSKPVSICENPMNLLVSKAAVSHPIHALTLVVFFLVPYDDPHANPFLLVASHRARVLNHKEPTLRIAFWVDDIFPTLREALNDPDRNFSNANLATAIMLASLDIISPQVFGYDIPWQRHLSLAREVIMVRPGGLRGFHQNFRQDPICSFLWSWAAYLDVIGSLSGGPKDASSAWIFDYELDDIDDGYDEIDCIMGFTTRCVYLLSKIADLARKCDAERIDEERNIRREWQPSHEIAEQAAKLELAVRESMVQQPVPCKHIHTEGDIEKWDSEGLGATNSAFHWAALVHLYRRVMGRKSEDETVQQAVEEIISCLGRIQLGGTAESCLLFPMFTAGCDTQSESHRALILSRFMSAENHGMTQVHNARRLMQRVWETEKPWETLVSTEFIG

SEQ ID NO: 26675 - DNA, 6848 bp, Muscodor strobelii; identical to SEQ ID NO: 26666
  misc_feature: SGI EST ID NO. CUFF.63016.0
  misc_feature: Variant of the nucleotide sequence at SEQ ID NO 26673

SEQ ID NO: 26676 - DNA, 1233 bp, Muscodor strobelii
  misc_feature: SGI cDNA ID NO. 569126
  misc_feature: Encodes the peptide sequence at SEQ ID NO 26677
atggcagacgaccaagatgacccgtctccgtacggagagtatcaacatgacttgtacacgcaaggcatcctccacggtgttctacccgtgataacaacagatccaaataagttgagactggaagcgaagagagtaatgccgccacaggcattcaattacataagcggtggcgccggcgagggttctgccatggacgccaatcgcctggcctttcgacaatggaagatcattccgcgaatgctacggcctactgctccccgagacttgtctgtcagtcttttcggacagcggtatgattccccggtactctgtgctcccgttggtgtgcaagaagtatatcacaaagataaggaaatcgggacggcatcagcctgcgccgaacttcgggtgccttttgtcctcagcacggcgtccaccagtagtattccagaggttgctgcagcctgtggtgagcagccacgttggttccagctatactggcccatggatgatgagataaccgcctcgattctcaagacagcaagagcatccggcttcacggccctggttgtgacactggacacggccacgatggcttggaggccggcagatcttgactgctcttttctccccttcatgaccggccagggtaaccgtatcgcatttgaggaccctgtgtttcgtcgaaaatttgcggagcagaacgacggagattcacctgaggatagcgtcattgttgcctcaaggtactgggtcagcgaagcgttctccggcgatagccattcgtgggaacatcttaaagtcttgcgccaactatgggatggcccactacttctcaaggggattctacatcctgaagatgcagaactggcatgtcaacatggtgttgacggcataatcgtaagcaaccatggcggccgaaatatcgatggttctgtgggtgcgctggatatgctgcctgacatcgtcaaggcagtggggagtaaaatgacaatcctcttcgactctggcatccggacaggtgccgatatcataaaggcactaagtcttggtgctgaggccgtgctagttggtcggccgatcatgtacgggctaggaattggcggaaaggagggcgcgaaacatatcttggcttcactattagctgaagtggatgtgaccatgggcctggctggtatcaaaagtgtggcagaactgaacaaggcaaatttgaggaggatctcatatggcggagatacgaaatcgagcctttga

SEQ ID NO: 26677 - protein, 410 aa, Muscodor strobelii
  misc_feature: SGI Peptide ID NO. 569126
  misc_feature (42)..(399): Pfam Id: PF01070 Pfam Desc: FMN-dependent dehydrogenase
  misc_feature (330)..(355): Pfam Id: PF01645 Pfam Desc: Conserved region in glutamate synthase
  misc_feature (4)..(410): NCBI GI: 116180260 Blast Desc: CHGG_00758 [Chaetomium globosum CBS 148.51] gi|88185055|gb|EAQ92523.1| CHGG_00758 [Chaetomium globosum CBS 148.51]
  misc_feature (11)..(409): NCBI GI: 154299055 Blast Desc: BC1G_11840 [Botryotinia fuckeliana B05.10] gi|150857543|gb|EDN32735.1| BC1G_11840 [Botryotinia fuckeliana B05.10]
  misc_feature (8)..(410): NCBI GI: 119467314 Blast Desc: oxidoreductase [Neosartorya fischeri NRRL 181] gi|119405615|gb|EAW15566.1| oxidoreductase [Neosartorya fischeri NRRL 181]
  misc_feature (8)..(410): NCBI GI: 169778897 Blast Desc: [Aspergillus oryzae RIB40] gi|238499483|ref|XP_002380976.1| FMN dependent dehydrogenase, [Aspergillus flavus NRRL3357] gi|83772652|dbj|BAE62780.1| protein
  misc_feature (10)..(410): NCBI GI: 171687979 Blast Desc: protein product [Podospora anserina] gi|170943951|emb|CAP69603.1| protein product [Podospora anserina]
  misc_feature (11)..(410): NCBI GI: 115386656 Blast Desc: ATEG_07183 [Aspergillus terreus NIH2624] gi|114190867|gb|EAU32567.1| ATEG_07183 [Aspergillus terreus NIH2624]
  misc_feature (8)..(410): NCBI GI: 121703992 Blast Desc: oxidoreductase [Aspergillus clavatus NRRL 1] gi|119398404|gb|EAW08834.1| oxidoreductase [Aspergillus clavatus NRRL 1]
  misc_feature (15)..(405): NCBI GI: 156058127 Blast Desc: SS1G_04795 [Sclerotinia sclerotiorum 1980] gi|154702580|gb|EDO02319.1| SS1G_04795 [Sclerotinia sclerotiorum 1980]
  misc_feature (11)..(410): NCBI GI: 255951072 Blast Desc: Pc22g24130 [Penicillium chrysogenum Wisconsin 54-1255] gi|211593320|emb|CAP99701.1| Pc22g24130 [Penicillium chrysogenum Wisconsin 54-1255]
  misc_feature (11)..(410): NCBI GI: 145247258 Blast Desc: An12g08270 [Aspergillus niger] gi|134080611|emb|CAK41277.1| protein product [Aspergillus niger]
  misc_feature (14)..(399): SWISSPROT Homolog: EC 1.13.12.4 Lactate 2-monooxygenase
MADDQDDPSPYGEYQHDLYTQGILHGVLPVITTDPNKLRLEAKRVMPPQAFNYISGGAGEGSAMDANRLAFRQWKIIPRMLRPTAPRDLSVSLFGQRYDSPVLCAPVGVQEVYHKDKEIGTASACAELRVPFVLSTASTSSIPEVAAACGEQPRWFQLYWPMDDEITASILKTARASGFTALVVTLDTATMAWRPADLDCSFLPFMTGQGNRIAFEDPVFRRKFAEQNDGDSPEDSVIVASRYWVSEAFSGDSHSWEHLKVLRQLWDGPLLLKGILHPEDAELACQHGVDGIIVSNHGGRNIDGSVGALDMLPDIVKAVGSKMTILFDSGIRTGADIIKALSLGAEAVLVGRPIMYGLGIGGKEGAKHILASLLAEVDVTMGLAGIKSVAELNKANLRRISYGGDTKSSL

SEQ ID NO: 26678 - DNA, 3658 bp, Muscodor strobelii
  misc_feature: SGI EST ID NO. CUFF.63017.7
  misc_feature: Variant of the nucleotide sequence at SEQ ID NO 26676
atctggcccagttgtggcatggtgaattcccatggtcgttggcctaggtccaggtctagggcgcttagtattacagacaattccgagtggatgacgtgcagggcgggacctcgccgcatttctttccttgcttccgctgtttccgcctttttgccaggcctccccggcctatccccagaaattcgatgcaacaactaatccagacggccgactgctctgtgagcaaccatatttgacaagctttcccagaggcaggccctctttacggaagccacaccaaccactacaatttgacacggctccatcccttctagatgccctcagcttgagctagcggtgacttaggtgctccaaacattatggcaggcaagcaagactgtcatctcagccccgtatctttggagatatacacgactctttcggggcacaccgacataattatttctgcaggggtccatatcatgcgcacatatcgccgtctgcatgtatagagcaacataaattagctctaaacatcttccgtgatctatcgacgttatggcagacgaccaagatgacccgtctccgtacggagagtatcaacatgacttgtacacgcaaggcatcctccacggtgttctacccgtgataacaacagatccaaataagttgagactggaagcgaagagagtaatgccgccacaggcattcaattacataagcggtggcgccggcgagggttctgccatggacgccaatcgcctggcctttcgacaatggaagatcattccgcgaatgctacggcctactgctccccgagacttgtctgtcagtcttttcggacagcggtatgattccccggtactctgtgctcccgttggtgtgcaagaagtatatcacaaagataaggaaatcgggacggcatcagcctgcgccgaacttcgggtgccttttgtcctcagcacggcgtccaccagtagtattccagaggttgctgcagcctgtggtgagcagccacgttggttccagctatactggcccatggatgatgagataaccgcctcgattctcaagacagcaagagcatccggcttcacggccctggttgtgacactggacacggccacgatggcttggaggccggcagatcttgactgctcttttctccccttcatgaccggccagggtaaccgtatcgcatttgaggaccctgtgtttcgtcgaaaatttgcggagcagaacgacggagattcacctgaggatagcgtcattgttgcctcaaggtactgggtcagcgaagcgttctccggcgatagccattcgtgggaacatcttaaagtcttgcgccaactatgggatggcccactacttctcaaggggattctacatcctgaagatgcagaactggcatgtcaacatggtgttgacggcataatcgtaagcaaccatggcggccgaaatatcgatggttctgtgggtgcgctggatatgctgcctgacatcgtcaaggcagtggggagtaaaatgacaatcctcttcgactctggcatccggacaggtgccgatatcataaaggcactaagtcttggtgctgaggccgtgctagttggtcggccgatcatgtacgggctaggaattggcggaaaggagggcgcgaaacatatcttggcttcactattagctgaagtggatgtgaccatgggcctggctggtatcaaaagtgtggcagaactgaacaaggcaaatttgaggaggatctcatatggcggagatacgaaatcgagcctttgaagatgtctctagtgcatacatgtaacttgtatcgatgactgtgtaatcttcatcattttctggtcatcctgtgtatatccagcacaaacacaattcaagtgggttcagggcgagtgcaatacaggtatctatccacacaaacccttcacgtgcttcagcctttggcacgtaccttgagatcttcacttggtgtgacaagctacttaaagtatataatacgtgccacaccatacatgtcaagataaatagataggcacgcagtttgagttctcgcgttgtaggatcgaatccatttcatcagaggcaaaccatttcatccaatgaactccgtgctgacaagtgtctcccacggcttctcagtctcccatactctttgcatcagacgacgggcattgtgcacctacatttcccacgttagaaatgacggaaatggacaagagcagggggagaaaccttatttccagggcgggcatatccaggatcgaggatcgaaaagctcacctgcgtcatgccatggttttcagcggacatgaaacggctgagtatcagggctctatgtgactcgctctgtgtgtcacaacctgccgtgaacatggggaacaagaggcaggattcggccgttccgcctagttgaatacgaccaagacacgatataatctcttctacggcttgctgaacagtctcatcttcggactttctccccttcaccacgctcgagtcagccattactaaaatgttcgcatcgtggaggcgagaacgtaactcgaaactaagccggaaacaccacgaagcaataatgaagattgtgtagcaactactgtagaaaaccaaaatcaatacttaccattacacgacgatacaagtgaacgagtgcagcccagtggaatgccgagttggtcgcgcctaatccttccgaatcccatttttcgatgtcgccctcagtgtggatatgtttacaagggactggttgttgcaccattgattctctcactgccaactcaagcttagctgcttgttcagcaatttcatgacttggttgccactctctgcgtatattcctctcttcgtcgattcgctcggcatcgcacttgcgtgcaaggtctgcgatttttgataaaaggtagacgcatcgtgtcgtgaaccccataatacaatcaatttcgtcgtatccatcgtcaatatcgtcaagttcatagtcaaatatccatgctgaggaggcatcttttggtcccccgctcaggctcccaattacatctaaataagcagcccagctccagagaaaggagcaaatgggatcctggcgaaaattctggtggaagccacgcaacccaccaggccgaaccataatgacctattcaccaaaaagtcagcagtgctagcttctggcagatcttactcgtctacgggcaccatgtacaacgacgcatcacgcattgtgtacagaataaaaaatcttggccaaccgatggagctggatagaacggaaaatattgttgattcgctcacctctcgcgcaagactaagatgtctctgccaaggaatatcgtatccaaaaacttgaggagaaatgatatccagcgacgcaagcattatagcagtagcaaggttagcgttcgaaaagttccgatcagggtcgttgagagcttcgcggagggtgggaaatatatcatcaacccagaatgcgattctcaatgttggctctttgtggttcaaaacacgagcgcgatgtgatgctaccaagactgagcaaaacaagctaggcagtacgaccgatatacataccagaatatgctaatagtaaagccagtaaattatcgttcctcacagccatctgaggcagtatcgtacgaaaaggattggcgtgggggtcatcgtacggaacgagaac

SEQ ID NO: 26679 - DNA, 681 bp, Muscodor strobelii
  misc_feature: SGI cDNA ID NO. 569127
  misc_feature: Encodes the peptide sequence at SEQ ID NO 26680
atggatatcgacgacatcctccgtgatgtcgacccaacctacaacgccattcccacggaaacacgtgaccttcaggccctaacacgcgcctgggtcgctgaacgatcttgtcctgagcttttacagtcggtcgtcctcccatggccccccgatcgcctgttcgagcgcgtcaatgatcgtattaaggaacagatcgagaaggtcgaggacatgactggtgatatggaccccaagaccaattttgctctcatagttatccaaacagagctcgagcgcttcaagttcctagtcaggagctatctacgcgccaggatcgcaaagattgacagacatacgttgcattatctctccaccccgggactaagagcacgcctctctgagaccgagcaggcgtacgccactcgtcaccaggcactactgcataatcattacctatcatcctttctctccgcctttccgccgtcacttcagaatctaaacgactctgctggcaatatcaccatgattgacactcccgacttggagaccgcagtcttcatccgtcttctccaagacactctagttcgaggccacggtaccgacaccgacggcactatggacggcaggaatggcgacattcttattctgaggtggtccgacgccaagcctcttgtcgattccggtcgtgctgaagtcgtttga

SEQ ID NO: 26680 - protein, 226 aa, Muscodor strobelii
  misc_feature: SGI Peptide ID NO. 569127
  misc_feature (16)..(226): Pfam Id: PF05916 Pfam Desc: Synthetic lethal mutants of dpb11-1 five
  misc_feature (19)..(181): Pfam Id: PF05916 Pfam Desc: Synthetic lethal mutants of dpb11-1 five
  misc_feature (1)..(226): NCBI GI: 39951937 Blast Desc: MGG_01611 [Magnaporthe grisea 70-15] gi|145020542|gb|EDK04671.1| MGG_01611 [Magnaporthe grisea 70-15]
  misc_feature (1)..(226): NCBI GI: 256735259 Blast Desc: NECHADRAFT_74917 [Nectria haematococca mpVI 77-13-4]
  misc_feature (1)..(226): NCBI GI: 116181710 Blast Desc: CHGG_01483 [Chaetomium globosum CBS 148.51] gi|126322771|sp|Q2HE71.1|SLD5_CHAGB RecName: Full=DNA replication complex GINS protein SLD5 gi|88185780|gb|EAQ93248.1| CHGG_01483
  misc_feature (1)..(226): NCBI GI: 261356056 Blast Desc: DNA replication complex GINS protein SLD5 [Verticillium albo-atrum VaMs.102]
  misc_feature (1)..(226): NCBI GI: 171696138 Blast Desc: protein product [Podospora anserina] gi|170948311|emb|CAP60475.1| protein product [Podospora anserina]
  misc_feature (1)..(226): NCBI GI: 85114431 Blast Desc: NCU09261 [Neurospora crassa OR74A] gi|28926487|gb|EAA35460.1| conserved [Neurospora crassa OR74A] gi|38567013|emb|CAE76312.1| conserved [Neurospora crassa]
  misc_feature (1)..(210): NCBI GI: 46107198 Blast Desc: FG00482.1 [Gibberella zeae PH-1] gi|126322772|sp|Q4IQM6.1|SLD5_GIBZE RecName: Full=DNA replication complex GINS protein SLD5
  misc_feature (1)..(226): NCBI GI: 156045411 Blast Desc: SS1G_09894 [Sclerotinia sclerotiorum 1980] gi|154694289|gb|EDN94027.1| SS1G_09894 [Sclerotinia sclerotiorum 1980]
  misc_feature (1)..(226): NCBI GI: 154318774 Blast Desc: BC1G_02776 [Botryotinia fuckeliana B05.10] gi|150857906|gb|EDN33098.1| BC1G_02776 [Botryotinia fuckeliana B05.10]
  misc_feature (1)..(225): NCBI GI: 169600097 Blast Desc: SNOG_02878 [Phaeosphaeria nodorum SN15] gi|111068489|gb|EAT89609.1| SNOG_02878 [Phaeosphaeria nodorum SN15]
MDIDDILRDVDPTYNAIPTETRDLQALTRAWVAERSCPELLQSVVLPWPPDRLFERVNDRIKEQIEKVEDMTGDMDPKTNFALIVIQTELERFKFLVRSYLRARIAKIDRHTLHYLSTPGLRARLSETEQAYATRHQALLHNHYLSSFLSAFPPSLQNLNDSAGNITMIDTPDLETAVFIRLLQDTLVRGHGTDTDGTMDGRNGDILILRWSDAKPLVDSGRAEVV

SEQ ID NO: 26681 - DNA, 1682 bp, Muscodor strobelii
  misc_feature: SGI EST ID NO. CUFF.62946.0
  misc_feature: Variant of the nucleotide sequence at SEQ ID NO 26679
cgcgcctcccaatgcggatcgttttgccggtgtcgtataggtcaagcagcccgacgttgcagtttcacaattgcgtccaacgcgcggaatcgtgaacatcatcggagagcctgtcgtctcacacccacatctcgataacgccatggatatcgacgacatcctccgtgatgtcgacccaacctacaacgccattcccacggaaacacgtgaccttcaggccctaacacgcgcctgggtcgctgaacgatcttgtcctgagcttttacagtcggtcgtcctcccgtcacagaacccttacccctgcacccgcatctgctgaccgtgaggcaagatggccccccgatcgcctgttcgagcgcgtcaatgatcgtattaaggaacagatcgagaaggtcgaggacatgactggtgatatggaccccaagaccaattttgctctcatagttatccaaacagagctcgagcgcttcaagttcctagtcaggagctatctacgcgccaggatcgcaaagattgacagacatacgttgcattatctctccaccccgggactaagagcacgcctctctgagaccgagcaggcgtacgccactcgtcaccaggcactactgcataatcattacctatcatcctttctctccgcctttccgccgtcacttcagaatctaaacgactctgctggcaatatcaccatgattgacactcccgacttggagaccgcagtcttcatccgtcttctccaagacactctagttcgaggccacggtaccgacaccgacggcactatggacggcaggaatggcgacattcttattctgaggtggtccgacgccaagcctcttgtcgattccggtcgtgctgaagtcgtttgaatcccatcagtctttgttcttgatctaagtatacaaggtagcccccacgttgaggactcatttgtcgaatcgagtcgggtcgagtcgtgaagctcatcacttgcttcccgggcttgctgggaaagagcactccagcgctacgtttctaactgaaccgtacgagccacagagagggctcgctaagggacagcataaattgaccccatccttattgttccgaggtatcagaatgctgcagcgaggtgtggaaaatgcggcctactgtagactcttaaggatgaggagcagattcacgagtccggaatctagctgcgacattcacgtgaataagctggattttgggccgataatccaaccgtttcatcggggggttgggatacaagtggcacaaactaagagaaaccgactacgcatgttattcagtcgttatgggaattgggttgcggtccccgctggcattggctgagcagtttgcaggacaatggaagataatgcaagcgcagtgctaggtcgcattacacaagatacctagtatagtatcatggcgcatgtagtcttaaagctacagtcgtatagcttgtctttggcaagcagtgaaatcgaaagatttgagatatctggggtctcattctctcctggactcaagggacacattttcataattccttgatgcatgagggtctcagtgcagtctcacacggtgagctgcttggtaattgcaatagtttcgtgacgaccagatgtgacagaagttcgattacaaggtccccatggatgccggcttcggtggcgtggatcatttcgatggcg

SEQ ID NO: 26682 - DNA, 1206 bp, Muscodor strobelii
  misc_feature: SGI cDNA ID NO. 569128
  misc_feature: Encodes the peptide sequence at SEQ ID NO 26683
atgagtgaccttcagaaggcttgggcgaagaatcgtctcagcgctatacccatacagccttttgacgaacgcgaagaagaggaggaagagattggcacagtctccgagttgccagaccacttcgacgatgattcttcgtcggcatcgtcagcatcctcgacaggcaccatcattccatcaccgagtcaaaatctctttgccaggccgcagggcgttccgcgggggcggagccttcagccgattccttggaccacctattttgagcgagaacttttccttcatgaccagagttccgcggatcaccccacctttcatgcttacctatcatctccggccgagaagggacctcttttcgtcatgcatcatggtggtggctcctccgctctcaccttcgctgtcgttggtgacgaagtacggaagcgcatcccatcggccggcgtcctctccctcgacgctcgcggacatggctcaacacagactcccgaggctcagcctcttgacatgaaccttgaaacacttgcggacgatctactgcgcgttatcgagcttacgcgcaagactatgaagtgggcgcaattgccgcccatcgtcctcgtcggccactctatgggcggtgcggttgtgaccgaggttgcacgtgtaggaacgcttggcaacgcgctcttgggctacgctgtgcttgatattgtggaagggtcggccatggatggcttgcagcatatgcaaacatacttagcaacacgacccacaggctttcagagcctcgagaatggtatagagtggcatacgcgatcgcgtacaatcagaaactctgtctcggctaggacgagtgtgccatccttactacggctagacgagcgacaacctggcgacacccgaccttggaagtggaggactgacttagctgctactcagccgttctgggagaattggttcggtggcttgagcagaagatttctagacgccagaggggccaagctactattactagcaggcacggacagactcgatacggaattgacaattggccaaatgcaaggaaagtatgccctccaggtttttcccgaggcaggtcatttcatacatgaagatctgccagaaaagacagccattgcactggccgatttctataggcggaacgaccggagcgccttggtgcttccgcccaaagtctcagatcttctgaagcaagggaagaaagtatga

SEQ ID NO: 26683 - protein, 401 aa, Muscodor strobelii
  misc_feature: SGI Peptide ID NO. 569128
  misc_feature (145)..(375): Pfam Id: PF00561 Pfam Desc: alpha/beta hydrolase fold
  misc_feature (145)..(212): Pfam Id: PF00561 Pfam Desc: alpha/beta hydrolase fold
  misc_feature (1)..(401): NCBI GI: 46107408 Blast Desc: FG00587.1 [Gibberella zeae PH-1] gi|88908233|sp|Q4IQC1.1|PPME1_GIBZE RecName: Full=Protein phosphatase methylesterase 1; Short=PME-1
  misc_feature (1)..(401): NCBI GI: 154324186 Blast Desc: BC1G_00492 [Botryotinia fuckeliana B05.10] gi|150842721|gb|EDN17914.1| BC1G_00492 [Botryotinia fuckeliana B05.10]
  misc_feature (1)..(401): NCBI GI: 39952013 Blast Desc: MGG_01649 [Magnaporthe grisea 70-15] gi|145023290|gb|EDK06729.1| MGG_01649 [Magnaporthe grisea 70-15]
  misc_feature (1)..(401): NCBI GI: 156057399 Blast Desc: SS1G_04430 [Sclerotinia sclerotiorum 1980] gi|154702216|gb|EDO01955.1| SS1G_04430 [Sclerotinia sclerotiorum 1980]
  misc_feature (1)..(401): NCBI GI: 85116960 Blast Desc: NCU00954 [Neurospora crassa OR74A] gi|74696759|sp|Q7SGG8.1|PPME1_NEUCR RecName: Full=Protein phosphatase methylesterase 1; Short=PME-1 NCU00954 [Neurospora to
  misc_feature (1)..(391): NCBI GI: 171696072 Blast Desc: protein product [Podospora anserina] gi|170948278|emb|CAP60442.1| protein product [Podospora anserina]
  misc_feature (1)..(394): NCBI GI: 226279026 Blast Desc: protein phosphatase methylesterase [Paracoccidioides brasiliensis Pb01]
  misc_feature (21)..(395): NCBI GI: 240111234 Blast Desc: protein phosphatase methylesterase, [Coccidioides posadasii C735 delta SOWgp]
  misc_feature (1)..(394): NCBI GI: 226287419 Blast Desc: conserved [Paracoccidioides brasiliensis Pb18]
  misc_feature (1)..(394): NCBI GI: 225677843 Blast Desc: protein phosphatase methylesterase [Paracoccidioides brasiliensis Pb03]
MSDLQKAWAKNRLSAIPIQPFDEREEEEEEIGTVSELPDHFDDDSSSASSASSTGTIIPSPSQNLFARPQGVPRGRSLQPIPWTTYFERELFLHDQSSADHPTFHAYLSSPAEKGPLFVMHHGGGSSALTFAVVGDEVRKRIPSAGVLSLDARGHGSTQTPEAQPLDMNLETLADDLLRVIELTRKTMKWAQLPPIVLVGHSMGGAVVTEVARVGTLGNALLGYAVLDIVEGSAMDGLQHMQTYLATRPTGFQSLENGIEWHTRSRTIRNSVSARTSVPSLLRLDERQPGDTRPWKWRTDLAATQPFWENWFGGLSRRFLDARGAKLLLLAGTDRLDTELTIGQMQGKYALQVFPEAGHFIHEDLPEKTAIALADFYRRNDRSALVLPPKVSDLLKQGKKV

SEQ ID NO: 26684 - DNA, 8431 bp, Muscodor strobelii
  misc_feature: SGI EST ID NO. CUFF.63735.0
  misc_feature: Variant of the nucleotide sequence at SEQ ID NO 26682
cgaattcgtaagatttgagggtctttaagagaagtttaggaaatcgacttcttgctcgtaggtgctattggaactctggtacttgcagtgggatgcacaggaatggtcgaggtacatgcgacgcctagcagctattatgggagcgggaggtaccgtgtcgtccgttcaccgccagtgacgtcgaaaaaagaagtccaaagaccccaccactcatccggatgagcaaaccaccacacccaaacttacatcatagcgttccacacccacgtatgtagagggccaaacaatattggaaaagtctttgaggcagaagctattgcagatacacgtaaccagagacacaggtacagataccactactgcaccactgacgccatctatgtcagggtaggggagaagaagcttcattcacccatccactcaacatgagtgaccttcagaaggcttgggcgaagaatcgtctcagcgctatacccatacagccttttgacgaacgcgaagaagaggaggaagagattggcacagtctccgagttgccagaccacttcgacgatgattcttcgtcggcatcgtcagcatcctcgacaggcaccatcattccatcaccgagtcaaaatctctttgccaggccgcaggggtaaggcagactgtttccgtctcgtccggcccgatttcgtactgattgtaccgcaacgatagcgttccgcgggggcggagccttcagccgattccttggaccacctattttgagcgagaacttttccttcatgaccagagttccgcggatcaccccacctttcatgcttacctatcatctccggccgagaagggacctcttttcgtcatgcatcatggtggtggctcctccgctctcaccttcgctgtcgttggtgacgaagtacggaagcgcatcccatcggccggcgtcctctccctcgacgctcgcggacatggctcaacacagactcccgaggctcagcctcttgacatgaaccttgaaacacttgcggacgatctactgcgcgttatcgagcttacgcgcaagactatgaagtgggcgcaattgccgcccatcgtcctcgtcggccactctatgggcggtgcggttgtgaccgaggttgcacgtgtaggaacgcttggcaacgcgctcttgggctacgctgtgcttgatattgtggaagggtcggccatggatggcttgcagcatatgcaaacatacttagcaacacgacccacaggctttcagagcctcgagaatggtatagagtggcatacgcgatcgcgtacaatcagaaactctgtctcggctaggacgagtgtgccatccttactacggctagacgagcgacaacctggcgacacccgaccttggaagtggaggactgacttagctgctactcagccgttctgggagaattggttcggtggcttgagcagaagatttctagacgccagaggggccaagctactattactagcaggcacggacagactcgatacggaattgacaattggccaaatgcaaggaaagtatgccctccaggtttttcccgaggcaggtcatttcatacatgaagatctgccagaaaagacagccattgcactggccgatttctataggcggaacgaccggagcgccttggtgcttccgcccaaagtctcagatcttctgaagcaagggaagaaagtatgacttcagcacgccgcgggatgagatggcggcgcaatcatgggtatctctttgcaactactgaatttccggcgaatctgtccgtgttgccctatattattggcaaccaaagtagcccgatgactcccccgttcccaggtgtagaaaatggtacgtacaaatgcgaacccatcgatacctaccatcgatgcaaccacgttggtttcagtgcacacccgctatttacacatgtatatgcacctatccagacgccttgaaatgcaatcataccctcgcgttctatatagtacacagtactcttccttttcgtcaagtgtcgtttttcaaaattaggctggcaatgatgtggcctctatcaacccttcttcggagaccagcacgccccgctgagagagtgtcttcttggctgcagaattaatgggctgtgttcgagatgctgctagggcacttggatttggtttcctggagttgctcttgttggcagccttgtctggatcaatattattgagatcgacatcacgcgcccttgccagcatgtcatcaaaaccgagggcctcgcagagtgcagtgtaacttttgcaggggttgatgtttctgtaaaccacctgcttgccggggatgagttgcagaagcatgaacttagtgttgccgtatttgttctcgacctctaatgcgtagcgcatatactgttcgacaacgtctttccaggggagagggccgccgtcggcttgggagcgaaagacgctcgagttcttctcggcctgcgtggcaatcatggctccatcgacgccgtattcggccatgagctgagcagcgtggtcccggttttcgacgtcgccgttcattagacaagccacaccggcgtcacggcagatgttggcgatcatgcgcaattggctgcgaatggcacgttcgcgcgggcgcataggggtggtgcggcagtggacggtcaagccggtgatgccggtggcaacgagccgcctcacgagagcctctgtgtcggcagggctggccaggatgcggatcttgacactgatgccgatgttgaactcggggacgatgtgcttgacgagggcctcgaggatggcgcacagcttgtccggggttcggagcagggcggcgcccattccgtcgtgggtgctgaagggcttgggacagccggcattgacgtcgatgccggcgacgtcggcggcgacgagcctcgcggcctggacggccaggtcggggttggaggtgccgatctggaagatgagcttgccggcctccttggcggggtgcaggcggtagatgacgctgtccttgaggtccgggcgcggggccttgccgccgccgtaggagggcttgcgcgtccactcgatggtgttggtggcgtcgttgtagcggcgcgtggagccgatgaggctgcggtcgatggtctcgggccccccagacgaggtcggcgccgtagtgcagggcgagcagacgcgacggcagctctccggagcggaccatgggagcgaggacaaccttgttgcgatagtcgacgccgcgcggggggtggcgactgcggtgggttgaggaggagacatgatggctcgtatggcgcggggcagacgggagaagaacatgcctatgcgcagcaccggattgcagccgcgatcatggcgacgcccacggtcgtcttcaccgagcagctcgatgtctgctatgccttaaaacctaagagctggttcgatgctgtgagcacgggcggtactggcaccgatgtctaaaatgcgcagtggtgtacaaagttaaaacatcgaatttcggcacacctccagtcgctccttatcttatcaaatctccgaccatatggaacctttaggtacccacagttctacctgaggtgctgtacttacctagatgtatctgcttgccggcacccaccgacacgacaggtagatcctcccggtccagacgagcagagtcgagggtttacccacgggcttggaacgcaatactgtcaaatctgccgatttgtcaacgcaacatgctcagccgcaccagtgctcgcatggccacccgcaatggtgcgagtcagactgaattccgcaagtagcacgcctgtggaacttgcgggttttgtcggccgcgttggcttacagtaggattattgcccccccgaaccagctcgccagtcgcctgctacacagagaacgcgttgtatataaatagtgtgcgcagcttcatgcgacctggaagctgtgtcgacttacgagctaggtagaccaggtcaaccaaatcatgaaagggttcgaaggaaaagaagggcacaaacaggggctggcgacgtcaccccgcatcgccacgacccgctgacccgccccgcaaggacttcacccagtcccgttgcaggcggccgaggacactgacgttcaggtagacgaatatgtacgttaggtctgtagaagccggcagagatggtcctacgtctgtcgcctgcctgtttgcagtcctagatggatatatatcatatatacttggtagattgttaggtagatgctgtgcctctgcccaagtccctcatcgcctccgtgatttgtgagctcgcctcggaatcctcgacgccacgtgagagctgagcgacagactctgacagactctgacagactccgcaacaggcctgctcgtccattcgctttgccgtgccgtccctggctcgtctgacaccagggtgagtgcctgttatttgcagcgtggcagagaccgtgagacgacggtagcgggcaggaaccagacgtctatatcaaccgtcagatccaccatcacatcagccatcgcgcggccgtacccgctaacttgagccggacggactgcataaacagtgcgtgggctcactcgaccgagcagtgcgacacgagtgacgacagcaccgcgcgttccgatcattgtccaggaccacatcgctgctcacctgtcagacgggcgcgcctctctgcctggacagacagcttcctgccccgtgcctccgcgtctctatcagacatctccgggtccttgtccctgagatcgcaagctgccagaccccgaggccgcgagaaactggcaaagcacggcaaacagcgcatgtttggtgtgataagtgtgtggtgtgacaaaaactcgcagtaggaagtacacgccttcagcatgtcggcctcaagataccatggcccctcgcgaaaaccgcttcccagcgagccaagcgagccagagcgcaaacacacgctgccgccgctgccgactgggctcgacctgtcgttagacgatggcgtcagtcggaccacggccgacgataacgggctcctggcaagccgatcgtcgggtcgcttgcagaagccggcgcccccgagccatccgccgccttccgttccgccgcctgccaccaccgacttggacttcacgcacgccgagacgaagccttcgccccggctccgaaaggagcagaaacggagaagcagctccgttcatgcgagccccacgtctcgcccacgctcttcctccgttctgaagccccagcaaggctcgccgccgtcagaacacaggggccgaagctcgtcggcccagcctccccatcgtcggccaattccagagccggacaatcgagtcgtttcggcggctgcagcccctgtagtgcctcacggggcttcgagcaatgacagtcaaagccccaccagagatggagagcgaccgggcaggctgagacggagttggctgccgggaggaagatctaggtccacgtcgcaatccacggatcctgctcggcagaatcatcagtcgcccgcgtggatactcggacagagatccgactacaacactgcgtttcttgccaatggggacaaggttccagaactttggaatgagagcggaacggttctcatctacctggacccgaaaggcaacggcgcaacgccgtccttcaaggttcccgcatttgtcaccgattattcgcttgtgttcgccgacctgatcgaagccgagatggcgacgtcgcctgcgagtgcagggagacatcgggctcgtagtttcaccggtcgagacagtttatccgtgtcagatgcccacagggtacagtcccctcctctgggcacaactagcgatcctctcgatgatggcgaaactcggctctatctgcctgtttccatgtccacgccgggtcataggtccgacgtggatatggagcgtctgatctcgattcgaaacatgttcgccttcttgacggggcaacctctcgtcgctaccaaatcccaacccaccctgtttgccgtgtttctcaacatagctagtttactgaaggaatatgagttcaccaatgcggacggttcgactttcgggagcgctgtcgagatgagttttagctttttcatggaacaaatggggctagccgacgtgagacagagcagggagaagactctagagtccctcattctgggtgagcgcatgcgctctatggagctttacaacgaagctttcgctcatgctgtaggcaaatactcggccatgcgtgaccttcgctcgcccttgtgggatcaagtctccccaagctcgcggcagcgccttgagcgcgcccatattgagctggtaagccgtcagcatagcgtgaacactcggctcgaagccttcgatttccctgccctgtttactggcacggccagctccacatcgtttgttgaatacaaagatatcaaattcaacacgtggaagaagtcgtttggacgcatgaggcagttcgttctgggtttctataaagcgaacttcgggaactggcccccgaaggctcggagtaaaaagaaccccttcacagaaagtggactgaaccgacaggttctcaagattctgtactcggacttctgtgcgctgtatgacctgcttgctgaccgcgaatcattaacaacgcgagtgatagacgacaacgccgatgatatcacggacgacggccagaatccccgtgcgtcagcattgcggaaagtcctaggcgagtttgaccactcgtcgccacccgtgcttccacctgtgccgtttgacctgcccatgatgccgaacatggtgacggtccaggagaattattatgacctttcaaccaaggagcaaatgaagctggacaaggggctccaggagtatcaggtccttctcatcctaaataaagcctacgattttgagactgacaagctacgcattcccttcctcgagcagttcaaggagtttgagctcaaggaagccaaggggaaaacggctgttgatatgacagaccaacgcttgggttactggctttttctttatgtcgtcatccaatcgctgcccatgcttgttgtagacgcacccgggctcagcttcacagaagcagtggagtacttcctctgccaaccgccaaagggatcgccgccatggatggaagacgcaccagctgtgcgcaagaggtggtatgaagtggcgggtggtggtggcctcgttgagctttccgaggacgcggtccaattcggggtggagggtatctaccatagaagccattgctggcttgctgctaagcgttgggaggtgggtcaagtcgcagagccgccgccatcccacgagacggtgctctcgcccctggcagctccaaggtccgtgttcgaggatatggacccaaacacgccgccggtggcgcggaccgagtctcccctcggcggtcccacgggcctcgccctgaggtcgaggggcacctcgccgggaggacggcagtctgcatataggagtagcattgcattgggcttggaaccggttgcccttcctcctggcggtgggtctcgtacgtcaagtggttggaacagtcctacgggcacccggccaccgagcggggcgatggcccggagccggtcgtcaggtaatctacaggggctagcgggccttgcgggcaatgctacgggaagcgagtcgcaacccaactcccgccaaggctctgcaggcgggagcacatttgatgatattctcaaggatgtggaaacgaaacagcctaagaagaagagagggttcttttaaggattgtctcaaagttcttttttggcgcaatgttagagcatgccctctatgaagagctttgcaggtgaggaagagcgcgcgtcggaaaatccaacgggatcgattcggagcatcaagtagggatccttttctcaatttctcgcccgttattttgattgcgaatcatgagctgttcagatagctgccactggaactgaacattgcatataagactaaggctaggtacaaatgacagtcccgggttaaggcagacgaaagaaaaaatggtaccgagatataacggaccggcacccaagcttgatactagagaagcatcgatgttgaacatcctaccatcgatctactatgtactacctgaaatcatcacacatgtaatatacatcttataaaccatgcacaggtcgaagctagttgaccatcaagaacatactacaggtctgtatcctaccatgagtcatcgatagaactctgcgaataaaacatggttaaggcacggtctccttgcgaatagctcaggaaccacagggcatgctccatctccatcttcatagaattcaatattagagccagtctggtactacctgtgcagatgtagttccaatgcaggccatcgaggtgaacagcattgacgtaaggtgggctcaaaaattaggaaccttcatggctggatactgtctcccctccagggtagcttacaggtacgtcgtgcccctgtttggacgccat

SEQ ID NO: 26685 - DNA, 1239 bp, Muscodor strobelii
  misc_feature: SGI cDNA ID NO. 569129
  misc_feature: Reduced expression when VOC is produced
  misc_feature: Encodes the peptide sequence at SEQ ID NO 26686
atgtctcctcctcaacccaccgcagtcgccaccccccgcgcggcgtcgactatcgcaacaaggttgtcctcgctcccatggtccgctccggagagctgccgtcgcgtctgctcgccctgcactacggcgccgacctcgtctggggggcccgagaccatcgaccgcagcctcatcggctccacgcgccgctacaacgacgccaccaacaccatcgagtggacgcgcaagccctcctacggcggcggcaaggccccgcgcccggacctcaaggacagcgtcatctaccgcctgcaccccgccaaggaggccggcaagctcatcttccagatcggcacctccaaccccgacctggccgtccaggccgcgaggctcgtcgccgccgacgtcgccggcatcgacgtcaatgccggctgtcccaagcccttcagcacccacgacggaatgggcgccgccctgctccgaaccccggacaagctgtgcgccatcctcgaggccctcgtcaagcacatcgtccccgagttcaacatcggcatcagtgtcaagatccgcatcctggccagccctgccgacacagaggctctcgtgaggcggctcgttgccaccggcatcaccggcttgaccgtccactgccgcaccacccctatgcgcccgcgcgaacgtgccattcgcagccaattgcgcatgatcgccaacatctgccgtgacgccggtgtggcttgtctaatgaacggcgacgtcgaaaaccgggaccacgctgctcagctcatggccgaatacggcgtcgatggagccatgattgccacgcaggccgagaagaactcgagcgtctttcgctcccaagccgacggcggccctctcccctggaaagacgttgtcgaacagtatatgcgctacgcattagaggtcgagaacaaatacggcaacactaagttcatgcttctgcaactcatccccggcaagcaggtggtttacagaaacatcaacccctgcaaaagttacactgcactctgcgaggccctcggttttgatgacatgctggcaagggcgcgtgatgtcgatctcaataatattgatccagacaaggctgccaacaagagcaactccaggaaaccaaatccaagtgccctagcagcatctcgaacacagcccattaattctgcagccaagaagacactctctcagcggggcgtgctggtctccgaagaagggttgatagaggccacatcattgccagcctaa

SEQ ID NO: 26686 - protein, 412 aa, Muscodor strobelii
  misc_feature: SGI Peptide ID NO. 569129
  misc_feature (41)..(368): Pfam Id: PF01207 Pfam Desc: Dihydrouridine synthase (Dus)
  misc_feature (90)..(267): Pfam Id: PF01207 Pfam Desc: Dihydrouridine synthase (Dus)
  misc_feature (49)..(353): NCBI GI: 156058113 Blast Desc: SS1G_04788 [Sclerotinia sclerotiorum 1980] gi|154702573|gb|EDO02312.1| SS1G_04788 [Sclerotinia sclerotiorum 1980]
  misc_feature (49)..(353): NCBI GI: 46124971 Blast Desc: FG06863.1 [Gibberella zeae PH-1]
  misc_feature (49)..(353): NCBI GI: 256732667 Blast Desc: [Nectria haematococca mpVI 77-13-4]
  misc_feature (49)..(353): NCBI GI: 154299041 Blast Desc: BC1G_11833 [Botryotinia fuckeliana B05.10] gi|150857536|gb|EDN32728.1| BC1G_11833 [Botryotinia fuckeliana B05.10]
  misc_feature (49)..(353): NCBI GI: 85116943 Blast Desc: NCU00950 [Neurospora crassa OR74A] gi|28926947|gb|EAA35907.1| NCU00950 [Neurospora crassa OR74A] gi|38567022|emb|CAE76320.1| related to tRNA dihydrouridine
  misc_feature (49)..(353): NCBI GI: 121705192 Blast Desc: tRNA dihydrouridine synthase (Smm1), [Aspergillus clavatus NRRL 1] gi|119399005|gb|EAW09433.1| tRNA dihydrouridine synthase (Smm1), [Aspergillus clavatus NRRL 1]
  misc_feature (49)..(353): NCBI GI: 261205036 Blast Desc: tRNA dihydrouridine synthase [Ajellomyces dermatitidis SLH14081] gi|239592314|gb|EEQ74895.1| tRNA dihydrouridine synthase [Ajellomyces dermatitidis SLH14081] tRNA dihydrouridine
  misc_feature (49)..(353): NCBI GI: 115384898 Blast Desc: conserved [Aspergillus terreus NIH2624] gi|114196688|gb|EAU38388.1| conserved [Aspergillus terreus NIH2624]
  misc_feature (49)..(389): NCBI GI: 71000116 Blast Desc: tRNA dihydrouridine synthase (Smm1) [Aspergillus fumigatus Af293] gi|66852412|gb|EAL92737.1| tRNA dihydrouridine synthase (Smm1), [Aspergillus fumigatus Af293]
  misc_feature (49)..(389): NCBI GI: 119492469 Blast Desc: tRNA dihydrouridine synthase (Smm1), [Neosartorya fischeri NRRL 181] gi|119411760|gb|EAW21703.1| tRNA dihydrouridine synthase (Smm1), [Neosartorya fischeri NRRL 181]
  misc_feature: Useful for introducing or modulating the production of volatile compounds
MSPPQPTAVATPRAASTIATRLSSLPWSAPESCRRVCSPCTTAPTSSGGPETIDRSLIGSTRRYNDATNTIEWTRKPSYGGGKAPRPDLKDSVIYRLHPAKEAGKLIFQIGTSNPDLAVQAARLVAADVAGIDVNAGCPKPFSTHDGMGAALLRTPDKLCAILEALVKHIVPEFNIGISVKIRILASPADTEALVRRLVATGITGLTVHCRTTPMRPRERAIRSQLRMIANICRDAGVACLMNGDVENRDHAAQLMAEYGVDGAMIATQAEKNSSVFRSQADGGPLPWKDVVEQYMRYALEVENKYGNTKFMLLQLIPGKQVVYRNINPCKSYTALCEALGFDDMLARARDVDLNNIDPDKAANKSNSRKPNPSALAASRTQPINSAAKKTLSQRGVLVSEEGLIEATSLPA

SEQ ID NO: 26687 - DNA, 2979 bp, Muscodor strobelii
  misc_feature: SGI cDNA ID NO. 569130
  misc_feature: Encodes the peptide sequence at SEQ ID NO 26688
atgcttatgtctagcgcaaagtcaaagtcaaagtcaaagtctcagccgaagcccctaccaaagtcaaaatcaacactgggccgcctttccgtcctcttctcgccgctgacagcgttccctgctataggataccatggcccctcgcgaaaaccgcttcccagcgagccaagcgagccagagcgcaaacacacgctgccgccgctgccgactgggctcgacctgtcgttagacgatggcgtcagtcggaccacggccgacgataacgggctcctggcaagccgatcgtcgggtcgcttgcagaagccggcgcccccgagccatccgccgccttccgttccgccgcctgccaccaccgacttggacttcacgcacgccgagacgaagccttcgccccggctccgaaaggagcagaaacggagaagcagctccgttcatgcgagccccacgtctcgcccacgctcttcctccgttctgaagccccagcaaggctcgccgccgtcagaacacaggggccgaagctcgtcggcccagcctccccatcgtcggccaattccagagccggacaatcgagtcgtttcggcggctgcagcccctgtagtgcctcacggggcttcgagcaatgacagtcaaagccccaccagagatggagagcgaccgggcaggctgagacggagttggctgccgggaggaagatctaggtccacgtcgcaatccacggatcctgctcggcagaatcatcagtcgcccgcgtggatactcggacagagatccgactacaacactgcgtttcttgccaatggggacaaggttccagaactttggaatgagagcggaacggttctcatctacctggacccgaaaggcaacggcgcaacgccgtccttcaaggttcccgcatttgtcaccgattattcgcttgtgttcgccgacctgatcgaagccgagatggcgacgtcgcctgcgagtgcagggagacatcgggctcgtagtttcaccggtcgagacagtttatccgtgtcagatgcccacagggtacagtcccctcctctgggcacaactagcgatcctctcgatgatggcgaaactcggctctatctgcctgtttccatgtccacgccgggtcataggtccgacgtggatatggagcgtctgatctcgattcgaaacatgttcgccttcttgacggggcaacctctcgtcgctaccaaatcccaacccaccctgtttgccgtgtttctcaacatagctagtttactgaaggaatatgagttcaccaatgcggacggttcgactttcgggagcgctgtcgagatgagttttagctttttcatggaacaaatggggctagccgacgtgagacagagcagggagaagactctagagtccctcattctgggtgagcgcatgcgctctatggagctttacaacgaagctttcgctcatgctgtaggcaaatactcggccatgcgtgaccttcgctcgcccttgtgggatcaagtctccccaagctcgcggcagcgccttgagcgcgcccatattgagctggtaagccgtcagcatagcgtgaacactcggctcgaagccttcgatttccctgccctgtttactggcacggccagctccacatcgtttgttgaatacaaagatatcaaattcaacacgtggaagaagtcgtttggacgcatgaggcagttcgttctgggtttctataaagcgaacttcgggaactggcccccgaaggctcggagtaaaaagaaccccttcacagaaagtggactgaaccgacaggttctcaagattctgtactcggacttctgtgcgctgtatgacctgcttgctgaccgcgaatcattaacaacgcgagtgatagacgacaacgccgatgatatcacggacgacggccagaatccccgtgcgtcagcattgcggaaagtcctaggcgagtttgaccactcgtcgccacccgtgcttccacctgtgccgtttgacctgcccatgatgccgaacatggtgacggtccaggagaattattatgacctttcaaccaaggagcaaatgaagctggacaaggggctccaggagtatcaggtccttctcatcctaaataaagcctacgattttgagactgacaagctacgcattcccttcctcgagcagttcaaggagtttgagctcaaggaagccaaggggaaaacggctgttgatatgacagaccaacgcttgggttactggctttttctttatgtcgtcatccaatcgctgcccatgcttgttgtagacgcacccgggctcagcttcacagaagcagtggagtacttcctctgccaaccgccaaagggatcgccgccatggatggaagacgcaccagctgtgcgcaagaggtggtatgaagtggcgggtggtggtggcctcgttgagctttccgaggacgcggtccaattcggggtggagggtatctaccatagaagccattgctggcttgctgctaagcgttgggaggtgggtcaagtcgcagagccgccgccatcccacgagacggtgctctcgcccctggcagctccaaggtccgtgttcgaggatatggacccaaacacgccgccggtggcgcggaccgagtctcccctcggcggtcccacgggcctcgccctgaggtcgaggggcacctcgccgggaggacggcagtctgcatataggagtagcattgcattgggcttggaaccggttgcccttcctcctggcggtgggtctcgtacgtcaagtggttggaacagtcctacgggcacccggccaccgagcggggcgatggcccggagccggtcgtcaggtaatctacaggggctagcgggccttgcgggcaatgctacgggaagcgagtcgcaacccaactcccgccaaggctctgcaggcgggagcacatttgatgatattctcaaggatgtggaaacgaaacagcctaagaagaagagagggttcttttaa

SEQ ID NO: 26688 - protein, 992 aa, Muscodor strobelii
  misc_feature: SGI Peptide ID NO. 569130
  misc_feature (136)..(992): NCBI GI: 261357394 Blast Desc: conserved [Verticillium albo-atrum VaMs.102]
  misc_feature (130)..(991): NCBI GI: 46108184 Blast Desc: FG00974.1 [Gibberella zeae PH-1]
  misc_feature (130)..(992): NCBI GI: 256734474 Blast Desc: NECHADRAFT_74776 [Nectria haematococca mpVI 77-13-4]
  misc_feature (130)..(992): NCBI GI: 145613514 Blast Desc: MGG_01570 [Magnaporthe grisea 70-15] gi|145020584|gb|EDK04713.1| MGG_01570 [Magnaporthe grisea 70-15]
  misc_feature (170)..(960): NCBI GI: 38566933 Blast Desc: [Neurospora crassa]
  misc_feature (100)..(833): NCBI GI: 171696224 Blast Desc: protein product [Podospora anserina] gi|170948354|emb|CAP60518.1| protein product [Podospora anserina]
  misc_feature (159)..(862): NCBI GI: 116181598 Blast Desc: CHGG_01427 [Chaetomium globosum CBS 148.51] gi|88185724|gb|EAQ93192.1| CHGG_01427 [Chaetomium globosum CBS 148.51]
  misc_feature (215)..(977): NCBI GI: 156045225 Blast Desc: SS1G_09801 [Sclerotinia sclerotiorum 1980] gi|154694196|gb|EDN93934.1| SS1G_09801 [Sclerotinia sclerotiorum 1980]
  misc_feature (218)..(913): NCBI GI: 159131572 Blast Desc: conserved [Aspergillus fumigatus A1163]
  misc_feature (218)..(913): NCBI GI: 119495024 Blast Desc: NFIA_010930 [Neosartorya fischeri NRRL 181] gi|119412470|gb|EAW22411.1| conserved [Neosartorya fischeri NRRL 181]
MLMSSAKSKSKSKSQPKPLPKSKSTLGRLSVLFSPLTAFPAIGYHGPSRKPLPSEPSEPERKHTLPPLPTGLDLSLDDGVSRTTADDNGLLASRSSGRLQKPAPPSHPPPSVPPPATTDLDFTHAETKPSPRLRKEQKRRSSSVHASPTSRPRSSSVLKPQQGSPPSEHRGRSSSAQPPHRRPIPEPDNRVVSAAAAPVVPHGASSNDSQSPTRDGERPGRLRRSWLPGGRSRSTSQSTDPARQNHQSPAWILGQRSDYNTAFLANGDKVPELWNESGTVLIYLDPKGNGATPSFKVPAFVTDYSLVFADLIEAEMATSPASAGRHRARSFTGRDSLSVSDAHRVQSPPLGTTSDPLDDGETRLYLPVSMSTPGHRSDVDMERLISIRNMFAFLTGQPLVATKSQPTLFAVFLNIASLLKEYEFTNADGSTFGSAVEMSFSFFMEQMGLADVRQSREKTLESLILGERMRSMELYNEAFAHAVGKYSAMRDLRSPLWDQVSPSSRQRLERAHIELVSRQHSVNTRLEAFDFPALFTGTASSTSFVEYKDIKFNTWKKSFGRMRQFVLGFYKANFGNWPPKARSKKNPFTESGLNRQVLKILYSDFCALYDLLADRESLTTRVIDDNADDITDDGQNPRASALRKVLGEFDHSSPPVLPPVPFDLPMMPNMVTVQENYYDLSTKEQMKLDKGLQEYQVLLILNKAYDFETDKLRIPFLEQFKEFELKEAKGKTAVDMTDQRLGYWLFLYVVIQSLPMLVVDAPGLSFTEAVEYFLCQPPKGSPPWMEDAPAVRKRWYEVAGGGGLVELSEDAVQFGVEGIYHRSHCWLAAKRWEVGQVAEPPPSHETVLSPLAAPRSVFEDMDPNTPPVARTESPLGGPTGLALRSRGTSPGGRQSAYRSSIALGLEPVALPPGGGSRTSSGWNSPTGTRPPSGAMARSRSSGNLQGLAGLAGNATGSESQPNSRQGSAGGSTFDDILKDVETKQPKKKRGFF

SEQ ID NO: 26689 - DNA, 8431 bp, Muscodor strobelii; identical to SEQ ID NO: 26684
  misc_feature: SGI EST ID NO. CUFF.63735.0
  misc_feature: Variant of the nucleotide sequence at SEQ ID NO 26687

SEQ ID NO: 26690 - DNA, 3624 bp, Muscodor strobelii
  misc_feature: SGI cDNA ID NO. 569131
  misc_feature: Reduced expression when VOC is produced
  misc_feature: Encodes the peptide sequence at SEQ ID NO 26691
atggacgacgatgaggactcgcaggctacacagcaagccacccagaatgccctcgatccccggcggctcggccagcagaactcgggcttctccgacgaggacatctcggacatcatatgcgtgctgcacccaaactcagaggctgccagccgcgagatccaccgcattgcggcctcgcccgagtacggtcgccacacggccggccgatactcggtcgacgccatccagtcggacctctaccgcgaagacgacgcccgcgagttcggccgcacgcgcggcataggcgaccacgccctggtcctgcgcctctcctcgcccgtcaaggacccccgcctcggcttcaccttcggccgcaacgcctcccgctgcgacatctgcttcacccacgaccccgcccgccggctgagcaacatccacttccgcatctacgtcaaccgccacggcagtgtcctgctcgaggaccagtccaccaacggcaccgtcgtcgactcgcacctgctcaagaagcggcccgacccccgcgaccagcgcctcagacgcaccctcgagagcggctccaagatcgagatcctcatgcacgagagctcctgtgacctgaccttcctcgtccgcatcccccgccgcgacggcagccacgaagacgcctacctgaggaacctggctgcctacatgcagagggccagtggcgaggaggaggatgtgaacaagaccattggccccggcccgaccggccacgtgaacctctttgcgcccacgccggcagacgggctgcgcaacccggtcgccgacaagcccctcgccctgcaagcgaccatcggccgtcttccccgggagtggcgcggcggggacaagtatgctcgagtcggcgtcatcgggaagggcgccttcgccacggtgcacaaagtcacgtccaagtacgacggctcgccctacgcagccaaagagctcgacaagcgcaagttcatgaagaacggcgtgctggatcagaaggtagaaaatgagatgaagatcatgcagaaggttcatcacgcccatattgtccaatacattgagcatttcgattgggacgtgcatcagttcatcatcatcatggagtttgttccggggggcgacttgggcaagttcatttcagagcatggcccgattgcagagcctcatgtcaagaccatcgccgagcagcttgtcgacgctgtcggctacttgcacgacaataaaatcacacatcgtgacgtcaagccagacaacattctgatccgctcgacaaatccgcttgttgttaaattgacagactttgggctgtccaagatgatagacactgagcagacgtttctcaagacattttgcggtactctgctgtactgcgctcccgaggtgtacacggagtattcttcgtacgacgaccatggtcagcgcacacagagaaggtcccgccagcccatcgacagggaaaggtatgaccatgccgtcgacatctggtctctgggaggcgttctgttctacaccttgacgggcagtcctccatttccggtcaagaacggtattacgtacacggagctgctagatcacatcatcaagacgccgcttaacacgaggccattggaacattacgagatctcaagggttggcattcactttctgaatcggatgattcacgtacgacctgatacacgagccaccatatctgagctacaatctcatgcctggctcaggccccccagcgagtctgtcgatcaacggtcttacgaagacttgggacaatcagcatcgcagctcagcctgaatgacaggcaggcatccgaggctccggcagacagcatgagttctttgggtgagccggaaccggacttttctatggagttcgagtccgagaaggagaatcacacgttcggacagccagccgcccccaggctatttggggaagtctcggccataggcagctccggtgtggtccccgaagatcgcctcaatcttcccatgtccggctccagcttgggcaataaagaccccatcgaatatgaagttcgtgacagctttgacgattccgatgacttctcgactccacgcgagaacatttcggcagatgaaagtaccttgtccgcgatccagactccatcccagcaggataattctcgcagtgtgctctttggtgttggctcccagagcttaggcggtgcatcctcgattcttggcaatctaaccatgaagtctatgcccgtcggggacactggcatatcttcctctcggattagtagcctaggtgccagcaagcgcaaaccagttttcgatacaagcgacgagcacgatacatcatcgtccaaccctaaaccatccattaaaagactgaggtcggaagggggcattaatgacgacgacgaacatgattaccgcctatgggctgacatgccgcagatgatcaagagtgacactggccgccagatcgattatcctttgccgaagacaacgttctgggacggttcagatagaaagacatggcacttgaattatcccgaaatgacccacctgcaatacaatgccttcgagacagccgcagagaataggaaggaggagttcgtgcccggcactcttctctgggacttcgcaatgaaacattttccgcccacgatgagcagtcgcaacagtgatcccggtcgaccccgtgaagcgaagtctagcaatctcatccgaacacagcagccacacactcggtcgagtgaatgggacatgccaccgactgcgccgatagatcagctcgatccgtctacgcttcagctagagagcgaacggcaacgcgatcagacttttcccctttcgcgaaccgttccaccggccaggacggaggtggctagcttcacctctgctacaggctctttggtacccggaatctcaatctctcttcaagaccctcttctttcatggggcagagagcggagtaatacggtcgtatatgagcacgccatggaatcaaaagtgcccaagaatgctttcagggtcatgatgtggagggaaggctacaacgggtcagcgaatgaattccgaccgtgggagccgtcgcgctcgagccgcaccgcacgaatatcacctgagccagactcttatggcttctacatcgcaaccaaggccacaaatggcattcgcattaatggcaatccactgcaggcgcacgacccaaaggacggtacaggtgtctgtaaatattggatgaaattgtacaacggagaccagatcatattttggggtggtgaagaccctcgccaacaagcaaaactcatcttcgagtgctcgtggggcggctcatcaggcccgcgaccatccgacgagcctccaacctgtgtttctaccgcagttgctcagaaacttgaccggctctggcctcgactgacaacgacgttccaacactttcagatcaaaacggaggcacagatggaacaagagatacgactgcggaatatgtcgcaggaggaggaacgcagccgagtatttgagcaaaagcgcttggaggtcatgcggaccatcgccgagcgaagttctcgtgggtcgtctcctgacagtacccattcgacagttcgagtaggactaccgggtctcacaagcccgccgactagtcgatccagatacgaatggtga

SEQ ID NO: 26691 - protein, 1207 aa, Muscodor strobelii
  misc_feature: SGI Peptide ID NO. 569131
  misc_feature (114)..(191): Pfam Id: PF00498 Pfam Desc: FHA domain
  misc_feature (285)..(569): Pfam Id: PF00069 Pfam Desc: Protein kinase domain
  misc_feature (285)..(440): Pfam Id: PF07714 Pfam Desc: Protein tyrosine kinase
  misc_feature (13)..(1174): NCBI GI: 116207022 Blast Desc: CHGG_02804 [Chaetomium globosum CBS 148.51] gi|88183401|gb|EAQ90869.1| CHGG_02804 [Chaetomium globosum CBS 148.51]
  misc_feature (12)..(1176): NCBI GI: 46106694 Blast Desc: FG00433.1 [Gibberella zeae PH-1]
  misc_feature (5)..(1196): NCBI GI: 171680205 Blast Desc: protein product [Podospora anserina] gi|170939729|emb|CAP64955.1| protein product [Podospora anserina]
  misc_feature (1)..(1190): NCBI GI: 256734564 Blast Desc: NECHADRAFT_74959 [Nectria haematococca mpVI 77-13-4]
  misc_feature (13)..(1173): NCBI GI: 145614416 Blast Desc: MGG_04790 [Magnaporthe grisea 70-15] gi|145021345|gb|EDK05474.1| MGG_04790 [Magnaporthe grisea 70-15]
  misc_feature (1)..(1133): NCBI GI: 85111243 Blast Desc: NCU02751 [Neurospora crassa OR74A] gi|28925585|gb|EAA34608.1| [Neurospora crassa OR74A]
  misc_feature (12)..(1096): NCBI GI: 156063464 Blast Desc: SS1G_01850 [Sclerotinia sclerotiorum 1980] gi|154697184|gb|EDN96922.1| SS1G_01850 [Sclerotinia sclerotiorum 1980]
  misc_feature (4)..(1103): NCBI GI: 169602253 Blast Desc: SNOG_04124 [Phaeosphaeria nodorum SN15] gi|111066764|gb|EAT87884.1| SNOG_04124 [Phaeosphaeria nodorum SN15]
  misc_feature (10)..(1126): NCBI GI: 242761325 Blast Desc: protein kinase, [Talaromyces stipitatus ATCC 10500] gi|218723354|gb|EED22771.1| protein kinase, [Talaromyces stipitatus ATCC 10500]
  misc_feature (10)..(1106): NCBI GI: 212539157 Blast Desc: protein kinase, [Penicillium marneffei ATCC 18224] gi|210069476|gb|EEA23567.1| protein kinase, [Penicillium marneffei ATCC 18224]
  misc_feature: Useful for introducing or modulating the production of volatile compounds
MDDDEDSQATQQATQNALDPRRLGQQNSGFSDEDISDIICVLHPNSEAASREIHRIAASPEYGRHTAGRYSVDAIQSDLYREDDAREFGRTRGIGDHALVLRLSSPVKDPRLGFTFGRNASRCDICFTHDPARRLSNIHFRIYVNRHGSVLLEDQSTNGTVVDSHLLKKRPDPRDQRLRRTLESGSKIEILMHESSCDLTFLVRIPRRDGSHEDAYLRNLAAYMQRASGEEEDVNKTIGPGPTGHVNLFAPTPADGLRNPVADKPLALQATIGRLPREWRGGDKYARVGVIGKGAFATVHKVTSKYDGSPYAAKELDKRKFMKNGVLDQKVENEMKIMQKVHHAHIVQYIEHFDWDVHQFIIIMEFVPGGDLGKFISEHGPIAEPHVKTIAEQLVDAVGYLHDNKITHRDVKPDNILIRSTNPLVVKLTDFGLSKMIDTEQTFLKTFCGTLLYCAPEVYTEYSSYDDHGQRTQRRSRQPIDRERYDHAVDIWSLGGVLFYTLTGSPPFPVKNGITYTELLDHIIKTPLNTRPLEHYEISRVGIHFLNRMIHVRPDTRATISELQSHAWLRPPSESVDQRSYEDLGQSASQLSLNDRQASEAPADSMSSLGEPEPDFSMEFESEKENHTFGQPAAPRLFGEVSAIGSSGVVPEDRLNLPMSGSSLGNKDPIEYEVRDSFDDSDDFSTPRENISADESTLSAIQTPSQQDNSRSVLFGVGSQSLGGASSILGNLTMKSMPVGDTGISSSRISSLGASKRKPVFDTSDEHDTSSSNPKPSIKRLRSEGGINDDDEHDYRLWADMPQMIKSDTGRQIDYPLPKTTFWDGSDRKTWHLNYPEMTHLQYNAFETAAENRKEEFVPGTLLWDFAMKHFPPTMSSRNSDPGRPREAKSSNLIRTQQPHTRSSEWDMPPTAPIDQLDPSTLQLESERQRDQTFPLSRTVPPARTEVASFTSATGSLVPGISISLQDPLLSWGRERSNTVVYEHAMESKVPKNAFRVMMWREGYNGSANEFRPWEPSRSSRTARISPEPDSYGFYIATKATNGIRINGNPLQAHDPKDGTGVCKYWMKLYNGDQIIFWGGEDPRQQAKLIFECSWGGSSGPRPSDEPPTCVSTAVAQKLDRLWPRLTTTFQHFQIKTEAQMEQEIRLRNMSQEEERSRVFEQKRLEVMRTIAERSSRGSSPDSTHSTVRVGLPGLTSPPTSRSRYEW

SEQ ID NO: 26692 - DNA, 4494 bp, Muscodor strobelii
  misc_feature: SGI EST ID NO. CUFF.63916.2
  misc_feature: Variant of the nucleotide sequence at SEQ ID NO 26690
gcaaggtgcagaaacggtgggctgggttgccatgggatgatgctcgctgggtagtggtgtcttgtgatttatcacaacatcaacatcgccttcgcttttcactcgtccacatcttccaccacgcagcccttcccgttacctgaccggtgatctgcgaacatgcccatcgtactgtagactatagatttgtccttttgttcagcgcttctttcgctcccttcgaagcaccaagtccaagacgtcgtcgccggccgtccccgataccgtgcacctgccccagctcgcgaatgctgtacttgttatctgtgttgttgaccctgccctgccaacagccaacctcgtagagtatcgtgtgtgccaccaatcgagttgttgctctccctgcgttgccacgcgaggccgcccgcctgcctggacgagctgctggctgtgctggctgtgccggtcgtgctgatcgtgctggacgtgctggatgtgtcgggcactcgctcctgccagccattgagcctctcttgctcccatggacgacgatgaggactcgcaggctacacagcaagccacccagaatgccctcgatccccggcggctcggccagcagaactcgggcttctccgacgaggacatctcggacatcatatgcgtgctgcacccaaactcagaggctgccagccgcgagatccaccgcattgcggcctcgcccgagtacggtcgccacacggccggccgatactcggtcgacgccatccagtcggacctctaccgcgaagacgacgcccgcgagttcggccgcacgcgcggcataggcgaccacgccctggtcctgcgcctctcctcgcccgtcaaggacccccgcctcggcttcaccttcggccgcaacgcctcccgctgcgacatctgcttcacccacgaccccgcccgccggctgagcaacatccacttccgcatctacgtcaaccgccacggcagtgtcctgctcgaggaccagtccaccaacggcaccgtcgtcgactcgcacctgctcaagaagcggcccgacccccgcgaccagcgcctcagacgcaccctcgagagcggctccaagatcgagatcctcatgcacgagagctcctgtgacctgaccttcctcgtccgcatcccccgccgcgacggcagccacgaagacgcctacctgaggaacctggctgcctacatgcagagggccagtggcgaggaggaggatgtgaacaagaccattggccccggcccgaccggccacgtgaacctctttgcgcccacgccggcagacgggctgcgcaacccggtcgccgacaagcccctcgccctgcaagcgaccatcggccgtcttccccgggagtggcgcggcggggacaagtatgctcgagtcggcgtcatcgggaagggcgccttcgccacggtgcacaaagtcacgtccaagtacgacggctcgccctacgcagccaaagagctcgacaagcgcaagttcatgaagaacggcgtgctggatcagaaggtagaaaatgagatgaagatcatgcagaaggttcatcacgtaagccgccccgggccccaagcactggatatttcaccctctcaccttcgcacccccgtccgtcgcgctgtaggctgaactgttcaccaggcccatattgtccaatacattgagcatttcgattgggacgtgcatcagttcatcatcatcatggagtttgttccggggggcgacttgggcaagttcatttcagagcatggcccgattgcagagcctcatgtcaagaccatcgccgagcagcttgtcgacgctgtcggctacttgcacgacaataaaatcacacatcgtgacgtcaagccagacaacattctgatccgctcgacaaatccgcttgttgttaaattgacagactttgggctgtccaagatgatagacactgagcagacgtttctcaagacattttgcggtactctgctgtactgcgctcccgaggtgtacacggagtattcttcgtacgacgaccatggtcagcgcacacagagaaggtcccgccagcccatcgacagggaaaggtatgaccatgccgtcgacatctggtctctgggaggcgttctgttctacaccttgacgggcagtcctccatttccggtcaagaacggtattacgtacacggagctgctagatcacatcatcaagacgccgcttaacacgaggccattggaacattacgagatctcaagggttggcattcactttctgaatcggatgattcacgtacgacctgatacacgagccaccatatctgagctacaatctcatgcctggctcaggccccccagcgagtctgtcgatcaacggtcttacgaagacttgggacaatcagcatcgcagctcagcctgaatgacaggcaggcatccgaggctccggcagacagcatgagttctttgggtgagccggaaccggacttttctatggagttcgagtccgagaaggagaatcacacgttcggacagccagccgcccccaggctatttggggaagtctcggccataggcagctccggtgtggtccccgaagatcgcctcaatcttcccatgtccggctccagcttgggcaataaagaccccatcgaatatgaagttcgtgacagctttgacgattccgatgacttctcgactccacgcgagaacatttcggcagatgaaagtaccttgtccgcgatccagactccatcccagcaggataattctcgcagtgtgctctttggtgttggctcccagagcttaggcggtgcatcctcgattcttggcaatctaaccatgaagtctatgcccgtcggggacactggcatatcttcctctcggattagtagcctaggtgccagcaagcgcaaaccagttttcgatacaagcgacgagcacgatacatcatcgtccaaccctaaaccatccattaaaagactgaggtcggaagggggcattaatgacgacgacgaacatgattaccgcctatgggctgacatgccgcagatgatcaagagtgacactggccgccagatcgattatcctttgccgaagacaacgttctgggacggttcagatagaaagacatggcacttgaattatcccgaaatgacccacctgcaatacaatgccttcgagacagccgcagagaataggaaggaggagttcgtgcccggcactcttctctgggacttcgcaatgaaacattttccgcccacgatgagcagtcgcaacagtgatcccggtcgaccccgtgaagcgaagtctagcaatctcatccgaacacagcagccacacactcggtcgagtgaatgggacatgccaccgactgcgccgatagatcagctcgatccgtctacgcttcagctagagagcgaacggcaacgcgatcagacttttcccctttcgcgaaccgttccaccggccaggacggaggtggctagcttcacctctgctacaggctctttggtacccggaatctcaatctctcttcaagaccctcttctttcatggggcagagagcggagtaatacggtcgtatatgagcacgccatggaatcaaaagtgcccaagaatgctttcagggtcatgatgtggagggaaggctacaacgggtcagcgaatgaattccgaccgtgggagccgtcgcgctcgagccgcaccgcacgaatatcacctgagccagactcttatggcttctacatcgcaaccaaggccacaaatggcattcgcattaatggcaatccactgcaggcgcacgacccaaaggacggtacaggtgtctgtaaatattggatgaaattgtacaacggagaccagatcatattttggggtggtgaagaccctcgccaacaagcaaaactcatcttcgagtgctcgtggggcggctcatcaggcccgcgaccatccgacgagcctccaacctgtgtttctaccgcagttgctcagaaacttgaccggctctggcctcgactgacaacgacgttccaacactttcagatcaaaacggaggcacagatggaacaagagatacgactgcggaatatgtcgcaggaggaggaacgcagccgagtatttgagcaaaagcgcttggaggtcatgcggaccatcgccgagcgaagttctcgtgggtcgtctcctgacagtacccattcgacagttcgagtaggactaccgggtctcacaagcccgccgactagtcgatccagatacgaatggtgagaggcatgtacgttctcgaagacacacaaaattaagcaaattacttatccgatcttgttgccacatttgtcgagatatacccatggcgccccttgcggctttgattgcaaggaccctagttattgatgcaatgtcaactaggtagggaagtaggtggaggtggaggcacgaagcgatctatggcagtgtttgttaatattagcaggtaatctaggtagcatatagcaaacaatatattcataatacatatcttgagggaa

SEQ ID NO: 26693 - DNA, 2538 bp, Muscodor strobelii
  misc_feature: SGI cDNA ID NO. 569132
  misc_feature: Encodes the peptide sequence at SEQ ID NO 26694
atgggcctctttgccaaaactcgtcatcgctctcagagctgtggcactctggcctccaattcgtgttgggacgatgaagacggtgaacttatgttgcccggagatgatggagtctttctcaccaagacaaaactcggacagccagcactgggccgacgaaaatccaacaagttattgactagtgctcacttcgatctgctcgcagagagtgttggcgtcccgtcccgagggacatttgttgacaagccgcgaccagcgagccccagctctcagagctcaggcgtcctcacgccgataaagtctcagggttcaaagaaaggcgagcaacagagacatgacactcgtaaaaggtacggcaatagtggcgtcggttcactcgcagccgcttctgaaatagggccaagtgttatctcagccgaacccattgccgacaacatgaaccaccaaagcaaacagacatccgcctctggagcaagtcgtgttctcccgtctggctattacaatctggcctttccatctgataataaccagccttatccgccagttgcgatcccgtggaatcaataccccatgacgaacagcaatactggctttggcgcaccaccctattccgtcatggattctagcttttcgcctctgtttcattattgttatcccatcaacaccgcatccctcggccccccttccttcatagctacgcaacacaccacggttggtcccggctcgaacgcattcggccttccccaaaatctggcagcgcctgtgaccacacagacatgcaatcaacaaacaaccactcctgtcccgctatatcattcagtcatgcgaaacatgcctacgaatcacgctatcaccgtgcctccgcctccgcctccgccagccgagtgggtcagatcctctgccattcctattaatcctcacatgtttttcgagccaaacaagggggaacgcagcagtagaagcatcaacaaggttgccggatcggctacgaggaatgaacattcagctcttaacacagaactgcttggaagctggcaggatccacgtgttggtgaccaaattcatcatctccatatatgggtgaaatcccgccgccggcttactgtgctcgctgtcgacatgaagcagccgaaacgctccggttttacagcgagagcagcagcggtaataataccgactggtctagaggacccgaaaccaagtcaaccgcgcaggttattcaagaccctggcggtgaagcagcgcaggttcatcgatggcgcaggcctcgctggcccgggcgctctcaagcacttgcttcaatctccaggttgttctcacgcaaggctacatctcataatcgtgaaccatcaaaatcaccatatcgtgccgggaagtcaaggagagctcggtcttacatcagagttccaagtgactctaccccacacagggacttgggagagggcgatagtgtctgctcccggtcaaattcagtccacgacgactcacgaaaatcgcagtcaacgaaggaaacacctcagaagaaagacgcacaggggcaaggctcggtatgtgccacctgtggtgtcaacagtcgattctgaggacactatgtcaaatctgcatgcttctcacatcggacaacaagcaagaagggccgctgaagcgtcaacttcgatgtcccccaagcagacggaagagtctaggtctcctgagcgtcaatatgagaaacaaaccgggcggcatggccatcctcgacgagcgattgcacccgccttaagagttgtagtcaagagtgatgagaaaagaacacgggttccgttatcttcgcatattgagcctgtctcagttcatgaatctgagagtcacgtcggtccgaaaactgacgataagttcgatgaacatgccagcggcgacgtactggaccaaccactcggcgagccctctgagataccccaattcgattgggacgaacctgcgacgcctagggacaacgagtggtctttcacggccgctttcccttgctctgtgaatgactcctggtcccaggatctgtcaaatttagagcacactgccgaagagatggcccaacacgagttggcttcagcagggaaattcttcggtagcttcgaagaatttccacatccttcgtcgagcacatttcaccctgttatcagccctgtagtgcacagcagcatttccattatgagttgtgaatcggatgccaacagtaatcccaatatggctgcgtcgcctgttgcgtacgactcgtcaacagaggagccaaactcgtcaacagaggaagggaatatggtggcgaaacaaatagaatttgcgaatgagcgagaacagaaacgaaaagcgcccggcactcgctacgatcgttctgaagttgttgtatatcgaccctctgcgtctattggtcgccagggaaagaatctgtacaggagtgtggacagtgaagcgaatgctgacggtgttgattttcactgtgcgccgtcacccatcggatcgtctcttattagccatacaggacattcgacagacgaggcattttag

SEQ ID NO: 26694 - protein, 845 aa, Muscodor strobelii
  misc_feature: SGI Peptide ID NO. 569132
MGLFAKTRHRSQSCGTLASNSCWDDEDGELMLPGDDGVFLTKTKLGQPALGRRKSNKLLTSAHFDLLAESVGVPSRGTFVDKPRPASPSSQSSGVLTPIKSQGSKKGEQQRHDTRKRYGNSGVGSLAAASEIGPSVISAEPIADNMNHQSKQTSASGASRVLPSGYYNLAFPSDNNQPYPPVAIPWNQYPMTNSNTGFGAPPYSVMDSSFSPLFHYCYPINTASLGPPSFIATQHTTVGPGSNAFGLPQNLAAPVTTQTCNQQTTTPVPLYHSVMRNMPTNHAITVPPPPPPPAEWVRSSAIPINPHMFFEPNKGERSSRSINKVAGSATRNEHSALNTELLGSWQDPRVGDQIHHLHIWVKSRRRLTVLAVDMKQPKRSGFTARAAAVIIPTGLEDPKPSQPRRLFKTLAVKQRRFIDGAGLAGPGALKHLLQSPGCSHARLHLIIVNHQNHHIVPGSQGELGLTSEFQVTLPHTGTWERAIVSAPGQIQSTTTHENRSQRRKHLRRKTHRGKARYVPPVVSTVDSEDTMSNLHASHIGQQARRAAEASTSMSPKQTEESRSPERQYEKQTGRHGHPRRAIAPALRVVVKSDEKRTRVPLSSHIEPVSVHESESHVGPKTDDKFDEHASGDVLDQPLGEPSEIPQFDWDEPATPRDNEWSFTAAFPCSVNDSWSQDLSNLEHTAEEMAQHELASAGKFFGSFEEFPHPSSSTFHPVISPVVHSSISIMSCESDANSNPNMAASPVAYDSSTEEPNSSTEEGNMVAKQIEFANEREQKRKAPGTRYDRSEVVVYRPSASIGRQGKNLYRSVDSEANADGVDFHCAPSPIGSSLISHTGHSTDEAF

SEQ ID NO: 26695 - DNA, 3158 bp, Muscodor strobelii
  misc_feature: SGI EST ID NO. CUFF.62937.0
  misc_feature: Variant of the nucleotide sequence at SEQ ID NO 26693
gtctttctcaccaagacaaaactcggacagccagcactgggccgacgaaaatccaacaagttattgactagtgctcacttcgatctgctcgcagagagtgttggcgtcccgtcccgagggacatttgttgacaagccgcgaccagcgagccccagctctcagagctcaggcgtcctcacgccgataaagtctcagggttcaaagaaaggcgagcaacagagacatgacactcgtaaaaggtacggcaatagtggcgtcggttcactcgcagccgcttctgaaatagggccaagtgttatctcagccgaacccattgccgacaacatgaaccaccaaagcaaacagacatccgcctctggagcaagtcgtgttctcccgtctggctattacaatctggcctttccatctgataataaccagccttatccgccagttgcgatcccgtggaatcaataccccatgacgaacagcaatactggctttggcgcaccaccctattccgtcatggattctagcttttcgcctctgtttcattattgttatcccatcaacaccgcatccctcggccccccttccttcatagctacgcaacacaccacggttggtcccggctcgaacgcattcggccttccccaaaatctggcagcgcctgtgaccacacagacatgcaatcaacaaacaaccactcctgtcccgctatatcattcagtcatgcgaaacatgcctacgaatcacgctatcaccgtgcctccgcctccgcctccgccagccgagtgggtcagatcctctgccattcctattaatcctcacatgtttttcgagccaaacaagggggaacgcagcagtagaagcatcaacaaggttgccggatcggctacgaggaatgaacattcagctcttaacacagaactgcttggaagctggcaggatccacgtgttggtgaccaaattcatcatctccatatatgtaggggatgtgggaaaaagcgatcccgacattatcatcaaacccacccgctccgtaggggtgaaatcccgccgccggcttactgtgctcgctgtcgacatgaagcagccgaaacgctccggttttacagcgagagcagcagcggtaataataccgactggtctagaggacccgaaaccaagtcaaccgcgcaggttattcaagaccctggcggtgaagcagcgcaggttcatcgatggcgcaggcctcgctggcccgggcgctctcaagcacttgcttcaatctccaggttgttctcacgcaaggctacatctcataatcgtgaaccatcaaaatcaccatatcgtgccgggaagtcaaggagagctcggtcttacatcagagttccaagtgactctaccccacacagggacttgggagagggcgatagtgtctgctcccggtcaaattcagtccacgacgactcacgaaaatcgcagtcaacgaaggaaacacctcaggtaacctcttgctcgccgcttgtgcctcggaagcaggagtccagagggccgcaagagatatacagtacatttccagccgacgagtctgcgcgaggttcgaaaggaaccgcccttcgtcgtcgcgctcgagattccagtcaacatacagaaccgacaactacatctatcgtagaagaaagcctcttacacaaagatagccaacaatgtagtagctcctcgtcacccgaagtggatgattcgccgtcaaccagaagaaagacgcacaggggcaaggctcggtatgtgccacctgtggtgtcaacagtcgattctgaggacactatgtcaaatctgcatgcttctcacatcggacaacaagcaagaagggccgctgaagcgtcaacttcgatgtcccccaagcagacggaagagtctaggtctcctgagcgtcaatatgagaaacaaaccgggcggcatggccatcctcgacgagcgattgcacccgccttaagagttgtagtcaagagtgatgagaaaagaacacgggttccgttatcttcgcatattgagcctgtctcagttcatgaatctgagagtcacgtcggtccgaaaactgacgataagttcgatgaacatgccagcggcgacgtactggaccaaccactcggcgagccctctgagataccccaattcgattgggacgaacctgcgacgcctagggacaacgagtggtctttcacggccgctttcccttgctctgtgaatgactcctggtcccaggatctgtcaaatttagagcacactgccgaagagatggcccaacacgagttggcttcagcagggaaattcttcggtagcttcgaagaatttccacatccttcgtcgagcacatttcaccctgttatcagccctgtagtgcacagcagcatttccattatgagttgtgaatcggatgccaacagtaatcccaatatggctgcgtcgcctgttgcgtacgactcgtcaacagaggagccaaactcgtcaacagaggaagggaatatggtggcgaaacaaatagaatttgcgaatgagcgagaacagaaacgaaaagcgcccggcactcgctacgatcgttctgaagttgttgtatatcgaccctctgcgtctattggtcgccagggaaagaatctgtacaggagtgtggacagtgaagcgaatgctgacggtgttgattttcactgtgcgccgtcacccatcggatcgtctcttattagccatacaggacattcgacagacgaggcattttagggaccagacaggtgtatcatagtgcaacgagacttgatgcattgtcttccccagatacaatcctggcccgtagccaaggagttctgttgagtacggagagtggtggacggggatgaatgactgttggtttttgttagattagttcggactgagaagggaggaaaattagatcgcagtatacgtgcctaagagggaaaaaatcaatgcaccaactatctttcaccacctttcctcagccctgatgataaagaaccgcgagatgtccgagactcaaggtaaggctttgcctttcttgtaatgggctatagcttttgattatgtagaactaaagagaattctccgactgaactattgtatatatgattaccggcaagggtaacggtttaggtaaaggataatctagagcattcacccgatcgatg

SEQ ID NO: 26696 - DNA, 1020 bp, Muscodor strobelii
  misc_feature: SGI cDNA ID NO. 569133
  misc_feature: Encodes the peptide sequence at SEQ ID NO 26697
atgtgtcgtagaatcaacggtatggcacacgtgcttttgttggtcgcaactctcacaaatgctatcactattcctggatacggactcaagagcaacggcaagcattttgcaacacaggatggcgcttttttcttctggcaggcggataccgcatggggcatgtttcatagatggacactcaatgagacgacggcttatttggacgaccgcgcagccaagggcttcaacgtggtattatcggttggttttacacagtttggcatctcaactccaaaccgagaaggcgatcttcccttcgtggacttggacccaacaaaatggaatgagccgtggcttggtgcctgcatggggttcctatgtacacggaagtgtaagtactatgactgtcaagtaaacgccgggttatctgtgaaagacgactacgcagctggaggcgtatcacccacttacgagtttacaaattggctgcctatatacgacgagctcgctgatggattgatcgcgggcgagggagaggatggtgatccaccacccatgatcaccatacattgcacaaaccagtggtttataggcgggcccatcgccatcgcctcgcggcaggtcgaaaataggacttggctcacgtttgactcaagccagtctggccacgccgattacccaccaaacccgccgattccatggtggaacgcccgtcgtggatgggagcccgtggagcacatgtactcgggtgagcgagatttgccactagtcgacaatgaagcacattatgaaggccgatacaataacggaaattcgaacttgactgcatggacagccgacgacgtgcggatcgggagctggcaagcggtattgtctggcgcatccggtctgacttatggccatgatatggtgatgcaagcatacgtgcccggcgttcagtataacccttctactcgtgccgaaggcttggcaacaaccatcaaactcaaggctacagcgattgattctggatcattacggtttggtagaaagacacactaa

SEQ ID NO: 26697 - protein, 339 aa, Muscodor strobelii
  misc_feature: SGI Peptide ID NO. 569133
  misc_feature (30)..(283): NCBI GI: 238502813 Blast Desc: conserved [Aspergillus flavus NRRL3357] gi|220691450|gb|EED47798.1| conserved [Aspergillus flavus NRRL3357]
  misc_feature (32)..(285): NCBI GI: 67522669 Blast Desc: AN1791.2 [Aspergillus nidulans FGSC A4] gi|40744811|gb|EAA63967.1| AN1791.2 [Aspergillus nidulans FGSC A4] gi|259487137|tpe|CBF85569.1| TPA: conserved [Aspergillus FGSC
  misc_feature (136)..(283): NCBI GI: 169776121 Blast Desc: [Aspergillus oryzae RIB40] gi|83771262|dbj|BAE61394.1| protein product [Aspergillus oryzae]
  misc_feature (22)..(323): NCBI GI: 206900994 Blast Desc: DICTH_0258 [Dictyoglomus thermophilum H-6-12] gi|206740097|gb|ACI19155.1| conserved [Dictyoglomus thermophilum H-6-12]
  misc_feature (22)..(313): NCBI GI: 217966814 Blast Desc: Dtur_0402 [Dictyoglomus turgidum DSM 6724] gi|217335913|gb|ACK41706.1| conserved [Dictyoglomus turgidum DSM 6724]
  misc_feature (11)..(303): NCBI GI: 254292824 Blast Desc: Hbal_0448 [Hirschia baltica ATCC 49814] gi|254041355|gb|ACT58150.1| conserved [Hirschia baltica ATCC 49814]
  misc_feature (29)..(312): NCBI GI: 269839684 Blast Desc: Tter_2666 [Thermobaculum terrenum ATCC BAA-798] gi|269791414|gb|ACZ43554.1| Tter_2666 [Thermobaculum terrenum ATCC BAA-798]
  misc_feature (22)..(311): NCBI GI: 156742158 Blast Desc: Rcas_2186 [Roseiflexus castenholzii DSM 13941] gi|156233486|gb|ABU58269.1| conserved [Roseiflexus castenholzii DSM 13941]
  misc_feature (22)..(303): NCBI GI: 148655939 Blast Desc: RoseRS_1804 [Roseiflexus sp. RS-1] gi|148568049|gb|ABQ90194.1| RoseRS_1804 [Roseiflexus sp. RS-1]
  misc_feature (29)..(301): NCBI GI: 284041164 Blast Desc: Slin_6336 [Spirosoma linguale DSM 74] gi|283820457|gb|ADB42295.1| conserved [Spirosoma linguale DSM 74]
MCRRINGMAHVLLLVATLTNAITIPGYGLKSNGKHFATQDGAFFFWQADTAWGMFHRWTLNETTAYLDDRAAKGFNVVLSVGFTQFGISTPNREGDLPFVDLDPTKWNEPWLGACMGFLCTRKCKYYDCQVNAGLSVKDDYAAGGVSPTYEFTNWLPIYDELADGLIAGEGEDGDPPPMITIHCTNQWFIGGPIAIASRQVENRTWLTFDSSQSGHADYPPNPPIPWWNARRGWEPVEHMYSGERDLPLVDNEAHYEGRYNNGNSNLTAWTADDVRIGSWQAVLSGASGLTYGHDMVMQAYVPGVQYNPSTRAEGLATTIKLKATAIDSGSLRFGRKTH

SEQ ID NO: 26698 - DNA, 931 bp, Muscodor strobelii
  misc_feature: SGI EST ID NO. CUFF.62940.0
  misc_feature: Variant of the nucleotide sequence at SEQ ID NO 26696
aaataactaacctgctactaacctttctggctactaggcttggtgcctgcatggggttcctatgtacacggaagtggtaagggaaatgcaattcgatcagtttcgcactcaacatggagctgaaaacacgaggaagataacagagggagttatatcaacgcatctaatgcccgaatctttggaagtctcgtaagtactatgactgtcaagtaaacgccgggttatgtgagtagaataactcatagcgggcttgcctggccattagatgggtgctcggtatccggggctgcccaagatcatcgttgcagatacaaatccgggtggatgaacaaaacagctgtgaaagacgactacgcagctggaggcgtatcacccacttacgagtttacaaattggctgcctatatacgacgagctcgctgatggattgatcgcgggcgagggagaggatggtgatccaccacccatgatcaccatacattgcacaaaccagtggtttataggcgggcccatcgccatcgcctcgcggcaggtcgaaaataggacttggctcacgtttgactcaagccagtctggccacgccgattacccaccaaacccgccgattccatggtggaacgcccgtcgtggatgggagcccgtggagcacatgtactcgggtgagcgagatttgccactagtcgacaatgaagcacattatgaaggccgatacaataacggaaattcgaacttgactgcatggacagccgacgacgtgcggatcgggagctggcaagcggtgtgtttatcgccgtatctatattatcaaccccttcccaccggggcgatcatctgctcccgatgctatgctgactagaaatgataggtattgtctggcgcatccggtctgacttatggccatgatatggtgatgcaagcatacgtgcccggcg

SEQ ID NO: 26699 - DNA, 2283 bp, Muscodor strobelii
  misc_feature: SGI cDNA ID NO. 569134
  misc_feature: Reduced expression when VOC is produced
  misc_feature: Encodes the peptide sequence at SEQ ID NO 26700
atggcggcgcagtcatcgcagtcatcgcgcggcacggcggtggagcagctgctggcgctggggcgggacgagaagacgcagacgacgctcaagttcgtgatcctggcgctgatcgcggcggcggcggtggccagccggctgttctcggtgatccggttcgagagcatcatccacgagttcgacccgtggttcaacttccgggcgaccaagtacctggtggcgcacggcttcacgcagttctgggactggttcgacgaccgcacctggcacccgctcggccgcgtcaccggcggcacgctgtacccgggcctgatggtcacgtcgggcgccatctaccacctgctgcgcttcctcgccgtccccgtcgacatccgcaacatctgcgtgctgctggccccggcctgctccgggctcaccgcctacgcctcgtacctgctgaccaacgagatggcgccctcgcgctccgcctcggccggcctgctcgccgccgtcttcatgggcatcgcccccggctacatctcccgctccgtcgccggctcctacgacaacgaggccatcgccatcttcctgctcgtcttcaccttctacctgtggatcaaggccctcaagcagggctccgtgctgtggggcgccctgtgcgccctcttctacggctacatggtcgcctcctggggcggctacgccttcatcacctgcctcgtgcccctgcacgccttcgtcctcgtctgcatgggccgcttcagcaaccgcctctacgtcgcctacaccacctggtacgccctcggcaccctcgccagcatgcagatcccctttgtcggcttcctgcccgtccgcacctccgagcacatgcccgccctcggcatcttcggcttcctccagatcgtcgccttcctcgagtacgtccgctccgccgtccccagccgccagttccagaccttcctctacgtcggcctcggcggcatcttcggcgtcggcatcctcggcctcgtcgggctcaccgcgggaggctacatcgccccctggtccggccgcttctactcgctctgggacacgggctacgccaagatccacatccccatcatcgcctccgtctcggagcatcagcccacagcctggcctgccttcttcttcgacctcaacatgctcatctggctcttccccgccggtgtctacatgtgcttccagaagctcgaggacgagcatgtcttcatcatcgtctacgccttgtttggcagctactttgccggcgtcatggtccgtctgatgctcaccctgacccccgtcgtctgcgtcgccgccgccatcgccgcctcgcagctgctcgacacctacctgcagtacaagtcgcccgtccccaccgacgacaaggacgaggaggccagcgaggccaccgccaagaaggcgcccaagcagggggccctgcgcgcgaccgcacagcccgtcgtcggcatctacacccttctctccaagggcttcgtagccggctgcatgacgctctacctcctcatcttcgtccagcactgcacgtgggtcacctccaacgcctactcctcgccctccgtcgtcttggcgagccgcatgcccgacggcagccagcacatcatcgacgactaccgtgaggcctaccagtggctgcgccagaacaccaaggaagacgccaagatcatgtcgtggtgggactacggctaccagatcggcggcatggccgaccggccgaccctcgtcgacaacaacacctggaacaacacacacatcgccaccgtcggcaaggccatgagctcgcgcgaggaggtgagctactccatcatgcgccagcacgaagtggactacgtcctcgtcgtcttcggtggtctcctgggctattcgggcgacgacatcaacaagttcctgtggatggtgagaatcgccgagggcatctggcccgacgaggtcaaggaacgcgatttcttcacgccccgcggcgagtacaaagtagacggagacgctaccgagacgatgaagaacagtctcatgtataaaatgtcgtattacaactacggctctctgttccctccgggacaagccactgatcgggtacgcggcgtgcgacttcccgaccaggggcccgtcctcaatacactggaggaggcttacacgtccgagaactggatcatccgcatctacaaggtcaaggatctcgacaacgtgggacgagaccacgccgctgcggcttcgtttgagcgaggacataagaagaagaaggccaacaagaagcgcgggcctagagtgctgagaatagactaa

SEQ ID NO: 26700 - protein, 760 aa, Muscodor strobelii
  misc_feature: SGI Peptide ID NO. 569134
  misc_feature (29)..(684): Pfam Id: PF02516 Pfam Desc: Oligosaccharyl transferase STT3 subunit
  misc_feature (13)..(760): NCBI GI: 164427783 Blast Desc: oligosaccharyl transferase STT3 subunit [Neurospora crassa OR74A] gi|38567210|emb|CAE76502.1| oligosaccharyltransferase [Neurospora crassa] oligosaccharyl STT3
  misc_feature (15)..(760): NCBI GI: 256735283 Blast Desc: glycosyltransferase family 66 [Nectria haematococca mpVI 77-13-4]
  misc_feature (14)..(760): NCBI GI: 116207026 Blast Desc: CHGG_02806 [Chaetomium globosum CBS 148.51] gi|88183403|gb|EAQ90871.1| CHGG_02806 [Chaetomium globosum CBS 148.51]
  misc_feature (24)..(760): NCBI GI: 154319121 Blast Desc: BC1G_02512 [Botryotinia fuckeliana B05.10] gi|150856943|gb|EDN32135.1| BC1G_02512 [Botryotinia fuckeliana B05.10]
  misc_feature (22)..(760): NCBI GI: 145614426 Blast Desc: MGG_04773 [Magnaporthe grisea 70-15] gi|145021351|gb|EDK05480.1| MGG_04773 [Magnaporthe grisea 70-15]
  misc_feature (1)..(760): NCBI GI: 261357536 Blast Desc: oligosaccharyl transferase STT3 subunit [Verticillium albo-atrum VaMs.102]
  misc_feature (16)..(760): NCBI GI: 189203461 Blast Desc: oligosaccharyl transferase stt3 subunit [Pyrenophora tritici-repentis Pt-1C-BFP] gi|187985165|gb|EDU50653.1| oligosaccharyl transferase stt3 subunit [Pyrenophora Pt-1C-BFP]
  misc_feature (12)..(760): NCBI GI: 119484176 Blast Desc: oligosaccharyl transferase subunit (Stt3), [Neosartorya fischeri NRRL 181] gi|119410147|gb|EAW20094.1| oligosaccharyl transferase subunit (Stt3), [Neosartorya fischeri
  misc_feature (39)..(760): NCBI GI: 171680201 Blast Desc: protein product [Podospora anserina] gi|170939727|emb|CAP64953.1| protein product [Podospora anserina]
  misc_feature (12)..(760): NCBI GI: 169784440 Blast Desc: [Aspergillus oryzae RIB40] gi|238508422|ref|XP_002385405.1| oligosaccharyl transferase subunit (Stt3), [Aspergillus flavus NRRL3357] protein product
  misc_feature (45)..(742): SWISSPROT Homolog: EC 2.4.1.119 Dolichyl-diphosphooligosaccharide--protein glycotransferase
  misc_feature: Useful for introducing or modulating the production of volatile compounds
MAAQSSQSSRGTAVEQLLALGRDEKTQTTLKFVILALIAAAAVASRLFSVIRFESIIHEFDPWFNFRATKYLVAHGFTQFWDWFDDRTWHPLGRVTGGTLYPGLMVTSGAIYHLLRFLAVPVDIRNICVLLAPACSGLTAYASYLLTNEMAPSRSASAGLLAAVFMGIAPGYISRSVAGSYDNEAIAIFLLVFTFYLWIKALKQGSVLWGALCALFYGYMVASWGGYAFITCLVPLHAFVLVCMGRFSNRLYVAYTTWYALGTLASMQIPFVGFLPVRTSEHMPALGIFGFLQIVAFLEYVRSAVPSRQFQTFLYVGLGGIFGVGILGLVGLTAGGYIAPWSGRFYSLWDTGYAKIHIPIIASVSEHQPTAWPAFFFDLNMLIWLFPAGVYMCFQKLEDEHVFIIVYALFGSYFAGVMVRLMLTLTPVVCVAAAIAASQLLDTYLQYKSPVPTDDKDEEASEATAKKAPKQGALRATAQPVVGIYTLLSKGFVAGCMTLYLLIFVQHCTWVTSNAYSSPSVVLASRMPDGSQHIIDDYREAYQWLRQNTKEDAKIMSWWDYGYQIGGMADRPTLVDNNTWNNTHIATVGKAMSSREEVSYSIMRQHEVDYVLVVFGGLLGYSGDDINKFLWMVRIAEGIWPDEVKERDFFTPRGEYKVDGDATETMKNSLMYKMSYYNYGSLFPPGQATDRVRGVRLPDQGPVLNTLEEAYTSENWIIRIYKVKDLDNVGRDHAAAASFERGHKKKKANKKRGPRVLRID

SEQ ID NO: 26701 - DNA, 2981 bp, Muscodor strobelii
  misc_feature: SGI EST ID NO. CUFF.63128.2
  misc_feature: Variant of the nucleotide sequence at SEQ ID NO 26699
gcggaaagctccccatgcagccaaagccgtacagctgtcctcatccccatgagagctacttcaacggcgcactcgtcaacgtcgacatcgaacgcagccagtcaattgcatgcaggacatggtgcgatgcccggaacctagtgtctgacacgacagacagatagatagcatcggcattgacagcgacgcaacgccgtctacctctttctttcttttccccttcccttcccctttcgtctctctctctctctctctcactctctccccctcacacccaaagctcaaacacaatcgacatagatgcgcggccagtgaaaacgaagacgacaactccgatgacgatgacgatggcggcgcagtcatcgcagtcatcgcgcggcacggcggtggagcagctgctggcgctggggcgggacgagaagacgcagacgacgctcaagttcgtgatcctggcgctgatcgcggcggcggcggtggccagccggctgttctcggtgatccggttcgagagcatcatccacgagttcgacccgtggttcaacttccgggcgaccaagtacctggtggcgcacggcttcacgcagttctgggactggttcgacgaccgcacctggcacccgctcggccgcgtcaccggcggcacgctgtacccgggcctgatggtcacgtcgggcgccatctaccacctgctgcgcttcctcgccgtccccgtcgacatccgcaacatctgcgtgctgctggccccggcctgctccgggctcaccgcctacgcctcgtacctgctgaccaacgagatggcgccctcgcgctccgcctcggccggcctgctcgccgccgtcttcatgggcatcgcccccggctacatctcccgctccgtcgccggctcctacgacaacgaggccatcgccatcttcctgctcgtcttcaccttctacctgtggatcaaggccctcaagcagggctccgtgctgtggggcgccctgtgcgccctcttctacggctacatggtcgcctcctggggcggctacgccttcatcacctgcctcgtgcccctgcacgccttcgtcctcgtctgcatgggccgcttcagcaaccgcctctacgtcgcctacaccacctggtacgccctcggcaccctcgccagcatgcagatcccctttgtcggcttcctgcccgtccgcacctccgagcacatgcccgccctcggcatcttcggcttcctccagatcgtcgccttcctcgagtacgtccgctccgccgtccccagccgccagttccagaccttcctctacgtcggcctcggcggcatcttcggcgtcggcatcctcggcctcgtcgggctcaccgcgggaggctacatcgccccctggtccggccgcttctactcgctctgggacacgggctacgccaagatccacatccccatcatcgcctccgtctcggagcatcagcccacagcctggcctgccttcttcttcgacctcaacatgctcatctggctcttccccgccggtgtctacatgtgcttccagaagctcgaggacgagcatgtcttcatcatcgtctacgccttgtttggcagctactttgccggcgtcatggtccgtctgatgctcaccctgacccccgtcgtctgcgtcgccgccgccatcgccgcctcgcagctgctcgacacctacctgcagtacaagtcgcccgtccccaccgacgacaaggacgaggaggccagcgaggccaccgccaagaaggcgcccaagcagggggccctgcgcgcgaccgcacagcccgtcgtcggcatctacacccttctctccaagggcttcgtagccggctgcatgacgctctacctcctcatcttcgtccagcactgcacgtgggtcacctccaacgcctactcctcgccctccgtcgtcttggcgagccgcatgcccgacggcagccagcacatcatcgacgactaccgtgaggcctaccagtggctgcgccagaacaccaaggaagacgccaagatcatgtcgtggtgggactacggctaccagatcggcggcatggccgaccggccgaccctcgtcgacaacaacacctggaacaacacacacatcgccaccgtcggcaaggccatgagctcgcgcgaggaggtgagctactccatcatgcgccagcacgaagtggactacgtcctcgtcgtcttcggtggtctcctgggctattcgggcgacgacatcaacaagttcctgtggatggtgagaatcgccgagggcatctggcccgacgaggtcaaggaacgcgatttcttcacgccccgcggcgagtacaaagtagacggagacgctaccgagacgatgaagaacagtctcatgtataaaatgtcgtattacaactacggctctctgttccctccgggacaagccactgatcgggtacgcggcgtgcgacttcccgaccaggggcccgtcctcaatacactggaggaggcttacacgtccgagaactggatcatccgcatctacaaggtcaaggatctcgacaacgtgggacgagaccacgccgctgcggcttcgtttgagcgaggacataagaagaagaaggccaacaagaagcgcgggcctagagtgctgagaatagactaaagagatgtgataggcacgctataaaatttgtttagcaagaaaacaaggatgtccgtcgaagctacccggttgtctacagggcaggggacctcgacgtgagatgattgtaccttatgtaaaaaggagccataaaatgaatgattttttttactttcgctttttgtgcataaagctcacaatggaccttggtggctcgttgtctgcagccagatggctatcgggctaagaaggatgagggtaaaattcgccttgtctatgaatgaggaaatatatatgtatatgtatatatatccaacatgtatctcgagttagccgtgacgggactcatttgtggattatttactagattat

SEQ ID NO: 26702 - DNA, 288 bp, Muscodor strobelii
  misc_feature: SGI cDNA ID NO. 569135
  misc_feature: Reduced expression when VOC is produced
  misc_feature: Encodes the peptide sequence at SEQ ID NO 26703
atgtctgccacttccggggtcaatgtacttcggtactcggccctcgccttcggcgtcttctacggcttcagccaccagcgcaacatcaccgccgcccagaagaccgccgccagcaagaaggtctacgagcacaagcaacacctgatagaccaggccaaggccgagtacacgagatccaaggcccccgcctcctcgtccgccagcagcaccggcctgaaccaagaccccatgagcgccagcttcgacctcgaagcctacatgaacgccctcatggcccagaaggcatag

SEQ ID NO: 26703 - protein, 95 aa, Muscodor strobelii
  misc_feature: SGI Peptide ID NO. 569135
  misc_feature (1)..(94): Pfam Id: PF05680 Pfam Desc: ATP synthase E chain
  misc_feature (1)..(90): NCBI GI: 261357535 Blast Desc: VDBG_06072 [Verticillium albo-atrum VaMs.102]
  misc_feature (3)..(93): NCBI GI: 156063474 Blast Desc: [Sclerotinia sclerotiorum 1980] gi|154697189|gb|EDN96927.1| [Sclerotinia sclerotiorum 1980]
  misc_feature (6)..(93): NCBI GI: 85091465 Blast Desc: NCU09143 [Neurospora crassa OR74A] gi|28920306|gb|EAA29679.1| [Neurospora crassa OR74A]
  misc_feature (1)..(93): NCBI GI: 145614428 Blast Desc: MGG_04772 [Magnaporthe grisea 70-15] gi|145021352|gb|EDK05481.1| MGG_04772 [Magnaporthe grisea 70-15]
  misc_feature (1)..(94): NCBI GI: 116182368 Blast Desc: CHGG_01812 [Chaetomium globosum CBS 148.51] gi|88186109|gb|EAQ93577.1| CHGG_01812 [Chaetomium globosum CBS 148.51]
  misc_feature (3)..(93): NCBI GI: 154319119 Blast Desc: BC1G_02511 [Botryotinia fuckeliana B05.10] gi|150856942|gb|EDN32134.1| BC1G_02511 [Botryotinia fuckeliana B05.10]
  misc_feature (1)..(88): NCBI GI: 261197930 Blast Desc: conserved [Ajellomyces dermatitidis SLH14081] gi|239595330|gb|EEQ77911.1| conserved [Ajellomyces dermatitidis SLH14081]
  misc_feature (1)..(95): NCBI GI: 239607821 Blast Desc: conserved [Ajellomyces dermatitidis ER-3]
  misc_feature (1)..(95): NCBI GI: 154283521 Blast Desc: [Ajellomyces capsulatus NAm1] gi|150410736|gb|EDN06124.1| [Ajellomyces capsulatus NAm1] gi|225561878|gb|EEH10158.1| conserved [Ajellomyces capsulatus
  misc_feature (1)..(95): NCBI GI: 225679233 Blast Desc: PABG_00080 [Paracoccidioides brasiliensis Pb03]
  misc_feature: Useful for introducing or modulating the production of volatile compounds
MSATSGVNVLRYSALAFGVFYGFSHQRNITAAQKTAASKKVYEHKQHLIDQAKAEYTRSKAPASSSASSTGLNQDPMSASFDLEAYMNALMAQKA

SEQ ID NO: 26704 - DNA, 1071 bp, Muscodor strobelii
  misc_feature: SGI EST ID NO. CUFF.63067.0
  misc_feature: Variant of the nucleotide sequence at SEQ ID NO 26702
gatgtacagtactgaggcagggacgaagcaggtggtaacaattttcagagctccgtcgacccgactcgctccgatcattaattgacactcaactgctacctcaacttgttgcccgcaacgcacctgcccattgacctttcctccgcccacctctgcgcttggatctaagagtcattccactgctgccccggcgccctccgcctcgtcctcgtctcccatcccaccgcgactcgattgcgcgaaaaaagagaggagcccagacacgccgacgacagcgatgtctgccacttccggggtcaatgtgcgtatcttagattatccagcctcgggacaccctgttgatcgcgctcgctacaggtacttcggtactcggccctcgccttcggcgtcttctacggcttcagccaccagcgcaacatcaccgccgcccagaagaccgccgccagcaagaaggtctacgagcacaagcaacacctgatagaccaggccaaggccgagtacacgagatccaaggcccccgcctcctcgtccgccagcagcaccggcctgaaccaagaccccatgagcgccagcttcgacctcgaagcctacatgaacgccctcatggcccagaaggcatagacacccctcgtgcgcaagcgagcgagcaagcaagacggagggtacggtgagggcatgatggtggattgcacgcccggccggagacgcagccgggacggggagacagggccgcgtcgacggccagtgtgtacgatggcgtggcgaagacacggcgagcagaacggcatagacttgttttcttttgtgttgaggctgtcccctcggggcgagagcggcccggtcatgcttactagacttttatacaggcgcagggagacggagcacgccgtctccatccgtgtacaactcgaatgaatcaagaatcgcacatagcaagtggagcgtgtgtccatggtcacagtcgtagtcatgatcacgatctagtgacgagtcgagatagtagtgaaaggcgtcaaagtcgtgaaagtcgtgcgtgctggagtactagtagctttattacctacatccctg

SEQ ID NO: 26705 - DNA, 1350 bp, Muscodor strobelii
  misc_feature: SGI cDNA ID NO. 569136
  misc_feature: Encodes the peptide sequence at SEQ ID NO 26706
atggatgagcagatcaacaatgggccgctcgagggtagcttccccagcgatgtctcaacaccgaagcctcgtgaccctcctagccccgtgtcacctgaggcaacaagcattcactcagacgttcaggctgccctagatcgcctcgttagcccgcctagcccggttacacgtagaagttcaggcactcagcccctctcagtgagctccatcaccgaccttacctcctctactgtatcagagacttcttcagacactcaaccacgggatgcccaaccctttgtcacaactgctgataacttccctacctcttcgattgcaacggaagttccaactactcaacccttcttgggcagtaccttattgaatcccccaagctctctagtccctgaagctccacctagtgcacctcagtcagacggactgcctattcgcagatctgagccctctattcacaacgagcacgcaactcaccagcattacagcgaagacacacctggcgtacgcaattcggccaagctccaggaatcgctcaactccaatctaccccgcgaaggtcagcggcagcagcagccactccagcaacaagtttccaacactgacctacctggaggtacaatcactccagtactcgggtcgccacgacaacaagcgcgcttgagtactggtcctctttccccagctactgtacccacctctagccaggcccagacatccaatcccgctcatcaagcacctacctctgcgactgctcaggggcaggctcctcaactgccatcgacgtacgcacccattcctcacgccaacagcggtgttccaaccggaggcattcaacatccattcgtgcctgcctttcagactcatcagagtgttcctcttctgtctccaagcgcgtcgcagggcgtcgcaccccctctgtgccacccagctggtaaccagataactggtgaagcaacaaacatggctgcctacgtcatctgtcctcaggctcaacagccaggtgtgatctacacacaggctccccagcaaaccttagtctgtagccagcctcagcagcaaccagtcttttactactgttatcctcccccggctgctcctgcttttaagccccccatcgaccgaccttggttctcgggaacgtctcactggttcccctctgctggcgctcagcaaatccagtctggccagatgtatgttgctgagcagggatatgtcatccctccacccatgctgtgcacgcctactgcacaagtcgcaaacactggacagctttattacatcgccaacggtggactagtctctcctgctccctggcactctacgcactctagccacttcctccaagatgtttga

SEQ ID NO: 26706 - protein, 449 aa, Muscodor strobelii
  misc_feature: SGI Peptide ID NO. 569136
MDEQINNGPLEGSFPSDVSTPKPRDPPSPVSPEATSIHSDVQAALDRLVSPPSPVTRRSSGTQPLSVSSITDLTSSTVSETSSDTQPRDAQPFVTTADNFPTSSIATEVPTTQPFLGSTLLNPPSSLVPEAPPSAPQSDGLPIRRSEPSIHNEHATHQHYSEDTPGVRNSAKLQESLNSNLPREGQRQQQPLQQQVSNTDLPGGTITPVLGSPRQQARLSTGPLSPATVPTSSQAQTSNPAHQAPTSATAQGQAPQLPSTYAPIPHANSGVPTGGIQHPFVPAFQTHQSVPLLSPSASQGVAPPLCHPAGNQITGEATNMAAYVICPQAQQPGVIYTQAPQQTLVCSQPQQQPVFYYCYPPPAAPAFKPPIDRPWFSGTSHWFPSAGAQQIQSGQMYVAEQGYVIPPPMLCTPTAQVANTGQLYYIANGGLVSPAPWHSTHSSHFLQDV

SEQ ID NO: 26707 - DNA, 1677 bp, Muscodor strobelii
  misc_feature: SGI cDNA ID NO. 569137
  misc_feature: Encodes the peptide sequence at SEQ ID NO 26708
atgggcattcctgcgaccttgctcatcgccgtggggaaaggggtgttatcgttcgccgcaaagaagggtctcgaggagctatccaaaaagctcttcggcggcaaggacgagccgtccgtaatcgacaacgtcctcgcgaacaaagagaaactcgacaagatcttaaccgagttcaaggaactagacaccaagctacgaggacttgaaaacacagtcaacgatggcttctttcagatcaccgagaacaacgctagggagctgctcgacagcatcaacagcatgtataacatgtacacatccgccatcaagagcgtgaatgacatcaatccaaacaagtcgccgacagccaaccgagaccgcgtcacgcagcttggaatggacatcgcatctaacatctacggcaagctagagtccatcaacacttatctcgctggtaaatcgggcacgggcagcaccttgctttccatggccgtggcgcactctgcacgcaactccagcgacctgatcgtccactacgctaagatgagaatgtacttctacaactacaccgcagtacagatgaagggcgttttcctgctgcgctgcgcatactacgacccaaagatcccattccaagacggtttcgacaacatcgcgcggatagaagagaacctcatccagcaggaaaagcacttcacatccgtattcggagaaatgctacaaaacctcgccatcagactcctaaaagagccctccgtgcccgtcacatgctacttgaaaccgcacaatttccccggtctatccatcggcataggcgagcaagacagactctccgacaagcccaggtcggaccagaagccgagtgacttgccggagttctggctcctcgagtggctcaatcccatcaaagccgacgccgaagtcgacttcagcacggagtacggcttccacatccgccacgtgcgcacttttgaggccgtcggcccgcgcgaggataagccgtggcgggacctgcggctcggcgagggaatctactacggcagctggaagcttaagcctacaccaagtaatcgcgtgaggctgcaatggcggacaggtttgctgcgcgacccgcgcggcagaacgtttaagaataatcatttcgctgcgttctgtatggatacgctgcccgagtatggtcagatttataaccctgcgtacggcgagaggctggtcgtcgctgcgcccgacgaccatatcgaggacgcggcgcaatggtgggatatacctgtggtagacgagtatgtgctgcctaatgccagattgcctcgcggcgagacgattgtgcctggtatgaagcttgagagcggagactggtgctttgagttcgtgcacgggacgggacagctgcggattgttcgcaagagctctggcgagattgtatggaaggcgctgcaggctgaacctagtactgctgatgcaaggttgaagtttgaagcttcgcgcatgttcacatacggtgcgccgcctatggatgtcaaggctctggtgaggggtgatattgggcggagtccgtactggcagcttggccttgggaagattgcggatgcggataattatcaggcgatcttgcttcagagtgatgggaagctggtgctgggtggtcgcaatagtgactttacgtctggtgctgaggaggtctctttgggtattccttga

SEQ ID NO: 26708 - protein, 558 aa, Muscodor strobelii
  misc_feature: SGI Peptide ID NO. 569137
MGIPATLLIAVGKGVLSFAAKKGLEELSKKLFGGKDEPSVIDNVLANKEKLDKILTEFKELDTKLRGLENTVNDGFFQITENNARELLDSINSMYNMYTSAIKSVNDINPNKSPTANRDRVTQLGMDIASNIYGKLESINTYLAGKSGTGSTLLSMAVAHSARNSSDLIVHYAKMRMYFYNYTAVQMKGVFLLRCAYYDPKIPFQDGFDNIARIEENLIQQEKHFTSVFGEMLQNLAIRLLKEPSVPVTCYLKPHNFPGLSIGIGEQDRLSDKPRSDQKPSDLPEFWLLEWLNPIKADAEVDFSTEYGFHIRHVRTFEAVGPREDKPWRDLRLGEGIYYGSWKLKPTPSNRVRLQWRTGLLRDPRGRTFKNNHFAAFCMDTLPEYGQIYNPAYGERLVVAAPDDHIEDAAQWWDIPVVDEYVLPNARLPRGETIVPGMKLESGDWCFEFVHGTGQLRIVRKSSGEIVWKALQAEPSTADARLKFEASRMFTYGAPPMDVKALVRGDIGRSPYWQLGLGKIADADNYQAILLQSDGKLVLGGRNSDFTSGAEEVSLGIP

SEQ ID NO: 26709 - DNA, 1912 bp, Muscodor strobelii
  misc_feature: SGI EST ID NO. CUFF.62964.0
  misc_feature: Variant of the nucleotide sequence at SEQ ID NO 26707
cgaagtcacagtccagaatggtcagaaggtaaagcctgtaaacgcatcactactgaaattctcgagaaacgcacccgccacagttatacacagcatgggcattcctgcgaccttgctcatcgccgtggggaaaggggtgttatcgttcgccgcaaagaagggtctcgaggagctatccaaaaagctcttcggcggcaaggacgagccgtccgtaatcgacaacgtcctcgcgaacaaagagaaactcgacaagatcttaaccgagttcaaggaactagacaccaagctacgaggacttgaaaacacagtcaacgatggcttctttcagatcaccgagaacaacgctagggagctgctcgacagcatcaacagcatgtataacatgtacacatccgccatcaagagcgtgaatgacatcaatccaaacaagtcgccgacagccaaccgagaccgcgtcacgcagcttggaatggacatcgcatctaacatctacggcaagctagagtccatcaacacttatctcgctggtaaatcgggcacgggcagcaccttgctttccatggccgtggcgcactctgcacgcaactccagcgacctgatcgtccactacgctaagatgagaatgtacttctacaactacaccgcagtacagatgaagggcgttttcctgctgcgctgcgcatactacgacccaaagatcccattccaagacggtttcgacaacatcgcgcggatagaagagaacctcatccagcaggaaaagcacttcacatccgtattcggagaaatgctacaaaacctcgccatcagactcctaaaagagccctccgtgcccgtcacatgctacttgaaaccgcacaatttccccggtctatccatcggcataggcgagcaagacagactctccgacaagcccaggtcggaccagaagccgagtgacttgccggagttctggctcctcgagtggctcaatcccatcaaagccgacgccgaagtcgacttcagcacggagtacggcttccacatccgccacgtgcgcacttttgaggccgtcggcccgcgcgaggataagccgtggcgggacctgcggctcggcgagggaatctactacggcagctggaagcttaagcctacaccaagtaatcgcgtgaggctgcaatggcggacaggtttgctgcgcgacccgcgcggcagaacgtttaagaataatcatttcgctgcgttctgtatggatacgctgcccgagtatggtcagatttataaccctgcgtacggcgagaggctggtcgtcgctgcgcccgacgaccatatcgaggacgcggcgcaatggtgggatatacctgtggtagacgagtatgtgctgcctaatgccagattgcctcgcggcgagacgattgtgcctggtatgaagcttgagagcggagactggtgctttgagttcgtgcacgggacgggacagctgcggattgttcgcaagagctctggcgagattgtatggaaggcgctgcaggctgaacctagtactgctgatgcaaggttgaagtttgaagcttcgcgcatgttcacatacggtgcgccgcctatggatgtcaaggctctggtgaggggtgatattgggcggagtccgtactggcagcttggccttgggaagattgcggatgcggataattatcaggcgatcttgcttcagagtgatgggaagctggtgctgggtggtcgcaatagtgactttacgtctggtgctgaggaggtctctttgggtattccttgagggttgggttgccttctggggtcgggagtagattttaatagtacccaggtaggcttcatgtcgtataatacgttgtacatatcaccaaggtgtttaactcgtctctttacggtagtgtcttcaacttgaactatgggaatg

SEQ ID NO: 26710 - DNA, 1983 bp, Muscodor strobelii
  misc_feature: SGI cDNA ID NO. 569138
  misc_feature: Encodes the peptide sequence at SEQ ID NO 26711
atgccctggcagtatccgattcaaccaatcaacatatccgcaccaccaactgcctaccaaaaacagccgctggaccagactcaagaggggttgacacagtactggaatcagcaaggtccagcgacgaggccagaagcgacagccgcaacgccactagttcctttgacaaacgagcggcaagagcttcatcatggatctcaagtacaaaacgttggtcgcgcgtcgacaatctacaacttcagtgcatattctacgtctatgccgcagaccccatatatgcagaattatgtgtctccttcgagcccagttgaatggcaacacagtaaggcattgatggagccgatcacactggatgagccgcaacctagagatagcctggcctcgtggaagttcaaagttgtgatagttgctttcaacataacatccatgattgttggatatgatgtgagcaatgttgctaacattcaagttccgatctacgcagctttcaaagatctcactctactcccgtggcttgctctaagctactctgtatgcaatgttgcagcgacgcccctagcccgaaagcttttcaaattttacgatatcaaaatactcactatcagtggtatgatcatctattttgctggctctatacttgccggcgctgcccccaacatgatggttctcatagccggtcgggcattgaccgccgttggggcagcaatcggctaccaaggaatcctgagtttcgttatcattttttcgaagccgaacgaactttctctcgtgcaagccagctttggcgcctcttttgcctttggtatactaaccggcccagtcatcggggctggattctccgcaactccacacgctacatggcgttggtcattctacttaatcgcgcccttggttgcaatcgctataggactcttattgattgccctaccaagttactctgaagggaacgagaaatcggtctcaaaaaacttcaaagaaattgattggatcggaaacatcctccatatcgccacattccttttattagcattcgctgctgttttcggagggaccaggtgggcatggaactcggttacggagctcgcagtctttattgcactcggtgcagtttcgatttcatacgttgtgcaacagacgtttagtcttggcattaaaccggagcgacgcatcatccccgtccacttattagcggatcgcaccgttcttttcacatggatctgtacgattgctgcatcctttgcatatggcgtcatactctattacacgccgcttttctacgccttcacgcgtgaaatcgaccctctggaagtcggcttacgcttattttgttttactgtgaacttcatcctcgtcatatttatcgcccacagcctgctgcctgtggcaaaattctatatgccattcttccttgtgggcggcattctactcctcatcggaggcatcttgttccacgcagttactcctagtacgtccaatgctgcaataatgggtttcgacgcgcttgttggtgccggtgtgggaatcctatggaatctagcgattcctgtctgttctgtcaaattgaaaacgcgcgaggatcgtttagaccagacaacacttcacagcattgcgcagctagggggagttgctgcatcgctttctgcgtccgccttgatataccaaaatcttggtttcgagatgttacggcagtcagctcagttcacaggatattcgaagagtgatatatttggcctcttgtcaggcgcacagtccgatgtactcaacgcacttcccaaagatttgagagatgtggttcttgcagctctgatcaggactattgtgcgatgcttttacatcatcattgcagcgggagtacttgcctttgtagcatcgttatgcctcaagatcgagcctctggactttcccagcttgttcaaaagaaaacggagtcaaaaagacgttgaagacgagccagagaagacacaagtatatgagttgaagtga

SEQ ID NO: 26711 - protein, 660 aa, Muscodor strobelii
  misc_feature: SGI Peptide ID NO. 569138
  misc_feature (138)..(545): Pfam Id: PF07690 Pfam Desc: Major Facilitator Superfamily
  misc_feature (121)..(648): NCBI GI: 255955351 Blast Desc: Pc21g14120 [Penicillium chrysogenum Wisconsin 54-1255] gi|211590139|emb|CAP96309.1| Pc21g14120 [Penicillium chrysogenum Wisconsin 54-1255]
  misc_feature (108)..(645): NCBI GI: 169765688 Blast Desc: [Aspergillus oryzae RIB40] gi|238482271|ref|XP_002372374.1| efflux pump antibiotic resistance protein, [Aspergillus flavus NRRL3357] protein product
  misc_feature (100)..(650): NCBI GI: 256721276 Blast Desc: NECHADRAFT_44607 [Nectria haematococca mpVI 77-13-4]
  misc_feature (118)..(650): NCBI GI: 115401144 Blast Desc: conserved [Aspergillus terreus NIH2624] gi|114190101|gb|EAU31801.1| conserved [Aspergillus terreus NIH2624]
  misc_feature (108)..(645): NCBI GI: 121719127 Blast Desc: MFS transporter, [Aspergillus clavatus NRRL 1] gi|119404494|gb|EAW14870.1| MFS transporter, [Aspergillus clavatus NRRL 1]
  misc_feature (111)..(634): NCBI GI: 67902658 Blast Desc: AN8316.2 [Aspergillus nidulans FGSC A4] gi|40747783|gb|EAA66939.1| AN8316.2 [Aspergillus nidulans FGSC A4] gi|259484240|tpe|CBF80292.1| TPA: conserved [Aspergillus FGSC
  misc_feature (120)..(632): NCBI GI: 156058470 Blast Desc: SS1G_03247 [Sclerotinia sclerotiorum 1980] gi|154701034|gb|EDO00773.1| SS1G_03247 [Sclerotinia sclerotiorum 1980]
  misc_feature (123)..(644): NCBI GI: 145604072 Blast Desc: MGG_10869 [Magnaporthe grisea 70-15] gi|145012157|gb|EDJ96813.1| MGG_10869 [Magnaporthe grisea 70-15]
  misc_feature (143)..(644): NCBI GI: 145604629 Blast Desc: MGG_13866 [Magnaporthe grisea 70-15] gi|145012611|gb|EDJ97265.1| MGG_13866 [Magnaporthe grisea 70-15]
  misc_feature (117)..(632): NCBI GI: 225555190 Blast Desc: conserved [Ajellomyces capsulatus G186AR]
MPWQYPIQPINISAPPTAYQKQPLDQTQEGLTQYWNQQGPATRPEATAATPLVPLTNERQELHHGSQVQNVGRASTIYNFSAYSTSMPQTPYMQNYVSPSSPVEWQHSKALMEPITLDEPQPRDSLASWKFKVVIVAFNITSMIVGYDVSNVANIQVPIYAAFKDLTLLPWLALSYSVCNVAATPLARKLFKFYDIKILTISGMIIYFAGSILAGAAPNMMVLIAGRALTAVGAAIGYQGILSFVIIFSKPNELSLVQASFGASFAFGILTGPVIGAGFSATPHATWRWSFYLIAPLVAIAIGLLLIALPSYSEGNEKSVSKNFKEIDWIGNILHIATFLLLAFAAVFGGTRWAWNSVTELAVFIALGAVSISYVVQQTFSLGIKPERRIIPVHLLADRTVLFTWICTIAASFAYGVILYYTPLFYAFTREIDPLEVGLRLFCFTVNFILVIFIAHSLLPVAKFYMPFFLVGGILLLIGGILFHAVTPSTSNAAIMGFDALVGAGVGILWNLAIPVCSVKLKTREDRLDQTTLHSIAQLGGVAASLSASALIYQNLGFEMLRQSAQFTGYSKSDIFGLLSGAQSDVLNALPKDLRDVVLAALIRTIVRCFYIIIAAGVLAFVASLCLKIEPLDFPSLFKRKRSQKDVEDEPEKTQVYELK

SEQ ID NO: 26712 - DNA, 2920 bp, Muscodor strobelii
  misc_feature: SGI EST ID NO. CUFF.62982.0
  misc_feature: Variant of the nucleotide sequence at SEQ ID NO 26710
caggaaccggcgcctctggttacacgtgctgcctgcctttcagcgtggttatgtcaaacacctccgcggttgtgccccccatagagatacgaatatgtggttgtcccaagcatgggcgagccgcaatggacccagtcgtctggtttctcttgataatatcgtggggatagactatttactcctttaaccgcgcctctacctgtctattcgcatgtatagtcaagctccaagtttcctcgacatagtggcattatcgccgtccactttcggtcgcacgccgtgaagtctcgatgcccagctttgttgaaggggtgtatgaatgtggcggctcatgatggcgaatgctgggccttacagctcagaatacacagctctaccgccaactaccgctgagcaaagtcattcgcatacagagaagaacgacaacactcaccacacgttccaagtaggaactgaaggatggagcgactatggcggctcaggctatggccaaccatcggcgacttatgtgaatggacagtggcaatactataggaacgatgtggcatatcaatcgacatatgctgccggtcattcgcacgcggggacatacgataactattctcgatatgaccatacaaacgtccctgttgctacgccagcaacaatgccctggcagtatccgattcaaccaatcaacatatccgcaccaccaactgcctaccaaaaacagccgctggaccagactcaagaggggttgacacagtactggaatcagcaaggtccagcgacgaggccagaagcgacagccgcaacgccactagttcctttgacaaacgagcggcaagagcttcatcatggatctcaagtacaaaacgttggtcgcgcgtcgacaatctacaacttcagtgcatattctacgtctatgccgcagaccccatatatgcagaattatgtgtctccttcgagcccagttgaatggcaacacagtaaggcattgatggagccgatcacactggatgagccgcaacctagagatagcctggcctcgtggaagttcaaagttgtgatagttgctttcaacataacatccatgattgttggatatgatgtgagcaatgttgctaacattcaagttccgatctacgcagctttcaaagatctcactctactcccgtggcttgctctaagctactctgtatgcaatgttgcagcgacgcccctagcccgaaagcttttcaaattttacgatatcaaaatactcactatcagtggtatgatcatctattttgctggctctatacttgccggcgctgcccccaacatgatggttctcatagccggtcgggcattgaccgccgttggggcagcaatcggctaccaaggaatcctgagtttcgttatcattttttcgaagccgaacgaactttctctcgtgcaagccagctttggcgcctcttttgcctttggtatactaaccggcccagtcatcggggctggattctccgcaactccacacgctacatggcgttggtcattctacttaatcgcgcccttggttgcaatcgctataggactcttattgattgccctaccaagttactctgaagggaacgagaaatcggtctcaaaaaacttcaaagaaattgattggatcggaaacatcctccatatcgccacattccttttattagcattcgctgctgttttcggagggaccaggtgggcatggaactcggttacggagctcgcagtctttattgcactcggtgcagtttcgatttcatacgttgtgcaacagacgtttagtcttggcattaaaccggagcgacgcatcatccccgtccacttattagcggatcgcaccgttcttttcacatggatctgtacgattgctgcatcctttgcatatggcgtcatactctattacacgccgcttttctacgccttcacgcgtgaaatcgaccctctggaagtcggcttacgcttattttgttttactgtgaacttcatcctcgtcatatttatcgcccacagcctgctgcctgtggcaaaattctatatgccattcttccttgtgggcggcattctactcctcatcggaggcatcttgttccacgcagttactcctagtacgtccaatgctgcaataatgggtttcgacgcgcttgttggtgccggtgtgggaatcctatggaatctagcgattcctgtctgttctgtcaaattgaaaacgcgcgaggatcgtttagaccagacaacacttcacagcattgcgcagctagggggagttgctgcatcgctttctgcgtccgccttgatataccaaaatcttggtttcgagatgttacggcagtcagctcagttcacaggatattcgaagagtgatatatttggcctcttgtcaggcgcacagtccgatgtactcaacgcacttcccaaagatttgagagatgtggttcttgcagctctgatcaggactattgtgcgatgcttttacatcatcattgcagcgggagtacttgcctttgtagcatcgttatgcctcaagatcgagcctctggactttcccagcttgttcaaaagaaaacggagtcaaaaagacgttgaagacgagccagagaagacacaagtatatgagttgaagtgaacagctatattgagaaatgagcgatggtttggaaaatatttttatgttgagcattgatacccctacgcagtttcgtgcgtaatgagatatgagcatttcactcagctagacgttagagtagaatagaaatgataaagcacaatcaagcgcatgctgttaatcatcttacctcagagattgatgagtctcttgcgcgcaggtgtatgttctttagcttagcgggtgaatgctcttcaatccgctacgactagatttggaggtcgttgttggaaagaagcaagctgctactca

SEQ ID NO: 26713 - DNA, 831 bp, Muscodor strobelii
  misc_feature: SGI cDNA ID NO. 569139
  misc_feature: Encodes the peptide sequence at SEQ ID NO 26714
atgacacccgataacgagaaggaactttttcatatctccaaaaatccatctggaagagagacgatcgtattgatccattcattcttctgctctcatctcgaattcgaccttgtcgcgccgcatctatcagattaccacctattactagtagacttaccctgtcattccggctcacgcgcatccagcacagagccctggtccatcgccaacagcgctacccgcgttgcagacgtggttcgtgcgcatgcaaaagatggccgggcgcacgtcgttggagtttctggtggtggctttgtaggcatgcagctcgcacgacaaaaccccgagctcgtgctctccgtcttcgcatcggggtgcacgccgttccaaggacatcagcgttggtttgcgacgcatccacgtgctctctacccagtgctttcaatgcagggctcgtggctgccggacgccgtgtaccgattcgcgacaacacgcatgggtttgttgccgcatgaggagttgcggaaagaggcgcacgcgaactcgtcttatgagctcatgaaagttggctacgctgatatggcaaatttcacactagaagacgatgtcaaagggcttgctcgtgttggggtccggacactagtcctagccggtaccgttgtcgatgacgtgaaaactgcgactgctatgcgtcacctattgagagaaaacgggtcccgtgagagtgttgcggtctctgtgagaggcgctcagcatctttgggacttgcaatttccggaattgttcgctgagagtatttgcgcatggattgagggtcggaaacttcctagtaaattagagacgcttcaataa

SEQ ID NO: 26714 - protein, 276 aa, Muscodor strobelii
  misc_feature: SGI Peptide ID NO. 569139
  misc_feature (7)..(275): NCBI GI: 256722964 Blast Desc: NECHADRAFT_52677 [Nectria haematococca mpVI 77-13-4]
  misc_feature (2)..(272): NCBI GI: 46114898 Blast Desc: FG03291.1 [Gibberella zeae PH-1]
  misc_feature (1)..(276): NCBI GI: 171676816 Blast Desc: protein product [Podospora anserina] gi|170936475|emb|CAP61132.1| protein product [Podospora anserina]
  misc_feature (2)..(276): NCBI GI: 256725582 Blast Desc: NECHADRAFT_81441 [Nectria haematococca mpVI 77-13-4]
  misc_feature (3)..(275): NCBI GI: 171690668 Blast Desc: protein product [Podospora anserina] gi|170945282|emb|CAP71393.1| protein product [Podospora anserina]
  misc_feature (9)..(273): NCBI GI: 116214417 Blast Desc: CHGG_11049 [Chaetomium globosum CBS 148.51] gi|88175404|gb|EAQ82873.1| CHGG_11049 [Chaetomium globosum CBS 148.51]
  misc_feature (9)..(273): NCBI GI: 261359134 Blast Desc: conserved [Verticillium albo-atrum VaMs.102]
  misc_feature (5)..(276): NCBI GI: 169597965 Blast Desc: SNOG_01778 [Phaeosphaeria nodorum SN15] gi|111070307|gb|EAT91427.1| SNOG_01778 [Phaeosphaeria nodorum SN15]
  misc_feature (3)..(275): NCBI GI: 46117292 Blast Desc: FG04488.1 [Gibberella zeae PH-1]
  misc_feature (10)..(170): NCBI GI: 116195542 Blast Desc: CHGG_04369 [Chaetomium globosum CBS 148.51] gi|88180282|gb|EAQ87750.1| CHGG_04369 [Chaetomium globosum CBS 148.51]
MTPDNEKELFHISKNPSGRETIVLIHSFFCSHLEFDLVAPHLSDYHLLLVDLPCHSGSRASSTEPWSIANSATRVADVVRAHAKDGRAHVVGVSGGGFVGMQLARQNPELVLSVFASGCTPFQGHQRWFATHPRALYPVLSMQGSWLPDAVYRFATTRMGLLPHEELRKEAHANSSYELMKVGYADMANFTLEDDVKGLARVGVRTLVLAGTVVDDVKTATAMRHLLRENGSRESVAVSVRGAQHLWDLQFPELFAESICAWIEGRKLPSKLETLQ

SEQ ID NO: 26715 - DNA, 1220 bp, Muscodor strobelii
  misc_feature: SGI EST ID NO. CUFF.62985.0
  misc_feature: Variant of the nucleotide sequence at SEQ ID NO 26713
gaagaatatgaacaaatcgaagatccattcgtcgaccttttgcgcgcttagagtaccctaaagtcgaggtaatagctactcatctcttttgtctaggatgacacccgataacgagaaggaactttttcatatctccaaaaatccatctggaagagagacgatcgtattgatccattcattcttctgctctcatctcgaattcgaccttgtcgcgccgcatctatcagattaccacctattactagtagacttaccctgtcattccggctcacgcgcatccagcacagagccctggtccatcgccaacagcgctacccgcgttgcagacgtggttcgtgcgcatgcaaaagatggccgggcgcacgtcgttggagtttctggtggtggctttgtaggcatgcagctcgcacgacaaaaccccgagctcgtgctctccgtcttcgcatcggggtgcacgccgttccaaggacatcagcgttggtttgcgacgcatccacgtgctctctacccagtgctttcaatgcagggctcgtggctgccggacgccgtgtaccgattcgcgacaacacgcatgggtttgttgccgcatgaggagttgcggaaagaggcgcacgcgaactcgtcttatgagctcatgaaagttggctacgctgatatggcaaatttcacactagaagacgatgtcaaagggcttgctcgtgttggggtccggacactagtcctagccggtaccgttgtcgatgacgtgaaaactgcgactgctatgcgtcacctattgagagaaaacgggtcccgtgagagtgttgcggtctctgtgagaggcgctcagcatctttgggacttgcaatttccggaattgttcgctgagagtatttgcgcatggattgagggtcggaaacttcctagtaaattagagacgcttcaataactgcgtgccatgcattggtgaacaagtaagtgtatctcctcacgtatgattcagggaaattacaggcacaatggaagttgttcatatcgtactcgcgaatcctatatgcgagaccataatcgtgccgcatgattgattcgcaatctcagcaatttatggaatgttcctctacctgagaagatgtatatcgggctacgcacatgaggcgcaaacatatgcattattcagattatatcgattgctattaacaacagcaaaactcttcagcagtaatttcagctccttgactatt

SEQ ID NO: 26716 - DNA, 1476 bp, Muscodor strobelii
  misc_feature: SGI cDNA ID NO. 569140
  misc_feature: Encodes the peptide sequence at SEQ ID NO 26717
atgccaacaataacccgagaaagcataccactgatctgcttgattcttgtggccgcgttgagcataggacgcttgctgttcaacttgtgcctacatccactgcgaagtttccctggtcccataatccatcgtattacagtcctgccctatgcggtgcatcagatacgcggtaacctgcctttccatgttgcagaactccacgctcgctacggacccgttgtccgtctagctccgaatgagcttgcattcagtagtcctcaggcatggcacgacatctatagccagaagaccaagcaaggggagtttcccaagtatctcggattttacaaggtctttgaccacatgccgtcttcaatcctcaatgcgccaacggccgagcacactgcattgcgacgtcagctcctgcacagctttagcgatcgcgccatacgagagcaggagcccatcatcaagtcatatgtagatctgcttatcaatcaacttcgtgatgcaacgggaaaacacggttgtgaccagaatatgacagaatggtacacctgggcgacgttcgacatcattggtgacttgagcttgggcgtccatggcggctttgggtgcttgaaaaatgcgaattatcatccttgggttaagctcattagtaaggtgatgcgacaacaaggacagttactgggcattctttcactcgggttcagaactcctatcgcgtggctccacaagcatggcttcttcgctgatcgcgaacaccgctccatcgtaagagagaaggtcgcgcagcgtttgcaaagaccgtcgcgaccggatttcctcgagtcgttgattgccagtcgggagaagttgggccttgacgattacctcttggaacttaacgcttcgctgctgatacttgccgggtctgagactacggcaacgctactcattgcggcaacgtactttttagtcacgcatcccgaggtactgaaaaagcttgagcacgaggttcggacgacatttacgagtgataaagagattactataaccagcgtcagcaatctcactctcatgttagcgtgcctcaacgaatcgttgcgatgctaccccccattcgtgactggtgcacctcgactgacccccatggacgtgatcatagatggcaagtttgtgccacagaatactgtcgtgtccgtttttcagtatgctgtcaaccatgacaagcgctactggaccaaccctaacgatttcgcccctgagaggtggcttggccatcctggatatgggtatgatcagactgacgcaatgcaggcattcagtactggtccacgtaactgcattggtcggaccttagcttatgctgagatgcgattgatcttggctagaatcgtatacaatttcgatatgagcctaggcgacggtggtcatcattggctacgcggccagagagcttatatggtctgggacaagccggcgctcagcgtacatctcaaaccaacgacaatgtag

SEQ ID NO: 26717 - protein, 491 aa, Muscodor strobelii
  misc_feature: SGI Peptide ID NO. 569140
  misc_feature (38)..(484): Pfam Id: PF00067 Pfam Desc: Cytochrome P450
  misc_feature (38)..(460): Pfam Id: PF00067 Pfam Desc: Cytochrome P450
  misc_feature (22)..(488): NCBI GI: 212545779 Blast Desc: cytochrome P450 monooxygenase, [Penicillium marneffei ATCC 18224] gi|210064563|gb|EEA18658.1| cytochrome P450 monooxygenase, [Penicillium marneffei ATCC 18224]
  misc_feature (25)..(488): NCBI GI: 242801842 Blast Desc: cytochrome P450, [Talaromyces stipitatus ATCC 10500] gi|218717197|gb|EED16618.1| cytochrome P450, [Talaromyces stipitatus ATCC 10500]
  misc_feature (13)..(488): NCBI GI: 242801846 Blast Desc: cytochrome P450, [Talaromyces stipitatus ATCC 10500] gi|218717198|gb|EED16619.1| cytochrome P450, [Talaromyces stipitatus ATCC 10500]
  misc_feature (14)..(486): NCBI GI: 255933153 Blast Desc: Pc12g12330 [Penicillium chrysogenum Wisconsin 54-1255] gi|211582666|emb|CAP80860.1| Pc12g12330 [Penicillium chrysogenum Wisconsin 54-1255]
  misc_feature (2)..(489): NCBI GI: 261202730 Blast Desc: cytochrome P450 monooxygenase [Ajellomyces dermatitidis SLH14081] gi|239590676|gb|EEQ73257.1| cytochrome P450 monooxygenase [Ajellomyces dermatitidis SLH14081]
  misc_feature (2)..(489): NCBI GI: 239612397 Blast Desc: cytochrome P450 monooxygenase [Ajellomyces dermatitidis ER-3]
  misc_feature (44)..(489): NCBI GI: 171678635 Blast Desc: protein product [Podospora anserina] gi|170937387|emb|CAP62045.1| protein product [Podospora anserina]
  misc_feature (24)..(490): NCBI GI: 154285174 Blast Desc: [Ajellomyces capsulatus NAm1] gi|150407023|gb|EDN02564.1| [Ajellomyces capsulatus NAm1]
  misc_feature (16)..(489): NCBI GI: 224969386 Blast Desc: cytochrome P450 ClCP1 [Glomerella lindemuthiana]
  misc_feature (22)..(490): NCBI GI: 240277542 Blast Desc: trichothecene C-15 hydroxylase [Ajellomyces capsulatus H143]
  misc_feature (115)..(456): SWISSPROT Homolog: EC 1.14.14.1 Unspecific monooxygenase
MPTITRESIPLICLILVAALSIGRLLFNLCLHPLRSFPGPIIHRITVLPYAVHQIRGNLPFHVAELHARYGPVVRLAPNELAFSSPQAWHDIYSQKTKQGEFPKYLGFYKVFDHMPSSILNAPTAEHTALRRQLLHSFSDRAIREQEPIIKSYVDLLINQLRDATGKHGCDQNMTEWYTWATFDIIGDLSLGVHGGFGCLKNANYHPWVKLISKVMRQQGQLLGILSLGFRTPIAWLHKHGFFADREHRSIVREKVAQRLQRPSRPDFLESLIASREKLGLDDYLLELNASLLILAGSETTATLLIAATYFLVTHPEVLKKLEHEVRTTFTSDKEITITSVSNLTLMLACLNESLRCYPPFVTGAPRLTPMDVIIDGKFVPQNTVVSVFQYAVNHDKRYWTNPNDFAPERWLGHPGYGYDQTDAMQAFSTGPRNCIGRTLAYAEMRLILARIVYNFDMSLGDGGHHWLRGQRAYMVWDKPALSVHLKPTTM

SEQ ID NO: 26718 - DNA, 837 bp, Muscodor strobelii
  misc_feature: SGI cDNA ID NO. 569141
  misc_feature: Encodes the peptide sequence at SEQ ID NO 26719
atgtctggcggcgatggcgtattcacctatcgccacggcatcgctgttgctcagctagtcctctacaccgtgtccttggctttcgcggcatatttcaaatacgctcatcggaacggctggttctgtatcggcgtgttttctatattcaggattattggtgctggatgtatgctcggtaccatcaccaatgatgccgacagtgtctgggcgggagtgttcgtgacggagtctctgggtatggtgctactagtattcctgatattggaatttctaagccgggcaaataaggtcaccatcactccaaccatagacgagcgatggttctggtacccccagctcctcacatgggcagacatcggtctcgcaatcggcggcttcgtcgcagcgtcacaaagcgaacacggtctcgatcctactccctacacgcaagccagtttcggcctattcaccgcgctctatctgatcgtcgtatacatatgctggagcatctggtgtttgcgtacgaatttcccattcgacgaacgactactcgtgcggtgcgccgtcgtgtgtctaccgctgcttgctatccgtctcgcgtatgcgttggtctatcagattactggggaccgcactttcaacgctgttaagggaaattcgacggcgtatttattcttggttttctttcctgaggtgttgttgatatatgtttctattttggcgattatgaaggttagtccgcctgaacagaagtcagagggagacggtcaaaggcgacagcattggcggaatcggtatatacagctgcctgtgctgggtcgaaaggcacggatggccaaatccgtggaggatgtgtag

SEQ ID NO: 26719 - protein, 278 aa, Muscodor strobelii
  misc_feature: SGI Peptide ID NO. 569141
  misc_feature (1)..(253): NCBI GI: 169608407 Blast Desc: SNOG_07279 [Phaeosphaeria nodorum SN15] gi|111064810|gb|EAT85930.1| SNOG_07279 [Phaeosphaeria nodorum SN15]
  misc_feature (6)..(258): NCBI GI: 256725286 Blast Desc: NECHADRAFT_83009 [Nectria haematococca mpVI 77-13-4]
  misc_feature (8)..(237): NCBI GI: 39977363 Blast Desc: [Magnaporthe grisea 70-15] gi|145015974|gb|EDK00464.1| [Magnaporthe grisea 70-15]
  misc_feature (6)..(245): NCBI GI: 212539356 Blast Desc: conserved [Penicillium marneffei ATCC 18224] gi|210067132|gb|EEA21224.1| conserved [Penicillium marneffei ATCC 18224]
  misc_feature (10)..(268): NCBI GI: 238841039 Blast Desc: conserved [Microsporum canis CBS 113480]
  misc_feature (8)..(260): NCBI GI: 255932555 Blast Desc: Pc12g10100 [Penicillium chrysogenum Wisconsin 54-1255] gi|211582453|emb|CAP80637.1| Pc12g10100 [Penicillium chrysogenum Wisconsin 54-1255]
  misc_feature (10)..(243): NCBI GI: 212531723 Blast Desc: conserved [Penicillium marneffei ATCC 18224] gi|210071382|gb|EEA25471.1| conserved [Penicillium marneffei ATCC 18224]
  misc_feature (10)..(251): NCBI GI: 156040756 Blast Desc: SS1G_11356 [Sclerotinia sclerotiorum 1980] gi|154695740|gb|EDN95478.1| SS1G_11356 [Sclerotinia sclerotiorum 1980]
  misc_feature (10)..(219): NCBI GI: 242773809 Blast Desc: conserved [Talaromyces stipitatus ATCC 10500] gi|218721933|gb|EED21351.1| conserved [Talaromyces stipitatus ATCC 10500]
  misc_feature (9)..(251): NCBI GI: 154303844 Blast Desc: BC1G_08806 [Botryotinia fuckeliana B05.10] gi|150854390|gb|EDN29582.1| BC1G_08806 [Botryotinia fuckeliana B05.10]
MSGGDGVFTYRHGIAVAQLVLYTVSLAFAAYFKYAHRNGWFCIGVFSIFRIIGAGCMLGTITNDADSVWAGVFVTESLGMVLLVFLILEFLSRANKVTITPTIDERWFWYPQLLTWADIGLAIGGFVAASQSEHGLDPTPYTQASFGLFTALYLIVVYICWSIWCLRTNFPFDERLLVRCAVVCLPLLAIRLAYALVYQITGDRTFNAVKGNSTAYLFLVFFPEVLLIYVSILAIMKVSPPEQKSEGDGQRRQHWRNRYIQLPVLGRKARMAKSVEDV

SEQ ID NO: 26720 - DNA, 982 bp, Muscodor strobelii
  misc_feature: SGI EST ID NO. CUFF.63001.0
  misc_feature: Variant of the nucleotide sequence at SEQ ID NO 26718
gcgttcttgaatatttgttcgtcaccgtgtttaaacacttagaaccaatacaagcaacctcatcttcgctgctaccagtaattagtcgtttaccttcatcatgtctggcggcgatggcgtattcacctatcgccacggcatcgctgttgctcagctagtcctctacaccgtgtccttggctttcgcggcatatttcaaatacgctcatcggaacggctggttctgtatcggcgtgttttctatattcaggattattggtgctggatgtatgctcggtaccatcaccaatgatgccgacagtgtctgggcgggagtgttcgtgacggagtctctgggtatggtgctactagtattcctgatattggaatttctaagccgggcaaataaggtcaccatcactccaaccatagacgagcgatggttctggtacccccagctcctcacatgggcagacatcggtctcgcaatcggcggcttcgtcgcagcgtcacaaagcgaacacggtctcgatcctactccctacacgcaagccagtttcggcctattcaccgcgctctatctgatcgtcgtatacatatgctggagcatctggtgtttgcgtacgaatttcccattcgacgaacgactactcgtgcggtgcgccgtcgtgtgtctaccgctgcttgctatccgtctcgcgtatgcgttggtctatcagattactggggaccgcactttcaacgctgttaagggaaattcgacggcgtatttattcttggttttctttcctgaggtgttgttgatatatgtttctattttggcgattatgaaggttagtccgcctgaacagaagtcagagggagacggtcaaaggcgacagcattggcggaatcggtatatacagctgcctgtgctgggtcgaaaggcacggatggccaaatccgtggaggatgtgtagttttgcgagctcttagtgtgctcttgttgagcactgtgtctaaga

SEQ ID NO: 26721 - DNA, 2361 bp, Muscodor strobelii
  misc_feature: SGI cDNA ID NO. 569142
  misc_feature: Elevated expression when VOC is produced
  misc_feature: Encodes the peptide sequence at SEQ ID NO 26722
atgaccaccattgcttccaacacgcccgacccagaccgccgggttcgcttcgccgccatggcttccagctcgcgaggatacgacgaggaggagctgtcgatgtcgctgtcgccgtcgcagatccggcgcaacaaccaggcgctgcgcatccccgccatcaacgtcaccgatccctccaaccgcccccgagcgggcagccacccggccgaccgccctccgcagcaccagtcgcgcgagaagacgaagctcgaccagcgcatcggcgcctacaacgtcatccgcaccctcggcgagggctccttcggcaaggtcaagctcgccgtccaccgctccaccggccagcaggtcgccctcaagatcatcgcccgcaagaagctcatcagcagagacatggtcggccgcgtcgagcgcgagatcgagtacctccagctgctgcgccatccacacatcatcaaactctatactgtcataaagacatccaacgagatcatcatggtgctggagtatgccggcggggagctgttcgactacatagtatcgaacgggaagctggatgagagccaagcccgccgtttcttccagcagatgatctgtgccgtcgagtactgccacagacacaaggtcgtccatcgagatctgaagcccgagaatctcctgctggacgagcagttgaacgtcaagattgccgatttcggtctcagcaacatcatgacggacggaaacttcctcaagacaagttgcggaagccccaactatgccgcgcccgaagtcatcagcggaaagctctacgctgggcccgaggtcgacgtctggagctgcggtgtcatcctctacgtcctgttggtgggaagacttcctttcgacgacgaccacatccccagtctcttcgccaagattcaacgcggcgtcttcaccatcccgcagtggataaagcccgaagcggccgatctcatccgcaagatgcttcagaccaatcccgttcagcgcgccactatcgacgacatcaggcaggatccctggttcttgaaggaacttccgccgtatcttgcgcctcctgtcgaggaattcttgaacaccggtgtggacccgaacaaggccatccgcccgagcgatattgctcctcatgcaccagtccaggtccaagagaagctgcatgacgaagtcacggagaagatcagtaagacgatgggttacggcaaacaagatgtcgtggaagctttagaagccgatgaaccttctgcaatcaaggatgcctacatgattgtccgcgaaaacaagctgatgcaggtgaaccccgcctacggtactggtacagataacccatacttcgcaacatctcctcccagtcacgatcatgaagagcaaatgaggagcgtatctgaagctatggggagtgtgtcaatagatagtcatatcaaaaaggcggaagaggaattagacaaggcgaccgagagtcaagccagccccattgcagattcgactcgatctgcgtcaacgattacgagtgtttctcctcgcggctacgtcagtcatgtcggtatactgcctacgagtcttcctgctctccacaaagagtacctcgaccgtcaaagtgctggtgtcgatgagccacttgtcccacctactccggatgtccctcttcagcccaggacgcctgctgaacaacaggaggcagtacgccgtctcaaaccacactctaagaatgccatacgactcgatgagggccacaatcgaccgcagactatgactcctgttgcgaccaagaaaccaaaaccggtacgctggcaatttggcatccgatctcggaatgcaccattcgaggctctgttatgcatctataaagcattgtctaagcttggtgcgacgtgggctgtggacgaggacttcaacactgttcatggagacgagtcagagaattgtgatgatggatctgcaggtgtctccgcttcgaagaaggtcaatccctatgatggcataccgatagaccagatcaatctgaagaccttcgatcctatcaagtactataacttgcccgccgatccgtggcatattaaatgccgatggcgcaaagacgatattcgtcgtgagtcaatttcttctggaaatgctggcgccgaggccgcgtctgaagaagccgcctacgtttattcagtcatggataagcgccaacaagatttcgtgtggatgcgaatggatattcagatttacgaaatggaacccgggttctacctagtagatttcaagtgttccggctatgaacgagcggacggaaccatgctcgaggaaaaggacgtcatgagcccctttcccttcctcgacatggccgccaaattgatcatgcaactcgcagaagctgattga

SEQ ID NO: 26722 - protein, 786 aa, Muscodor strobelii
  misc_feature: SGI Peptide ID NO. 569142
  misc_feature (90)..(341): Pfam Id: PF00069 Pfam Desc: Protein kinase domain
  misc_feature (90)..(339): Pfam Id: PF07714 Pfam Desc: Protein tyrosine kinase
  misc_feature (384)..(425): Pfam Id: PF08587 Pfam Desc: Ubiquitin associated domain (UBA)
  misc_feature (90)..(302): Pfam Id: PF07714 Pfam Desc: Protein tyrosine kinase
  misc_feature (24)..(786): NCBI GI: 28950006 Blast Desc: serine/threonine protein kinase (SNF1) [Neurospora crassa]
  misc_feature (24)..(786): NCBI GI: 171691793 Blast Desc: protein product [Podospora anserina] gi|170945845|emb|CAP72646.1| protein product [Podospora anserina]
  misc_feature (25)..(786): NCBI GI: 46136763 Blast Desc: FG09897.1 [Gibberella zeae PH-1]
  misc_feature (25)..(786): NCBI GI: 23451249 Blast Desc: AF420488_1 protein kinase SNF1 [Fusarium oxysporum]
  misc_feature (76)..(786): NCBI GI: 21392999 Blast Desc: AF291845_1 serine threonine protein kinase SNF1 [Hypocrea jecorina]
  misc_feature (24)..(786): NCBI GI: 164425376 Blast Desc: NCU04566 [Neurospora crassa OR74A] gi|157070903|gb|EAA29429.2| NCU04566 [Neurospora crassa OR74A]
  misc_feature (68)..(786): NCBI GI: 145610923 Blast Desc: conserved [Magnaporthe grisea 70-15] gi|94962704|gb|ABF48563.1| SNF1 [Magnaporthe grisea] gi|145018259|gb|EDK02538.1| conserved [Magnaporthe grisea 70-15]
  misc_feature (25)..(786): NCBI GI: 256732074 Blast Desc: [Nectria haematococca mpVI 77-13-4]
  misc_feature (27)..(786): NCBI GI: 154298088 Blast Desc: BC1G_12009 [Botryotinia fuckeliana B05.10] gi|150858195|gb|EDN33387.1| BC1G_12009 [Botryotinia fuckeliana B05.10]
  misc_feature (25)..(786): NCBI GI: 261351793 Blast Desc: carbon catabolite-derepressing protein kinase [Verticillium albo-atrum VaMs.102]
  misc_feature (87)..(632): SWISSPROT Homolog: EC 2.7.11.1 Non-specific serine/threonine protein kinase
  misc_feature: Useful for introducing or modulating the production of volatile compounds
MTTIASNTPDPDRRVRFAAMASSSRGYDEEELSMSLSPSQIRRNNQALRIPAINVTDPSNRPRAGSHPADRPPQHQSREKTKLDQRIGAYNVIRTLGEGSFGKVKLAVHRSTGQQVALKIIARKKLISRDMVGRVEREIEYLQLLRHPHIIKLYTVIKTSNEIIMVLEYAGGELFDYIVSNGKLDESQARRFFQQMICAVEYCHRHKVVHRDLKPENLLLDEQLNVKIADFGLSNIMTDGNFLKTSCGSPNYAAPEVISGKLYAGPEVDVWSCGVILYVLLVGRLPFDDDHIPSLFAKIQRGVFTIPQWIKPEAADLIRKMLQTNPVQRATIDDIRQDPWFLKELPPYLAPPVEEFLNTGVDPNKAIRPSDIAPHAPVQVQEKLHDEVTEKISKTMGYGKQDVVEALEADEPSAIKDAYMIVRENKLMQVNPAYGTGTDNPYFATSPPSHDHEEQMRSVSEAMGSVSIDSHIKKAEEELDKATESQASPIADSTRSASTITSVSPRGYVSHVGILPTSLPALHKEYLDRQSAGVDEPLVPPTPDVPLQPRTPAEQQEAVRRLKPHSKNAIRLDEGHNRPQTMTPVATKKPKPVRWQFGIRSRNAPFEALLCIYKALSKLGATWAVDEDFNTVHGDESENCDDGSAGVSASKKVNPYDGIPIDQINLKTFDPIKYYNLPADPWHIKCRWRKDDIRRESISSGNAGAEAASEEAAYVYSVMDKRQQDFVWMRMDIQIYEMEPGFYLVDFKCSGYERADGTMLEEKDVMSPFPFLDMAAKLIMQLAEAD

SEQ ID NO: 26723 - DNA, 3873 bp, Muscodor strobelii
  misc_feature: SGI EST ID NO. CUFF.63004.0
  misc_feature: Variant of the nucleotide sequence at SEQ ID NO 26721
ccatggtcgcccacaagccgaccttgctcaggtcttgggtgaggggttgacggctatttccagtacctaagacggtgagtaatcatgggattaattgaccatgaacaccatctgcatctgcacccatgggcttgtccgatgtctccaagggagggttggagccttgtcttacttgtcatactccttgagtctggctgtgaagttttttcctcttttcttctttcttctttcaacgagaacgctgcaacatttgatcagccataagactgacaacccgattgagagggactgcaactgaaccaagactaaatgactgacgactacggtacctagcacactgctaatacagcccaccgaaaccactaaaaacctccacctcttgttggcggctagagcccaacagaccccgccaagtcaggcgtgtcagggtgctgttggcgccaaaccagcaattgggttcggcaagcttgcgtcgctaccttaagggcagatagctccatccgtcgggcacacgtctggctgtgtagctgcagcagcggtgtctttggcgttgctgagctgctagtaggtaaggtactcctagcaatcgggcaattcagggtcacgatcttgcacgctggtctcgccgcgacggagcactcgtcccgcccctcgcccacccgcctacccgctgcccctcgtctggcccgccgtcttcgaatctctccctcccgccgacgcccgttcgagcccttccatgaccaccattgcttccaacacgcccgacccagaccgccgggttcgcttcgccgccatggcttccagctcgcgaggatacgacgaggaggagctgtcgatgtcgctgtcgccgtcgcagatccggcgcaacaaccaggcgctgcgcatccccgccatcaacgtcaccgatccctccaaccgcccccgagcgggcagccacccggccgaccgccctccgcagcaccagtcgcgcgagaagacgaagctcgaccagcgcatcggcgcctacaacgtcatccgcaccctcggcgagggctccttcggcaaggtcaagctcgccgtccaccgctccaccggccagcaggtcgccctcaagatcatcgcccgcaagaagctcatcagcagagacatggtcggccgcgtcgagcgcgagatcgagtacctccagctgctgcgccatccacacatcatcaaactctatactgtcataaagacatccaacgagatcatcatggtgctggagtatgccggcggggagctgttcgactacatagtatcgaacgggaagctggatgagagccaagcccgccgtttcttccagcagatgatctgtgccgtcgagtactgccacagacacaaggtcgtccatcgagatctgaagcccgagaatctcctgctggacgagcagttgaacgtcaagattgccgatttcggtctcagcaacatcatgacggacggaaacttcctcaagacaagttgcggaagccccaactatgccgcgcccgaagtcatcagcggaaagctctacgctgggcccgaggtcgacgtctggagctgcggtgtcatcctctacgtcctgttggtgggaagacttcctttcgacgacgaccacatccccagtctcttcgccaagattcaacgcggcgtcttcaccatcccgcagtggataaagcccgaagcggccgatctcatccgcaagatgcttcagaccaatcccgttcagcgcgccactatcgacgacatcaggcaggatccctggttcttgaaggaacttccgccgtatcttgcgcctcctgtcgaggaattcttgaacaccggtgtggacccgaacaaggccatccgcccgagcgatattgctcctcatgcaccagtccaggtccaagagaagctgcatgacgaagtcacggagaagatcagtaagacgatgggttacggcaaacaagatgtcgtggaagctttagaagccgatgaaccttctgcaatcaaggatgcctacatgattgtccgcgaaaacaagctgatgcaggtgaaccccgcctacggtactggtacagataacccatacttcgcaacatctcctcccagtcacgatcatgaagagcaaatgaggagcgtatctgaagctatggggagtgtgtcaatagatagtcatatcaaaaaggcggaagaggaattagacaaggcgaccgagagtcaagccagccccattgcagattcgactcgatctgcgtcaacgattacgagtgtttctcctcgcggctacgtcagtcatgtcggtatactgcctacgagtcttcctgctctccacaaagagtacctcgaccgtcaaagtgctggtgtcgatgagccacttgtcccacctactccggatgtccctcttcagcccaggacgcctgctgaacaacaggaggcagtacgccgtctcaaaccacactctaagaatgccatacgactcgatgagggccacaatcgaccgcagactatgactcctgttgcgaccaagaaaccaaaaccggtacgctggcaatttggcatccgatctcggaatgcaccattcgaggctctgttatgcatctataaagcattgtctaagcttggtgcgacgtgggctgtggacgaggacttcaacactgttcatggagacgagtcagagaattgtgatgatggatctgcaggtgtctccgcttcgaagaaggtcaatccctatgatggcataccgatagaccagatcaatctgaagaccttcgatcctatcaagtactataacttgcccgccgatccgtggcatattaaatgccgatggcgcaaagacgatattcgtcgtgagtcaatttcttctggaaatgctggcgccgaggccgcgtctgaagaagccgcctacgtttattcagtcatggataagcgccaacaagatttcgtgtggatgcgaatggatattcagatttacgaaatggaacccgggttctacctagtagatttcaagtgttccggctatgaacgagcggacggaaccatgctcgaggaaaaggacgtcatgagcccctttcccttcctcgacatggccgccaaattgatcatgcaactcgcagaagctgattgaacccctattccgcaacttgtcccacgccatcagttcgtccaaattaacagacgctgccggtgtgtacgattcgaagatcaagctctacctgtttcgtcagtcaaggtctataatcaagatctgtcggcctcaaccacttttgcacccggctctctcgcccgttccacattgaggacttagagacagaatatcacgggctttttctgcataatcttgtttcaatactcaagtgacatgcagaacaagctgccgtacggagaactcttgggaacaagcataaacgagagagagatactcgacgtgtaaatatggccgttgttgatggcaacgcgctgatcaggatgcaacatacggatctagcattcacagtataacaaaaagagaagcatcggagttctttctttggttgggcggtagtgtatcccgggcatggaaaaacggccgaaagcattggagtttgatttaatatacccccatctagcatagatggacggatggacggatggaggatggcaggatggcagggagatggtaaatatggttacgctgcgcaatagtgcctatggtgtgtctacataggaacagggctacaatgctgcaatgcagcagcgcccatcgccactcaggaaataaatcttcggatacatgactattgttagctattagccgccactgtagagttctttctcttcactgttttcatattgtgatctgtgtgattatgggcagggtcacatttaatggttgtctgaaagtctcgatcacgagcacgttca

SEQ ID NO: 26724 - DNA, 678 bp, Muscodor strobelii
  misc_feature: SGI cDNA ID NO. 569143
  misc_feature: Encodes the peptide sequence at SEQ ID NO 26725
atgttactttctagagcagtagttgcgccagcatggcgcaatctactgtcaaagcgatgcgtctctacgttgacctccaatcctcatgtaaaagcctttcctaacgccgccgctgggagtgaacatctcatcacctacctcgacacgaaccctcctaatgctagcctagctatcggcagctctacagagctcccaccgacgcctcattctttcaaggagaaccatagatttacctccgtattaaacgaagtgctcaagagacacgccgctcaggatcccggactgcaagctcaagctcaggctttcgccggtcccggaggcgcaacttttgggtcgcacggcgtatcccctcaacagcggcaaagcagtaccaaaaaggcttcagctggtggtgacaccggagccggaggagccagcgctcaaggcggagctggcggtgcaggcgttggtggctacgttcatttatcagaccttcgaaatcctccagattttggccggatcgcctggccagaagatatcctgggtagcatcgaagtagatgggcatgggacgattgttggagagttcgagccctctgggacctaccgcatcgtcacgaacgagggtattctaggcctaagtgacttcttgaggacgaaactagtcgaaaaattgaaagaagaggagaaaatgagttga

SEQ ID NO: 26725 - protein, 225 aa, Muscodor strobelii
  misc_feature: SGI Peptide ID NO. 569143
  misc_feature (19)..(222): NCBI GI: 171691749 Blast Desc: protein product [Podospora anserina] gi|170945823|emb|CAP72623.1| protein product [Podospora anserina]
  misc_feature (11)..(222): NCBI GI: 256732075 Blast Desc: NECHADRAFT_80327 [Nectria haematococca mpVI 77-13-4]
  misc_feature (1)..(222): NCBI GI: 261351794 Blast Desc: conserved [Verticillium albo-atrum VaMs.102]
  misc_feature (27)..(221): NCBI GI: 46136765 Blast Desc: FG09898.1 [Gibberella zeae PH-1]
  misc_feature (5)..(225): NCBI GI: 226289899 Blast Desc: conserved [Paracoccidioides brasiliensis Pb18]
  misc_feature (4)..(220): NCBI GI: 242791232 Blast Desc: conserved [Talaromyces stipitatus ATCC 10500] gi|218718304|gb|EED17724.1| conserved [Talaromyces stipitatus ATCC 10500]
  misc_feature (5)..(223): NCBI GI: 255947174 Blast Desc: Pc22g03110 [Penicillium chrysogenum Wisconsin 54-1255] gi|211591371|emb|CAP97599.1| Pc22g03110 [Penicillium chrysogenum Wisconsin 54-1255]
  misc_feature (13)..(220): NCBI GI: 212534818 Blast Desc: conserved [Penicillium marneffei ATCC 18224] gi|212534820|ref|XP_002147566.1| conserved [Penicillium marneffei ATCC 18224] gi|210069964|gb|EEA24054.1| conserved [Penicillium
  misc_feature (3)..(223): NCBI GI: 240106758 Blast Desc: CPC735_015430 [Coccidioides posadasii C735 delta SOWgp]
  misc_feature (8)..(223): NCBI GI: 189192665 Blast Desc: conserved [Pyrenophora tritici-repentis Pt-1C-BFP] gi|187978235|gb|EDU44861.1| conserved [Pyrenophora tritici-repentis Pt-1C-BFP]
MLLSRAVVAPAWRNLLSKRCVSTLTSNPHVKAFPNAAAGSEHLITYLDTNPPNASLAIGSSTELPPTPHSFKENHRFTSVLNEVLKRHAAQDPGLQAQAQAFAGPGGATFGSHGVSPQQRQSSTKKASAGGDTGAGGASAQGGAGGAGVGGYVHLSDLRNPPDFGRIAWPEDILGSIEVDGHGTIVGEFEPSGTYRIVTNEGILGLSDFLRTKLVEKLKEEEKMS

SEQ ID NO: 26726 - DNA, 1889 bp, Muscodor strobelii
  misc_feature: SGI EST ID NO. CUFF.63014.0
  misc_feature: Variant of the nucleotide sequence at SEQ ID NO 26724
tgacacctgagatctgggtccaattgatatatcgtcatctcaatttgctaggtcttcataaacactcacgtattgtatctacgtatttaaggctgttctaatcattcggccttgctttttagcaagttacccgaaatcatgttactttctagagcagtagttgcgccagcatggcgcaatctactgtcaaagcgatgcgtctctacgttgacctccaatcctcatgtaaaagcctttcctaacgccgccgctgggagtgaacatctcatcacctacctcgacacgaaccctcctaatgctagcctagctatcggcagctctacagagctcccaccgacgcctcattctttcaaggagaaccatagatttacctccgtattaaacgaagtgctcaagagacacgccgctcaggatcccggactgcaagctcaagctcaggctttcgccggtcccggaggcgcaacttttgggtcgcacggcgtatcccctcaacagcggcaaagcagtaccaaaaaggcttcagctggtggtgacaccggagccggaggagccagcgctcaaggcggagctggcggtgcaggcgttggtggctacgttcatttatcagaccttcgaaatcctccagattttggccggatcgcctggccagaagatatcctgggtagcatcgaagtagatgggcatgggacgattgttggagagttcgagccctctgggacctaccgcatcgtcacgaacgagggtattctaggcctaagtgacttcttgaggacgaaactagtcgaaaaattgaaagaagaggagaaaatgagttgatgacggccatgccgcgcaactcattcagccagccacgccagtcagctgcagtgtatatcagacctgtacagaacaccaaaaccaatcgcaattcggaaccgagctttgcacgatctcaactaggctatgatcatcaacagccttcccaaaattccactaataggaaaatgattgagtcattgatttggaggagattttgtacaaggttacatagctcattcaatctttggcgcgaaggccattatagaacaaatctcttagatgaagaaattttgtccatcaagcagttgacctggcccctgtattcagagactgatgcgccggtttcaaagtaactacctagtacagcgatgttgttagcattggttatgaaaaggaccgttgtgaggcaggcaataaacgtgctttggagagacatctagggtgcgatatagttgtgccatctcatagaaggacaactcaatggcggggcaatgtgttggcagaaaacatctaaaccacccgtataaaatgtatatggtcacatgatcatctatgcagccttaaatctgttttctccttttcaatccgcacacaaccaaggtgctatcacgtcactaccagtacacctcgctagcttaccttgcatctaatacactacttacatgttacgtccagcccctatcatatcgtactcacgatgcctgtagtcgtggatgtcatcgagcagctgcaggtcttgagcaatgccactctagctacactcagtgacagtgatggttgggatgaccccaaggtccttcaaaccatagctaaagtggaagttgcgaagatcatgtgccaaaatcttgaaaagcgaggccttgcgagcacaatcgaacttaacgaagtcaataccatcaagcagctaattgcgcgtggaaagaagccccttgctggtaccatagcaactctcagacaatcgccagacagcactgccaaggccttttctagtgtcaaggcaatactcaacggtttctacagtattcgttgtgtttgtctatttgacaagcatgatggcagagcatggttgacaactgttgttagacttaagt

SEQ ID NO: 26727 - DNA, 2370 bp, Muscodor strobelii
  misc_feature: SGI cDNA ID NO. 569144
  misc_feature: Encodes the peptide sequence at SEQ ID NO 26728
atgcaaaacaacaagcatcttgggggaggattcttccccgccaaaccccccgcgtcctcgaaccctatcccatcatcgtcgccggcattcgggacaccagcccatacactcaagccgtttgccattgcgccaccctccaaagcgaccatattacctattctcctacctccggccaccttaagacccctggccttccgaacattcaccaagaagcatagcttgacgcttgcttccaccgctttacaagagctagcaacgttcatcggacggcattgtggctcaggatggcgcgaagagggccttgccgagaaagtgctagaggaggtggcccggagttggaagaaccgcaacggaggtgttattgtggatggtagcagccagcagctaaaagatatcctgaaaacactcgagggcaacatgagcggtggcaagatcgtgacggggcctgagctcaatcgacagaacagcttcgccctcagtgcaagccaagatatcgagcactcaaatacacgactcggcctgaggcctgcacccggccttacacgaaacgataccaacacaagctttggcatgtccgcattagaggtgcaagaggacgacacagagtccgagacgctcagtcatccgaggaaatggctgaagaccatagatgccttcgagcagccacgtatgctatacaacacatccaagaagcacttcgaaagagacccctcgaagccttccttaataccaccagcttcgcacaagacagccttatttcgaaacagatataatgttatacatcagagattattacgaaatgagtctttccaaagttcaagcgtcgcgatgacaaaagggccaccgtctctgaaacgatcatcctcttcagtcttaacatcacaacaaacccataagattacacccatagcaaacctactcggccgtcatggcacacatcacatgcttctcggcatgttatccgtcctccccaccggcgggttggccataaacgacctcactggaacaatatccttagacttatcgcacgcggtggccatccccgaagactcagcatggtttacgccgggaatgatcgttttgatagacggtgtatatgaagaagaagaggaatcagtaggcaagggactcggcgcaagtaatggcatcggtggtatcataggcggcaggttccaaggcttcttcatcggccagcctccatgcgagaagcgcaaagcgactctcggtgtcagtgggctcgacggtggccaagaccataccataggaggtgggtttggctggatcgacttcctcggcgtcgggagcgagagagccgtaggctccaagatgcgcaaagtagagcgccgcctactaaaatccgcggacacacaatcagatgtgccgagccgaggacggatggtcatcgtgggcgagttaaatctcgaccagccaagagcactacaagctcttcgcaagattctgacggcctacgccacagaaccagagggctcatccccgatgacgttcgtcctcgcaggcaatttcacacagcacgccgtgatggccggtgggggcgcaagcggcggcagcgtagaatacaaggagtacttcgactccttagcatccgtgctctcagattttcccactctcctccaaacatcaaccttcgtcttcgtccccggcgacaacgacggctggtcctcctcattctcatccggctccgccgtccctctgccgcgaaaagccgtcccagaaatgttcacatcgcggatccgacgcgcattcgcaagcgcgaattctgagcccggcgtcagaaactctacagcgccaggtgaagcaatatggacaagtaatccctcccgtctctccgtcttcggcccagcccacgaaattgtgctattccgcgacgacatatcagcccgtctccgacgcacagccgtgcgtctcaaacccacaaccacatcaacaaacgacacacaaggcgagaataaagaaccagacgacatagacatggcgaccaccctcgaaaacacagatacaatggacgtcgacgcagcccccaacataactaaacccaccaccccggaaatatctcacgacgtccaagcagcgcgtaaactcgtaaagaccatactagaccaaggttatctctgtccattccgcaacgccataaggccagtgcattgggactatgcgtctgcgctgcatttatatcccctgcctactgcattcgtgttgattgactctacggcgccgccgttcgccctcacgtatgagggatgtcatgtcatgaacccggggcctgtgctggttgctgggagaaggggggtggggaggtggattgagtatgagttgggtggtacggggaggattagggaatgtttgttttag

SEQ ID NO: 26728 - protein, 789 aa, Muscodor strobelii
  misc_feature: SGI Peptide ID NO. 569144
  misc_feature (466)..(749): Pfam Id: PF04042 Pfam Desc: DNA polymerase alpha/epsilon subunit B
  misc_feature (18)..(789): NCBI GI: 116179832 Blast Desc: CHGG_00544 [Chaetomium globosum CBS 148.51] gi|88184841|gb|EAQ92309.1| CHGG_00544 [Chaetomium globosum CBS 148.51]
  misc_feature (30)..(789): NCBI GI: 261351795 Blast Desc: DNA polymerase epsilon subunit B [Verticillium albo-atrum VaMs.102]
  misc_feature (30)..(773): NCBI GI: 256731698 Blast Desc: NECHADRAFT_93537 [Nectria haematococca mpVI 77-13-4]
  misc_feature (29)..(778): NCBI GI: 28950027 Blast Desc: related to DNA directed DNA polymerase II chain B [Neurospora crassa]
  misc_feature (11)..(789): NCBI GI: 171691747 Blast Desc: protein product [Podospora anserina] gi|170945822|emb|CAP72622.1| protein product [Podospora anserina]
  misc_feature (30)..(789): NCBI GI: 145612579 Blast Desc: MGG_07222 [Magnaporthe grisea 70-15] gi|145019717|gb|EDK03945.1| MGG_07222 [Magnaporthe grisea 70-15]
  misc_feature (30)..(782): NCBI GI: 46136767 Blast Desc: FG09899.1 [Gibberella zeae PH-1]
  misc_feature (13)..(789): NCBI GI: 154296337 Blast Desc: BC1G_12995 [Botryotinia fuckeliana B05.10] gi|150843453|gb|EDN18646.1| BC1G_12995 [Botryotinia fuckeliana B05.10]
  misc_feature (13)..(789): NCBI GI: 156055730 Blast Desc: SS1G_05217 [Sclerotinia sclerotiorum 1980] gi|154703001|gb|EDO02740.1| SS1G_05217 [Sclerotinia sclerotiorum 1980]
  misc_feature (140)..(778): NCBI GI: 164425361 Blast Desc: NCU10155 [Neurospora crassa OR74A] gi|157070897|gb|EAA29052.2| conserved [Neurospora crassa OR74A]
  misc_feature (65)..(789): SWISSPROT Homolog: EC 2.7.7.7 DNA-directed DNA polymerase
MQNNKHLGGGFFPAKPPASSNPIPSSSPAFGTPAHTLKPFAIAPPSKATILPILLPPATLRPLAFRTFTKKHSLTLASTALQELATFIGRHCGSGWREEGLAEKVLEEVARSWKNRNGGVIVDGSSQQLKDILKTLEGNMSGGKIVTGPELNRQNSFALSASQDIEHSNTRLGLRPAPGLTRNDTNTSFGMSALEVQEDDTESETLSHPRKWLKTIDAFEQPRMLYNTSKKHFERDPSKPSLIPPASHKTALFRNRYNVIHQRLLRNESFQSSSVAMTKGPPSLKRSSSSVLTSQQTHKITPIANLLGRHGTHHMLLGMLSVLPTGGLAINDLTGTISLDLSHAVAIPEDSAWFTPGMIVLIDGVYEEEEESVGKGLGASNGIGGIIGGRFQGFFIGQPPCEKRKATLGVSGLDGGQDHTIGGGFGWIDFLGVGSERAVGSKMRKVERRLLKSADTQSDVPSRGRMVIVGELNLDQPRALQALRKILTAYATEPEGSSPMTFVLAGNFTQHAVMAGGGASGGSVEYKEYFDSLASVLSDFPTLLQTSTFVFVPGDNDGWSSSFSSGSAVPLPRKAVPEMFTSRIRRAFASANSEPGVRNSTAPGEAIWTSNPSRLSVFGPAHEIVLFRDDISARLRRTAVRLKPTTTSTNDTQGENKEPDDIDMATTLENTDTMDVDAAPNITKPTTPEISHDVQAARKLVKTILDQGYLCPFRNAIRPVHWDYASALHLYPLPTAFVLIDSTAPPFALTYEGCHVMNPGPVLVAGRRGVGRWIEYELGGTGRIRECLF

SEQ ID NO: 26729 - DNA, 5379 bp, Muscodor strobelii
  misc_feature: SGI EST ID NO. CUFF.63254.0
  misc_feature: Variant of the nucleotide sequence at SEQ ID NO 26727
gttactgcctgttattgtgtgtgaccaaggacgagaaatcggattagacttgacgtttggtttctctatctgtggctaacgaagtatatgagcacgaacatgcaaaacaacaagcatcttgggggaggattcttccccgccaaaccccccgcgtcctcgaaccctatcccatcatcgtcgccggcattcgggacaccagcccatacactcaagccgtttgccattgcgccaccctccaaagcgaccatattacctattctcctacctccggccaccttaagacccctggccttccgaacattcaccaagaagcatagcttgacgcttgcttccaccgctttacaagagctagcaacgttcatcggacggcattgtggctcaggatggcgcgaagagggccttgccgagaaagtgctagaggaggtggcccggagttggaagaaccgcaacggaggtgttattgtggatggtagcagccagcagctaaaagatatcctgaaaacactcgagggcaacatgagcggtggcaagatcgtgacggggcctgagctcaatcgacagaacagcttcgccctcagtgcaagccaagatatcgagcactcaaatacacgactcggcctgaggcctgcacccggccttacacgaaacgataccaacacaagctttggcatgtccgcattagaggtgcaagaggacgacacagagtccgagacgctcagtcatccgaggaaatggctgaagaccatagatgccttcgagcagccacgtatgctatacaacacatccaagaagcacttcgaaagagacccctcgaagccttccttaataccaccagcttcgcacaagacagccttatttcgaaacagatataatgttatacatcagagattattacgaaatgagtctttccaaagttcaagcgtcgcgatgacaaaagggccaccgtctctgaaacgatcatcctcttcagtcttaacatcacaacaaacccataagattacacccatagcaaacctactcggccgtcatggcacacatcacatgcttctcggcatgttatccgtcctccccaccggcgggttggccataaacgacctcactggaacaatatccttagacttatcgcacgcggtggccatccccgaagactcagcatggtttacgccgggaatgatcgttttgatagacggtgtatatgaagaagaagaggaatcagtaggcaagggactcggcgcaagtaatggcatcggtggtatcataggcggcaggttccaaggcttcttcatcggccagcctccatgcgagaagcgcaaagcgactctcggtgtcagtgggctcgacggtggccaagaccataccataggaggtgggtttggctggatcgacttcctcggcgtcgggagcgagagagccgtaggctccaagatgcgcaaagtagagcgccgcctactaaaatccgcggacacacaatcagatgtgccgagccgaggacggatggtcatcgtgggcgagttaaatctcgaccagccaagagcactacaagctcttcgcaagattctgacggcctacgccacagaaccagagggctcatccccgatgacgttcgtcctcgcaggcaatttcacacagcacgccgtgatggccggtgggggcgcaagcggcggcagcgtagaatacaaggagtacttcgactccttagcatccgtgctctcagattttcccactctcctccaaacatcaaccttcgtcttcgtccccggcgacaacgacggctggtcctcctcattctcatccggctccgccgtccctctgccgcgaaaagccgtcccagaaatgttcacatcgcggatccgacgcgcattcgcaagcgcgaattctgagcccggcgtcagaaactctacagcgccaggtgaagcaatatggacaagtaatccctcccgtctctccgtcttcggcccagcccacgaaattgtgctattccgcgacgacatatcagcccgtctccgacgcacagccgtgcgtctcaaacccacaaccacatcaacaaacgacacacaaggcgagaataaagaaccagacgacatagacatggcgaccaccctcgaaaacacagatacaatggacgtcgacgcagcccccaacataactaaacccaccaccccggaaatatctcacgacgtccaagcagcgcgtaaactcgtaaagaccatactagaccaaggttatctctgtccattccgcaacgccataaggccagtgcattgggactatgcgtctgcgctgcatttatatcccctgcctactgcattcgtgttgattgactctacggcgccgccgttcgccctcacgtatgagggatgtcatgtcatgaacccggggcctgtgctggttgctgggagaaggggggtggggaggtggattgagtatgagttgggtggtacggggaggattagggaatgtttgttttagtgttgcaggtatgaacgcgccgcgttgaaatgaaacagagagattcgtttctaatattacatttatccttgtagtgacttgggtgaatgaaactggggactttgcaacccagcagtaccaatctggggttaagacgtgagatacgcggcatgaaatccattcgcatacctagaatttgaagagataaaataaaatggtattcattacgtaggcagtaataggtattgttccatccccatccaccgcgggatattgtcaagaccaggtagatcctttgactattttcctttcattccaactcccgtcatttccaggacgcatcgcaatgcaagtagctcatgacttctttcgaatcagatttatatacagatattcaaaaattcacgagccacgccacataaatgagaagaaaataggcgcgccgagctcgtcttatgtgtttggctttcagatagaaaccgtggtatttgttttgaagctagttttacttcgattgacgagttatttggtgcagttatgcatttagatgacatactgttaacgtgttagtgaaaattactcatgggagtttgaaaccgatgtggggatacataccggaataaacaagtagggaacttgtctctcgtactccttccaagcctcaccatacttgacgcggcagcgctcaacatcacgcatcgtgcggtgagcaatcatgcagacgaagaagacgggatagaaccagggaaatgggctgtcaaagccagtaatcagaccccacgagatagcaaaccagacatcacaagtgtagtggatcttgcgtgcgtatccgtaccagccatcaaccaggagtttgtcaccggcagcggtgtcgagggtcttggggttctcaaggtaggtccatggtagagcagggaaagtcttgcgcttgaggagagtaccacgttccttggcacggaaggcattcttctgtccgttgcactggtcccagatgacgtaagctccgaggtaggcaatgaagagcgcagcaagggcgaacttgttccaggcgtaggtggaagggtggtggttggccaggtacagagtgcagtggcagtaggagagcgggacaccggccatgttccaaaagatcaacatgaagccccatttctcatagtacatatcccaggtggtgatgatgagctgctcgcccttggagcaagcattggcgtagagatagtgggccatgaccaagaaccagacctcgccactaacgtagccgtactgctcgtactgacgtgcggcggcagcagcgctgatgccgaacaggatgtaccagggaatacggacttcgtagaacatcttgaagtcaagaatgccaaacaagcgggggttgagctcagcacccatgaagaaatcgtagataggataaccggtcatacggtgctggcggccgcgagcgatggccgagaagtaagcaatgaaactgacgataaacccggagagaatggacaccgtcatgataggcccaaactcgtcaatgaaagtgtaaatagggaagtagccgctgaagtgtagagcacccataaccaagatggtgaagtagaagctagcgtaggcattgcagaaatacttcaattgcttgccaccttcgaaagggagcggcttgccgtatccctcaacaccaggcagcacgaggtagcagacaccttcgaagatcatgtaaatccagtagatcttccaggcctgccaagtgggaaaagcgccagtgtatacgagatttcccatgtgctttgcgaagtcgcccaatgattgatctttcgcaggcaaaggcagctttccgtcgtagtaggtagtgccaatccacatataccacatgaggacagggaatccgatcataagagccagcgcgccgaagcttcctccaaactcgaagaagccagaagcatcaaccttgtggtccatacccggagcccagccgtcaacaatcttgctttcttgcacgtgtccattgccattgccgttggcaatagatgacaccttttccttcgcaacagggctgaagctctcgttcttgacgtcctcgtcctcctcaaatttaggcacaggcttgcgccttggggcgggtttagttttgttggccatggcagtggactcggctgctgagctggtctcgccgtcgtcggatatgctatcggggaattgagactttcgacgtgttgagcgacgagcaggcgtttctaccataccctcgaaaagctccttttttctgcagagcgcgtcgcatggtcagtccaggacttttactaccgccgtccacgtcgcgccccgcatgcatcaattgaatcagacatagagtagtttacgatacactcgtaatcgtattctttttcattacatcctttaagttttgcacgccatttttgaacgcgcattcccgcccaatggcggagtctagcttgcacacaaaacaaaacaacaccaccaccgaaccgcataaaaaggggacaggggtcgttgtacataccgaggggttgctcgcagagagtatcgggacgacatctcgaaaacaagaatctacaaaaggagtggacgacgaaacaactaaatgctcgtcgaggcaagcgtcgacttgggacagtggtgtctccttactcacaaacccgggaggattttggcgtggatgacgggtgtggaataacgggtgggagaaagtcggtgtttcccatatgacaaatttccgcctacttgctgccattgtcgtgttttggtgtctgtttagtcgctctcgtcccggtagccaggggcacccggccctgtcccttagcccgcagtacgcggagattcccgctgaaggacacatttgaaggcttttgggtcctgaccctatgcctgactacaggcgctcatagggctcccttaggtacaccactgccatctaaggtactgggc

SEQ ID NO: 26730 - DNA, 1680 bp, Muscodor strobelii
  misc_feature: SGI cDNA ID NO. 569145
  misc_feature: Encodes the peptide sequence at SEQ ID NO 26731
atgtcgtcccgatactctctgcgagcaacccctcgaaaaaaggagcttttcgagggtatggtagaaacgcctgctcgtcgctcaacacgtcgaaagtctcaattccccgatagcatatccgacgacggcgagaccagctcagcagccgagtccactgccatggccaacaaaactaaacccgccccaaggcgcaagcctgtgcctaaatttgaggaggacgaggacgtcaagaacgagagcttcagccctgttgcgaaggaaaaggtgtcatctattgccaacggcaatggcaatggacacgtgcaagaaagcaagattgttgacggctgggctccgggtatggaccacaaggttgatgcttctggcttcttcgagtttggaggaagcttcggcgcgctggctcttatgatcggattccctgtcctcatgtggtatatgtggattggcactacctactacgacggaaagctgcctttgcctgcgaaagatcaatcattgggcgacttcgcaaagcacatgggaaatctcgtatacactggcgcttttcccacttggcaggcctggaagatctactggatttacatgatcttcgaaggtgtctgctacctcgtgctgcctggtgttgagggatacggcaagccgctccctttcgaaggtggcaagcaattgaagtatttctgcaatgcctacgctagcttctacttcaccatcttggttatgggtgctctacacttcagcggctacttccctatttacactttcattgacgagtttgggcctatcatgacggtgtccattctctccgggtttatcgtcagtttcattgcttacttctcggccatcgctcgcggccgccagcaccgtatgaccggttatcctatctacgatttcttcatgggtgctgagctcaacccccgcttgtttggcattcttgacttcaagatgttctacgaagtccgtattccctggtacatcctgttcggcatcagcgctgctgccgccgcacgtcagtacgagcagtacggctacgttagtggcgaggtctggttcttggtcatggcccactatctctacgccaatgcttgctccaagggcgagcagctcatcatcaccacctgggatatgtactatgagaaatggggcttcatgttgatcttttggaacatggccggtgtcccgctctcctactgccactgcactctgtacctggccaaccaccacccttccacctacgcctggaacaagttcgcccttgctgcgctcttcattgcctacctcggagcttacgtcatctgggaccagtgcaacggacagaagaatgccttccgtgccaaggaacgtggtactctcctcaagcgcaagactttccctgctctaccatggacctaccttgagaaccccaagaccctcgacaccgctgccggtgacaaactcctggttgatggctggtacggatacgcacgcaagatccactacacttgtgatgtctggtttgctatctcgtggggtctgattactggctttgacagcccatttccctggttctatcccgtcttcttcgtctgcatgattgctcaccgcacgatgcgtgatgttgagcgctgccgcgtcaagtatggtgaggcttggaaggagtacgagagacaagttccctacttgtttattccgtatgtcatctaa

SEQ ID NO: 26731 - protein, 559 aa, Muscodor strobelii
  misc_feature: SGI Peptide ID NO. 569145
  misc_feature (120)..(559): Pfam Id: PF01222 Pfam Desc: Ergosterol biosynthesis ERG4/ERG24 family
  misc_feature (3)..(558): NCBI GI: 171692235 Blast Desc: protein product [Podospora anserina] gi|170946066|emb|CAP72867.1| protein product [Podospora anserina]
  misc_feature (1)..(559): NCBI GI: 256731669 Blast Desc: [Nectria haematococca mpVI 77-13-4]
  misc_feature (1)..(559): NCBI GI: 261352096 Blast Desc: Delta(24(24(1)))-sterol reductase [Verticillium albo-atrum VaMs.102]
  misc_feature (1)..(559): NCBI GI: 46136975 Blast Desc: FG10003.1 [Gibberella zeae PH-1]
  misc_feature (1)..(559): NCBI GI: 39968745 Blast Desc: MGG_02465 [Magnaporthe grisea 70-15] gi|145013925|gb|EDJ98566.1| MGG_02465 [Magnaporthe grisea 70-15]
  misc_feature (2)..(559): NCBI GI: 164426304 Blast Desc: Delta(24(24(1)))-sterol reductase [Neurospora crassa OR74A] gi|157071281|gb|EAA32183.2| Delta(24(24(1)))-sterol reductase [Neurospora crassa OR74A]
  misc_feature (3)..(556): NCBI GI: 115388635 Blast Desc: Delta(24(24(1)))-sterol reductase [Aspergillus terreus NIH2624] gi|114195907|gb|EAU37607.1| Delta(24(24(1)))-sterol reductase [Aspergillus terreus NIH2624]
  misc_feature (3)..(558): NCBI GI: 145238792 Blast Desc: An07g09690 [Aspergillus niger] gi|134076540|emb|CAK39734.1| protein product [Aspergillus niger]
  misc_feature (3)..(556): NCBI GI: 119496361 Blast Desc: C-24(28) sterol reductase [Neosartorya fischeri NRRL 181] gi|119413116|gb|EAW23057.1| C-24(28) sterol reductase [Neosartorya fischeri NRRL 181]
  misc_feature (3)..(556): NCBI GI: 255948672 Blast Desc: Pc22g11560 [Penicillium chrysogenum Wisconsin 54-1255] gi|211592120|emb|CAP98444.1| Pc22g11560 [Penicillium chrysogenum Wisconsin 54-1255]
  misc_feature (132)..(558): SWISSPROT Homolog: EC 1.3.1.71 Delta(24(24(1)))-sterol reductase
MSSRYSLRATPRKKELFEGMVETPARRSTRRKSQFPDSISDDGETSSAAESTAMANKTKPAPRRKPVPKFEEDEDVKNESFSPVAKEKVSSIANGNGNGHVQESKIVDGWAPGMDHKVDASGFFEFGGSFGALALMIGFPVLMWYMWIGTTYYDGKLPLPAKDQSLGDFAKHMGNLVYTGAFPTWQAWKIYWIYMIFEGVCYLVLPGVEGYGKPLPFEGGKQLKYFCNAYASFYFTILVMGALHFSGYFPIYTFIDEFGPIMTVSILSGFIVSFIAYFSAIARGRQHRMTGYPIYDFFMGAELNPRLFGILDFKMFYEVRIPWYILFGISAAAAARQYEQYGYVSGEVWFLVMAHYLYANACSKGEQLIITTWDMYYEKWGFMLIFWNMAGVPLSYCHCTLYLANHHPSTYAWNKFALAALFIAYLGAYVIWDQCNGQKNAFRAKERGTLLKRKTFPALPWTYLENPKTLDTAAGDKLLVDGWYGYARKIHYTCDVWFAISWGLITGFDSPFPWFYPVFFVCMIAHRTMRDVERCRVKYGEAWKEYERQVPYLFIPYVI

SEQ ID NO: 26732 - DNA, 4211 bp, Muscodor strobelii
  misc_feature: SGI EST ID NO. CUFF.63255.1
  misc_feature: Variant of the nucleotide sequence at SEQ ID NO 26730
tatgagcgcctgtagtcaggcatagggtcaggacccaaaagccttcaaatgtgtccttcagcgggaatctccgcgtactgcgggctaagggacagggccgggtgcccctggctaccgggacgagagcgactaaacagacaccaaaacacgacaatggcagcaagtaggcggaaatttgtcatatgggaaacaccgactttctcccacccgttattccacacccgtcatccacgccaaaatcctcccgggtttgtgagtaaggagacaccactgtcccaagtcgacgcttgcctcgacgagcatttagttgtttcgtcgtccactccttttgtagattcttgttttcgagatgtcgtcccgatactctctgcgagcaacccctcgaaaaaaggagcttttcgagggtatggtagaaacgcctgctcgtcgctcaacacgtcgaaagtctcaattccccgatagcatatccgacgacggcgagaccagctcagcagccgagtccactgccatggccaacaaaactaaacccgccccaaggcgcaagcctgtgcctaaatttgaggaggacgaggacgtcaagaacgagagcttcagccctgttgcgaaggaaaaggtgtcatctattgccaacggcaatggcaatggacacgtgcaagaaagcaagattgttgacggctgggctccgggtatggaccacaaggttgatgcttctggcttcttcgagtttggaggaagcttcggcgcgctggctcttatgatcggattccctgtcctcatgtggtatatgtggattggcactacctactacgacggaaagctgcctttgcctgcgaaagatcaatcattgggcgacttcgcaaagcacatgggaaatctcgtatacactggcgcttttcccacttggcaggcctggaagatctactggatttacatgatcttcgaaggtgtctgctacctcgtgctgcctggtgttgagggatacggcaagccgctccctttcgaaggtggcaagcaattgaagtatttctgcaatgcctacgctagcttctacttcaccatcttggttatgggtgctctacacttcagcggctacttccctatttacactttcattgacgagtttgggcctatcatgacggtgtccattctctccgggtttatcgtcagtttcattgcttacttctcggccatcgctcgcggccgccagcaccgtatgaccggttatcctatctacgatttcttcatgggtgctgagctcaacccccgcttgtttggcattcttgacttcaagatgttctacgaagtccgtattccctggtacatcctgttcggcatcagcgctgctgccgccgcacgtcagtacgagcagtacggctacgttagtggcgaggtctggttcttggtcatggcccactatctctacgccaatgcttgctccaagggcgagcagctcatcatcaccacctgggatatgtactatgagaaatggggcttcatgttgatcttttggaacatggccggtgtcccgctctcctactgccactgcactctgtacctggccaaccaccacccttccacctacgcctggaacaagttcgcccttgctgcgctcttcattgcctacctcggagcttacgtcatctgggaccagtgcaacggacagaagaatgccttccgtgccaaggaacgtggtactctcctcaagcgcaagactttccctgctctaccatggacctaccttgagaaccccaagaccctcgacaccgctgccggtgacaaactcctggttgatggctggtacggatacgcacgcaagatccactacacttgtgatgtctggtttgctatctcgtggggtctgattactggctttgacagcccatttccctggttctatcccgtcttcttcgtctgcatgattgctcaccgcacgatgcgtgatgttgagcgctgccgcgtcaagtatggtgaggcttggaaggagtacgagagacaagttccctacttgtttattccgtatgtcatctaaatgcataactgcaccaaataactcgtcaatcgaagtaaaactagcttcaaaacaaataccacggtttctatctgaaagccaaacacataagacgagctcggcgcgcctattttcttctcatttatgtggcgtggctcgtgaatttttgaatatctgtatataaatctgattcgaaagaagtcatgagctacttgcattgcgatgcgtcctggaaatgacgggagttggaatgaaaggaaaatagtcaaaggatctacctggtcttgacaatatcccgcggtggatggggatggaacaatacctattactgcctacgtaatgaataccattttattttatctcttcaaattctaggtatgcgaatggatttcatgccgcgtatctcacgtcttaaccccagattggtactgctgggttgcaaagtccccagtttcattcacccaagtcactacaaggataaatgtaatattagaaacgaatctctctgtttcatttcaacgcggcgcgttcatacctgcaacactaaaacaaacattccctaatcctccccgtaccacccaactcatactcaatccacctccccaccccccttctcccagcaaccagcacaggccccgggttcatgacatgacatccctcatacgtgagggcgaacggcggcgccgtagagtcaatcaacacgaatgcagtaggcaggggatataaatgcagcgcagacgcatagtcccaatgcactggccttatggcgttgcggaatggacagagataaccttggtctagtatggtctttacgagtttacgcgctgcttggacgtcgtgagatatttccggggtggtgggtttagttatgttgggggctgcgtcgacgtccattgtatctgtgttttcgagggtggtcgccatgtctatgtcgtctggttctttattctcgccttgtgtgtcgtttgttgatgtggttgtgggtttgagacgcacggctgtgcgtcggagacgggctgatatgtcgtcgcggaatagcacaatttcgtgggctgggccgaagacggagagacgggagggattacttgtccatattgcttcacctggcgctgtagagtttctgacgccgggctcagaattcgcgcttgcgaatgcgcgtcggatccgcgatgtgaacatttctgggacggcttttcgcggcagagggacggcggagccggatgagaatgaggaggaccagccgtcgttgtcgccggggacgaagacgaaggttgatgtttggaggagagtgggaaaatctgagagcacggatgctaaggagtcgaagtactccttgtattctacgctgccgccgcttgcgcccccaccggccatcacggcgtgctgtgtgaaattgcctgcgaggacgaacgtcatcggggatgagccctctggttctgtggcgtaggccgtcagaatcttgcgaagagcttgtagtgctcttggctggtcgagatttaactcgcccacgatgaccatccgtcctcggctcggcacatctgattgtgtgtccgcggattttagtaggcggcgctctactttgcgcatcttggagcctacggctctctcgctcccgacgccgaggaagtcgatccagccaaacccacctcctatggtatggtcttggccaccgtcgagcccactgacaccgagagtcgctttgcgcttctcgcatggaggctggccgatgaagaagccttggaacctgccgcctatgataccaccgatgccattacttgcgccgagtcccttgcctactgattcctcttcttcttcatatacaccgtctatcaaaacgatcattcccggcgtaaaccatgctgagtcttcggggatggccaccgcgtgcgataagtctaaggatattgttccagtgaggtcgtttatggccaacccgccggtggggaggacggataacatgccgagaagcatgtgatgtgtgccatgacggccgagtaggtttgctatgggtgtaatcttatgggtttgttgtgatgttaagactgaagaggatgatcgtttcagagacggtggcccttttgtcatcgcgacgcttgaactttggaaagactcatttcgtaataatctctgatgtataacattatatctgtttcgaaataaggctgtcttgtgcgaagctggtggtattaaggaaggcttcgag

SEQ ID NO: 26733 - DNA, 840 bp, Muscodor strobelii
  misc_feature: SGI cDNA ID NO. 569146
  misc_feature: Encodes the peptide sequence at SEQ ID NO 26734
atgaagcaccagcagggccagacttcagaacaatggacccagatcacgaagcctggtctgggattgattgatcgcaaatacagcactgacgccgagttcgatccgacgggggacaagacgcaatgggagcggtttgaatactacctggatcacttgaacaagcaaggagacggcaaagtgaaatacaaattgatttattacatccgtcacggtcaaggcatccacaatgtcaaggaacacgaagtcggcacaatggtatgggatgaccactggtcaaagctagatggggacggcgttgtcgaatggtttgacgcattcttgacagacacgggcaagcagcaagcgcgggctctcaacgacttctggagacattcaacgagagatctcaagatcccattgccccgagaatactactcgagtcctcatgcgcgatgcctcgagaccactagaattgcatactctggtcttgagcagccagcagatcgtcccttcaagcctgtcgtaaaggagatgctacgtgaacgcacaggtgaacacacctgcgataagagacgtactagaagctggatcgcggaaaattatcccgactttagaattgaggtgggctttactcaagaggatgagatatggcagccggactggcgggaaacggcagacgacgcgaagaaccgcaccatcaagctgctgaatgatgttttcagcaactccgacaagagcattgtttcattcacagcgcattcctccctcgttcatggactacatgccgccattgggcacaaggatattttcttacatccaggtgcgatgattccgctctttgttcaagctaaggagctgtaa

SEQ ID NO: 26734 - protein, 279 aa, Muscodor strobelii
  misc_feature: SGI Peptide ID NO. 569146
  misc_feature (64)..(253): Pfam Id: PF00300 Pfam Desc: Phosphoglycerate mutase family
  misc_feature (18)..(277): NCBI GI: 116208382 Blast Desc: CHGG_03484 [Chaetomium globosum CBS 148.51] gi|88184081|gb|EAQ91549.1| CHGG_03484 [Chaetomium globosum CBS 148.51]
  misc_feature (19)..(278): NCBI GI: 119191139 Blast Desc: CIMG_05617 [Coccidioides immitis RS]
  misc_feature (19)..(278): NCBI GI: 240107452 Blast Desc: phosphoglycerate mutase family protein [Coccidioides posadasii C735 delta SOWgp]
  misc_feature (14)..(277): NCBI GI: 170940302 Blast Desc: protein product [Podospora anserina]
  misc_feature (16)..(275): NCBI GI: 240274324 Blast Desc: phosphoglycerate mutase [Ajellomyces capsulatus H143]
  misc_feature (16)..(275): NCBI GI: 154270712 Blast Desc: conserved [Ajellomyces capsulatus NAm1] gi|150409784|gb|EDN05224.1| conserved [Ajellomyces capsulatus NAm1]
  misc_feature (16)..(275): NCBI GI: 225554947 Blast Desc: phosphoglycerate mutase [Ajellomyces capsulatus G186AR]
  misc_feature (3)..(279): NCBI GI: 169772683 Blast Desc: [Aspergillus oryzae RIB40] gi|83768671|dbj|BAE58808.1| protein product [Aspergillus oryzae]
  misc_feature (3)..(279): NCBI GI: 238490598 Blast Desc: conserved [Aspergillus flavus NRRL3357] gi|220696949|gb|EED53290.1| conserved [Aspergillus flavus NRRL3357]
  misc_feature (17)..(277): NCBI GI: 238845898 Blast Desc: phosphoglycerate mutase family protein [Microsporum canis CBS 113480]
MKHQQGQTSEQWTQITKPGLGLIDRKYSTDAEFDPTGDKTQWERFEYYLDHLNKQGDGKVKYKLIYYIRHGQGIHNVKEHEVGTMVWDDHWSKLDGDGVVEWFDAFLTDTGKQQARALNDFWRHSTRDLKIPLPREYYSSPHARCLETTRIAYSGLEQPADRPFKPVVKEMLRERTGEHTCDKRRTRSWIAENYPDFRIEVGFTQEDEIWQPDWRETADDAKNRTIKLLNDVFSNSDKSIVSFTAHSSLVHGLHAAIGHKDIFLHPGAMIPLFVQAKEL

SEQ ID NO: 26735 - DNA, 2103 bp, Muscodor strobelii
  misc_feature: SGI EST ID NO. CUFF.63023.0
  misc_feature: Variant of the nucleotide sequence at SEQ ID NO 26733
aaaagagcgtgtgaaattctcaaatcgttgagagcagaatatggacgcgaccaattggagcgtcccacataagagccttgtctcaccgttgggctgagactttgcccttaattaccacccatacttggagttttatcgtttggttgatgaaaaattcgtacatcaacgtaatgtcggggcagaagactttttctttccaggcaatttctggctttttcgaatgcgatgaagcaccagcagggccagacttcagaacaatcacgaagcctggtctgggattgattgatcgcaaatacagcactgacgccgagttcgatccgacgggggacaagacgcaatgggagcggtttgaatactacctggatcacttgaacaagcaaggagacggcaaagtgaaatacaaattgatttattacatccgtcacggtcaaggcatccacaatgtcaaggaacacgaagtcggcacaatggtatgggatgaccactggtcaaagctagatggggacggcgttgtcgaatggtttgacgcattcttgacagacacgggcaagcagcaagcgcgggctctcaacgacttctggagacattcaacgagagatctcaagatcccattgccccgagaatactactcgagtcctcatgcgcgatgcctcgagaccactagaattgcatactctggtcttgagcagccagcagatcgtcccttcaagcctgtcgtaaaggagatgctacgtgaacgcacaggtgaacacacctgcgataagagacgtactagaagctggatcgcggaaaattatcccgactttagaattgaggtgggctttactcaagaggatgagatatggcagccggactggcgggaaacggcagacgacgcgaagaaccgcaccatcaagctgctgaatgatgttttcagcaactccgacaagagcattgtttcattcacagcgcattcctccctcgttcatggactacatgccgccattgggcacaaggatattttcttacatccaggtgcgatgattccgctctttgttcaagctaaggagctgtaaatcgggggaagacaacagctacccagatagtatagaggatagcgagaagtatcacccaaatgccgatttaattatagagatagacttggtattgcagaacttcttgcagataatcatttccaaagaatatcatctgactcggttatcaagtaattcctgaaaagataaataggggtttgtcggatgatctgtggcagtaacgagccctcacactcgacgccttccttatactcgtcaaaaatcaggatcaacttcccatacaccgagctccctccttcctccttgatttaatcttgtcacactcacctgccgccctacctctttcctaatgctgaacagaacattggatgccagaaaacctcaatgtacacgccccttgttctagtttcacatgtttcaacaccgttcgtactctcatactcggccctttgatctacgttctcgctcgcacggcaatagcatggatctctagtctcactgcctttgccaatagcattggtatgatcccgtgccgaatttctgggcccaaccgaatactacattctatcatttgaagctccatccggatcggatggcttcatcaccacttgcgattgatctatacgtcgtccattgacccgtgatttcactagcaatcccatctcctgggtcactcggcgcttctccttactcggtgattatttcactcacgcgacatgtctcttcggcactttacccgtggtcttccaacaccctctacgtcgaacagccggtcgtccagactctccacgatacctgaacttgtcgaagatgatgatatatcaccatgcccatcatcaaagcgccagaagacacactccattagacctattttcgaaactcctcgttatcaagagcacaatgacgataattatatgtccgacaaccttcatagtcgccgacctaagcatggcaaatctccgcccagatccccgagcccatcaacccccaaattgaaaggtaacccacactcaagcacaccttatgttgtatagttgcccatagaatgtgtttttgaacatgtgatatt

SEQ ID NO: 26736 - DNA, 624 bp, Muscodor strobelii
  misc_feature: SGI cDNA ID NO. 569147
  misc_feature: Encodes the peptide sequence at SEQ ID NO 26737
atgtccgacaaccttcatagtcgccgacctaagcatggcaaatctccgcccagatccccgagcccatcaacccccaaattgaaagaaagttacagaaacttaggggtgaaacttcattccgtcaaagtaacgaagctcgaagatgtggtgaatgcagcgagagaagaaattgaagggaagatagacgccaatcttgccgtactctctgacttgaataagaaggctgaagacctctcggtatcgcctctggattcgcaaatcgacacacaaataacaggcagagacggccagaagagaacctcgacgatctccgttcgcgaatttgtgtccaatcgcgagaacaaagctagtagaaggagcaagaaacttgaagatctctgggcatcgtgggctgatgctcaagcagagatcgccgagctctccacagccataagagacggtcgtggctccaaaaacaccaaaggaatgtcttcttcacatggcgattggggtgccaacgagtatgccgatatcgatgggcggagcaagcaagtcgttgaagctatgcatgcatgtgaagagaagtacaaagaacaacttgagaatgaagcgaccggtatttttgatgcgactttcaatgactaa

SEQ ID NO: 26737 - protein, 207 aa, Muscodor strobelii
  misc_feature: SGI Peptide ID NO. 569147
MSDNLHSRRPKHGKSPPRSPSPSTPKLKESYRNLGVKLHSVKVTKLEDVVNAAREEIEGKIDANLAVLSDLNKKAEDLSVSPLDSQIDTQITGRDGQKRTSTISVREFVSNRENKASRRSKKLEDLWASWADAQAEIAELSTAIRDGRGSKNTKGMSSSHGDWGANEYADIDGRSKQVVEAMHACEEKYKEQLENEATGIFDATFND

SEQ ID NO: 26738 - DNA, 1293 bp, Muscodor strobelii
  misc_feature: SGI cDNA ID NO. 569148
  misc_feature: Reduced expression when VOC is produced
  misc_feature: Encodes the peptide sequence at SEQ ID NO 26739
atgtctccttcggcgaccgctaccgcatcgaatggccatgctggcgagcaggacgtggatcttacctcagcagctgttgagcatcggatgactgagaatcagacttccaatggtcactccaatggaacggcaaatgggaatggcgtcgcacgacccaacgttcatgaacttgacgcttcaaagctcatctacacactcgcaaaagattcaacccgtgaggttcctccggtgggcgtcacagaatacaacaacgagagcatctgcacagaccacatgatcacggcgaaatggactgccaaggcgggatggtcggcgccggaattgaagccctacggacctctgagcctgatgccaacggcgtcctgccttcactatgccacggagtgcttcgagggtcttaaggcgtaccgaggatacgatggaaagttgcgtcttttccgcccggactgcaacgctgagcgattgaacatgtctgccgtccgcatcagtctaccttcgttcaaggcttctgaactcgagaagctgatcgttgctcttatgtccgttgatggccccaaatggctgccagtcgaccggcctggcgagttcatctacctccgcccgactatgattggtacgcaatcacaactcggtgtccaggcacctagtgaagctatgctgtacatcattgccagctacatgcccgtgatggacaagcctcaaggcggcttgaaactgcacacatctcctgatgacatggttcgcgcttgggtaggtggcttcggcttcgccaagctcggtgcgaattacggtccctctctgctcgccactgccgaggcccgggccagaggtttccaccagatcttgtggctttatggaaaagaaggtctgtgtaccgaggctggtgccagcaatttcttcgtcgtttggaaaacgcgcgagggcaagactcaaatcgtcaccgcacctttggacgatcgtttgattctcgctggtgtaacgagacggagtgttcttgctcttgctcgtgagcacctcgctggagaggtcgaggttgttgagcgcaagtatagtatcgatgaggtgagcgaggctcatgctgaaggccgtctactcgagtctttcgcctctggaactgcttttttcgtcgcccctgtatctctcattcaccaccggggcaacgacatcgccatcccagcaggtaagggtggttcgggcgctcccatcacactgcgcctcaagcagatgctcgtcgacatcaaatacggaaacacgcagcacccctgggctgttatcgtgcccgaggagaaataa

SEQ ID NO: 26739 - protein, 430 aa, Muscodor strobelii
  misc_feature: SGI Peptide ID NO. 569148
  misc_feature (105)..(411): Pfam Id: PF01063 Pfam Desc: Aminotransferase class IV
  misc_feature (20)..(430): NCBI GI: 171693763 Blast Desc: protein product [Podospora anserina] gi|170946830|emb|CAP73634.1| protein product [Podospora anserina]
  misc_feature (13)..(430): NCBI GI: 39973823 Blast Desc: MGG_00942 [Magnaporthe grisea 70-15] gi|145018105|gb|EDK02384.1| MGG_00942 [Magnaporthe grisea 70-15]
  misc_feature (20)..(429): NCBI GI: 85101060 Blast Desc: NCU04292 [Neurospora crassa OR74A] gi|16944597|emb|CAC18611.2| branched-chain amino acids aminotransferase [Neurospora crassa] gi|28922620|gb|EAA31846.1|
  misc_feature (1)..(430): NCBI GI: 46117456 Blast Desc: FG04570.1 [Gibberella zeae PH-1]
  misc_feature (1)..(430): NCBI GI: 256729364 Blast Desc: [Nectria haematococca mpVI 77-13-4]
  misc_feature (42)..(430): NCBI GI: 116197817 Blast Desc: CHGG_07064 [Chaetomium globosum CBS 148.51] gi|88178343|gb|EAQ85811.1| CHGG_07064 [Chaetomium globosum CBS 148.51]
  misc_feature (57)..(430): NCBI GI: 169772469 Blast Desc: [Aspergillus oryzae RIB40] gi|83768564|dbj|BAE58701.1| protein product [Aspergillus oryzae]
  misc_feature (53)..(430): NCBI GI: 255933103 Blast Desc: Pc12g12060 [Penicillium chrysogenum Wisconsin 54-1255] gi|211582641|emb|CAP80833.1| Pc12g12060 [Penicillium chrysogenum Wisconsin 54-1255]
  misc_feature (57)..(429): NCBI GI: 256731630 Blast Desc: NECHADRAFT_48908 [Nectria haematococca mpVI 77-13-4]
  misc_feature (1)..(430): NCBI GI: 261353168 Blast Desc: branched-chain-amino-acid aminotransferase [Verticillium albo-atrum VaMs.102]
  misc_feature (89)..(424): SWISSPROT Homolog: EC 2.6.1.42 Branched-chain-amino-acid transaminase
  misc_feature: Useful for introducing or modulating the production of volatile compounds
  misc_feature: Useful for fungicidal and/or biocontrol applications
  misc_feature: Useful for production of fusel alcohols
MSPSATATASNGHAGEQDVDLTSAAVEHRMTENQTSNGHSNGTANGNGVARPNVHELDASKLIYTLAKDSTREVPPVGVTEYNNESICTDHMITAKWTAKAGWSAPELKPYGPLSLMPTASCLHYATECFEGLKAYRGYDGKLRLFRPDCNAERLNMSAVRISLPSFKASELEKLIVALMSVDGPKWLPVDRPGEFIYLRPTMIGTQSQLGVQAPSEAMLYIIASYMPVMDKPQGGLKLHTSPDDMVRAWVGGFGFAKLGANYGPSLLATAEARARGFHQILWLYGKEGLCTEAGASNFFVVWKTREGKTQIVTAPLDDRLILAGVTRRSVLALAREHLAGEVEVVERKYSIDEVSEAHAEGRLLESFASGTAFFVAPVSLIHHRGNDIAIPAGKGGSGAPITLRLKQMLVDIKYGNTQHPWAVIVPEEK

SEQ ID NO: 26740 - DNA, 2468 bp, Muscodor strobelii
  misc_feature: SGI EST ID NO. CUFF.63055.0
  misc_feature: Variant of the nucleotide sequence at SEQ ID NO 26738
gaataatgaaaaatttggcacgtggatcaagatctctctttgttcgcggatcgcgataataaatttgaatacccattgatatgtctctggaaaatgtgccctaggttagttccgtccgaggaccttaggagacaagggggcgccaccagaacggaacgccctactcttgacacacccgactctgacccggctctcagagtatttgatgttcccaacggccgaaataggtgcttcgtagacgtcgtctgaacgccgattggcccgtgactcatggtctgcatggttttccgttgctccaccatctagttcaagagccaccatttatactttctctacgcgctcctccacacctgcctgtcacacagactttgtttatcgctacattccagtgctggacagaatctcaggtctgctaattaaacatacgacttgcagtatacatcctcggggcaactcttccatcttggagtatctgatcgcgtctttatcagtcacacacaaacgcccgttacactaatagatagccatagccggccactatgtctccttcggcgaccgctaccgcatcgaatggccatgctggcgagcaggacgtggatcttacctcagcagctgttgagcatcggatgactgagaatcagacttccaatggtcactccaatggaacggcaaatgggaatggcgtcgcacgacccaacgttcatgaacttgacgcttcaaagctcatctacacactcgcaaaagattcaacccgtgaggttcctccggtgggcgtcacagaatacaacaacgagagcatctgcacagaccacatgatcacggcgaaatggactgccaaggcgggatggtcggcgccggaattgaagccctacggacctctgagcctgatgccaacggcgtcctgccttcactatgccacggagtgcttcgagggtcttaaggcgtaccgaggatacgatggaaagttgcgtcttttccgcccggactgcaacgctgagcgattgaacatgtctgccgtccgcatcagtctaccttcgttcaaggcttctgaactcgagaagctgatcgttgctcttatgtccgttgatggccccaaatggctgccagtcgaccggcctggcgagttcatctacctccgcccgactatgattggtacgcaatcacaactcggtgtccaggcacctagtgaagctatgctgtacatcattgccagctacatgcccgtgatggacaagcctcaaggcggcttgaaactgcacacatctcctgatgacatggttcgcgcttgggtaggtggcttcggcttcgccaagctcggtgcgaattacggtccctctctgctcgccactgccgaggcccgggccagaggtttccaccagatcttgtggctttatggaaaagaaggtctgtgtaccgaggctggtgccagcaatttcttcgtcgtttggaaaacgcgcgagggcaagactcaaatcgtcaccgcacctttggacgatcgtttgattctcgctggtgtaacgagacggagtgttcttgctcttgctcgtgagcacctcgctggagaggtcgaggttgttgagcgcaagtatagtatcgatgaggtgagcgaggctcatgctgaaggccgtctactcgagtctttcgcctctggaactgcttttttcgtcgcccctgtatctctcattcaccaccggggcaacgacatcgccatcccagcaggtaagggtggttcgggcgctcccatcacactgcgcctcaagcagatgctcgtcgacatcaaatacggaaacacgcagcacccctgggctgttatcgtgcccgaggagaaataagcgtggagttttctcacccctcagacgcaaggacttccgtgcgaccaatgactttcgcctcgcccgcttgacaggatcagcccatgcttggggcgattataagaaaaattgtgtgtataactctcgggtacgatgattgatagtatcccttttcaccgcaagaagcttggaagtcctatatgcgtcaaggacctccaaccccaaggaccgcgccacacctcatgcgcattaccaccaccggagttgaggttgggggaagccgcccaaatcctccaaaaacaacacaacaatactccaataataccacaaagcgttcaaagattgcgtatcacaaggttgcgcactaaaaatacctggtttgatttttccggcgttctggtctgggggcatggctggcgtcacgtccggacggacatagcacgaatgcatgcaagttagatagatgtctgtacgcacgtctgcgatgacaaagtccgttacttgataagaatagactaaataaaggacccttaattgttcatgaacgaaggactcggtcgtgaaatcagcaataacttgaccatgatgcctcccatatctgtgcgacagccgcctattctccacctcatttcatgacctttcttcattagttgcgac

SEQ ID NO: 26741 - DNA, 1146 bp, Muscodor strobelii
  misc_feature: SGI cDNA ID NO. 569149
  misc_feature: Encodes the peptide sequence at SEQ ID NO 26742
atggatgacttcgacccgaatatcagcaatggcagctgctgggctggggtcaacttcgccctcccggaggaatacatcccctgcggcaacattgcagacgggaatagctacgcatgttgccattatggcgataagtgcgtgtcaagcaatgcttgctttcacgatcaattcggcattacctacctcgccggatgcaccgacaaaggatttaacggacctggctgcactactaagggcccttacataaatcaatcatgggtcggccttcagcgttgcgatcctgataaagaccgttggggcggatgccccgagaaagatgaaatagttggcacaggtccaccgagtggaaattgcaagtgttccccaggtacaattctgttcacagacggtccaacgctcaaagatattgcgaggctccctgatgacttgggcggaacgatcacttggtatgctggacatgcaccccagcccacttcatcagagacgccaaccacgatgtcaacatcaagcgtgcccttgtcaacatcttcaactgacaattccactatgacctctgtcgcaccagagccaagtgcgtcgaacacaagcccgtctgagcctgcgtcttcagcatcggggctttcaacgaattcaaaaataggcattggagttggtgcggctgttggctttcttatcattgtgtgtctgattgccgtcgctgtccttcttcgtaagaagaaaactgagggaagcgttggcagtccgaacacttcaccaccaccgcagcaagcatatcgtggagactcgccatcgacatacgggttcaagtcggagctcccagccgagccactttccgctacttccaatggcacaggcttcacgccgagccccatgacttcaccccctcctcaggagcagcaacagttcaaagcatataatccacaggttcacggtgactacagcagatactctgcttttccagaaagtcgtagtggaaacaatgtcaatccgtctaacaatgcggatcgcgtctctccagagactacaggacagacgatcagaggcggaagtgggggccaaggtccaatgacatctcagaatacgggttccaacatcgggcaagcactaactacaggaactcacgaagtgcacgagcttgagggctga

SEQ ID NO: 26742 - protein, 381 aa, Muscodor strobelii
  misc_feature: SGI Peptide ID NO. 569149
  misc_feature (5)..(159): NCBI GI: 171688158 Blast Desc: protein product [Podospora anserina] gi|170944041|emb|CAP70151.1| protein product [Podospora anserina]
  misc_feature (1)..(104): NCBI GI: 261357687 Blast Desc: conserved [Verticillium albo-atrum VaMs.102]
  misc_feature (1)..(163): NCBI GI: 171677458 Blast Desc: protein product [Podospora anserina] gi|170936797|emb|CAP61455.1| protein product [Podospora anserina]
  misc_feature (3)..(245): NCBI GI: 171676926 Blast Desc: protein product [Podospora anserina] gi|170936530|emb|CAP61190.1| protein product [Podospora anserina]
  misc_feature (144)..(355): NCBI GI: 212530452 Blast Desc: kinesin light chain, [Penicillium marneffei ATCC 18224] gi|210074781|gb|EEA28868.1| kinesin light chain, [Penicillium marneffei ATCC 18224]
  misc_feature (190)..(267): NCBI GI: 116193101 Blast Desc: CHGG_06268 [Chaetomium globosum CBS 148.51] gi|88182181|gb|EAQ89649.1| CHGG_06268 [Chaetomium globosum CBS 148.51]
  misc_feature (184)..(256): NCBI GI: 171683899 Blast Desc: protein product [Podospora anserina] gi|170941910|emb|CAP67562.1| protein product [Podospora anserina]
  misc_feature (139)..(242): NCBI GI: 239606988 Blast Desc: conserved [Ajellomyces dermatitidis ER-3]
  misc_feature (139)..(274): NCBI GI: 261194054 Blast Desc: conserved [Ajellomyces dermatitidis SLH14081] gi|239588446|gb|EEQ71089.1| conserved [Ajellomyces dermatitidis SLH14081]
MDDFDPNISNGSCWAGVNFALPEEYIPCGNIADGNSYACCHYGDKCVSSNACFHDQFGITYLAGCTDKGFNGPGCTTKGPYINQSWVGLQRCDPDKDRWGGCPEKDEIVGTGPPSGNCKCSPGTILFTDGPTLKDIARLPDDLGGTITWYAGHAPQPTSSETPTTMSTSSVPLSTSSTDNSTMTSVAPEPSASNTSPSEPASSASGLSTNSKIGIGVGAAVGFLIIVCLIAVAVLLRKKKTEGSVGSPNTSPPPQQAYRGDSPSTYGFKSELPAEPLSATSNGTGFTPSPMTSPPPQEQQQFKAYNPQVHGDYSRYSAFPESRSGNNVNPSNNADRVSPETTGQTIRGGSGGQGPMTSQNTGSNIGQALTTGTHEVHELEG

SEQ ID NO: 26743 - DNA, 1244 bp, Muscodor strobelii
  misc_feature: SGI EST ID NO. CUFF.63033.0
  misc_feature: Variant of the nucleotide sequence at SEQ ID NO 26741
cctgggacatcgataacttgaataatttgataattccagctcgatccgcattttgatacacaagagcttaaaaataatcatcacattcaatacctaccttatcttcccgcggggtcgatagctgtatctgcgcctgaggttcaaatggcacagggcaagcggggaggaccagttattgatcaccacctgggccaaagcaactggagcaggaggttacacagggttcgataacactaagtcaacaggtaccacggtcgattattggccagtgatttaatgctcggctctctgccctctgacctacagcaaacagaccactttctgtcatttttcagcttctctttgtctgactctccccccccgtgctcacccactggcgggatgtgcaggcgcgtctcgactttctcactcgcctgagcacttccacctttgagacaacacggggtctcgcactcgagataggtcaaccactcaccacatgcagcgattgttttccaattttcgcgttatttcttcagctggtgtcgcccaaccctagtgacctacaggtgacccttcggtgatataacatattgatgttgaccgacgcaccgaatctcaacatggatgacttcgacccgaatatcagcaatggcagctgctgggctggggtcaacttcgccctcccggaggaatacatcccctgcggcaacattgcagacgggaatagctacgcatgttgccattatggcgataagtgcgtgtcaagcaatgcttgctttcacgatcaattcggcattacctacctcgccggatgcaccgacaaaggatttaacggacctggctgcactactaagggcccttacataaatcaatcatgggtcggccttcagcgttgcgatcctgataaagaccgttggggcggatgccccgagaaagatgaaatagttggcacaggtccaccgagtggaaattgcaagtgttccccaggtacaattctgttcacagacggtccaacgctcaaagatattgcgaggctccctgatgacttgggcggaacgatcacttggtatgctggacatgcaccccagcccacttcatcagagacgccaaccacgatgtcaacatcaagcgtgcccttgtcaacatcttcaactgacaattccactatgacctctgtcgcaccagagccaagtgcgtcgaacacaagcccgtctgagcctgcgtcttcagcatcggggctttcaacgaattcaaaaataggc

SEQ ID NO: 26744 - DNA, 1104 bp, Muscodor strobelii
  misc_feature: SGI cDNA ID NO. 569150
  misc_feature: Encodes the peptide sequence at SEQ ID NO 26745
atgagcactaccgaagaatgcactatggagtcaccatcagtttatgagaatcttcgccaggcgttcttcactcaggagggcaccgatttggtggttgtctgcaaagaagggaccgaaatccgagcccactggattgtactctatcgtcattcgccattcctggcatccatgatcgaggagacagtggatgagaagggcaaggttggctacaagattgatcttcccgatgtggactttcacgacttctacatggtgctccagtttctctatggtggtaactacaaagactacgagaacgtcggcagctacagcacaccaagcaacgtgatcttcctccccttggaagaaatcgaggagagactccaaacgctgcccttccagggggttgagcagggcaccgcaagcaacctctttcctgatgatgaatacgaaccgagtgcgcttgagctctacaatttacaacaggaccagccggagaagtttgacgaaaaagatgacatctcttactatgtcgatgacaatgatcttggacccgagccagatcatagtggtgatgaggaagacgatggtggaagaatgcgcaggtttgagggccataacttattcgactccttgcatgtctacaatctcgcggcacgctttggcattatgccgcttatgctcattgctcgagaccgcttctgtcgcactgccgagaaggtgctgttgtacttacctggcagcaaaggaaagaagggaaagaagggaaagaaggcaaagaaggcaaagaaaggaaagccggagccgtggaaaacacacgatgggcaaagaatctatcgcgccaagttgatcaaggcagtctacgatgacttcgcaaaagtctgtgaagaagtctacgagacagttcctgcttcggatactctgcgcctctgcctagcattcctcattgcggcaggttacaaaaatgatgcttttcgcgagaacatgcgtccgttgctggagaagtatcccgagctcgaagttgccgtggttgagtgcatgcgaatccccgacgctgatgattcgacatccgacggtctcgacgagatgatgctcgatgccgataaggaggttctagatggataa

SEQ ID NO: 26745 - protein, 367 aa, Muscodor strobelii
  misc_feature: SGI Peptide ID NO. 569150
  misc_feature (22)..(118): Pfam Id: PF00651 Pfam Desc: BTB/POZ domain
  misc_feature (22)..(92): Pfam Id: PF00651 Pfam Desc: BTB/POZ domain
  misc_feature (13)..(338): NCBI GI: 46122735 Blast Desc: FG05745.1 [Gibberella zeae PH-1]
  misc_feature (11)..(338): NCBI GI: 256727319 Blast Desc: NECHADRAFT_33838 [Nectria haematococca mpVI 77-13-4]
  misc_feature (14)..(92): NCBI GI: 158297901 Blast Desc: AGAP004767-PA [Anopheles gambiae str. PEST] gi|157014550|gb|EAA13238.4| AGAP004767-PA [Anopheles gambiae str. PEST]
MSTTEECTMESPSVYENLRQAFFTQEGTDLVVVCKEGTEIRAHWIVLYRHSPFLASMIEETVDEKGKVGYKIDLPDVDFHDFYMVLQFLYGGNYKDYENVGSYSTPSNVIFLPLEEIEERLQTLPFQGVEQGTASNLFPDDEYEPSALELYNLQQDQPEKFDEKDDISYYVDDNDLGPEPDHSGDEEDDGGRMRRFEGHNLFDSLHVYNLAARFGIMPLMLIARDRFCRTAEKVLLYLPGSKGKKGKKGKKAKKAKKGKPEPWKTHDGQRIYRAKLIKAVYDDFAKVCEEVYETVPASDTLRLCLAFLIAAGYKNDAFRENMRPLLEKYPELEVAVVECMRIPDADDSTSDGLDEMMLDADKEVLDG

SEQ ID NO: 26746 - DNA, 3594 bp, Muscodor strobelii
  misc_feature: SGI cDNA ID NO. 569151
  misc_feature: Reduced expression when VOC is produced
  misc_feature: Encodes the peptide sequence at SEQ ID NO 26747
atgtccaacggaggtcccacgctgaccttgccgtcgcccacacatcaccatcatcaacatgtcgatgtgggcgccggaatccggtcactgaggcgctctttatcgcgatctccatccaagttcattgttcgcaccgcctcgcaaagcagctctgagagcggttctaacccttcatcaccttcttgtcgccgtgtacagtcccagtatttcggggccggccagtcgactagctcgctccagccaaactctgctcatacacaatcgcctttagcaacgccgtttcgacctagtgtaagactatcgctacgatctgctaaatcggcgtcgaagagtcctgttgtatctgcttcgggcgttcgatcaggaatcagaacacgcgtgtcgccacgcacatcaccacggagcccgtccagacgagccttgaatgctgccgcttctacagcgggcaataacactccccgtgtaaacttggaagctcttctcccaggacaggaaaactcgaccactccgtcgaccacaccattttcacaaagccccgttccgcgcaagagttccgataagccatccaataggcatagtatgcatcttgacatgtctggcgcatctctactcacactctcgcgcttctcggaggcgagtggtacaccgactcatggtgccttcgcaagtcctctgaaaaagaggagcgatgcatccttagatttcgaccaatcgtttgagaacagccctaaagtgaagcgacgaagttgtggacctggaagtttgggcgaggggttcaatatcttcgaccatgccccgaagtcacctagtcctagcgatatacaggacgactcagctaacgagtaccaatggacgcagcatataacgtctgcccccgttgacacatcgctggcaacaactccagcagcaatgccgcgaagggcaggctcgctccgcaaatctactctgcagcagcgccatgctggcgaccgagctgttggacgacgaaatggaccttcggcgatccctcagaatactgctgaggcgacgacgcctatcggaaagacgcgaccgcggctgtctatggacgccttcatgccgcctcccagtcgagacagtccgttcaacattccaggaccgctccctaacgcatcaatccatcagcctcatccactttccacaacgatgacgatgtcatcatcaggctctagcctaggcgatgattcaccgacccactttcccattcaccacgagaagccgagaatgaatttctctaagagcatgccgcttggtgctgccagacccagacctgatgatcgtgctgttcccagcgtttccacgcctgactaccagaatgtgaagccgttggccggtgccttcgcttctactggtctagtgtctaaagtcaaccggaacccggagtttggaaattctaccaactcattcgctgtccctgatacaccttgtaagaggccgcctactgggttggctaagagaccacctaatggcttttctacttacccaccgccgccaccgtcaggtgccaaaagatacagtagacgcacaccgtttggttcaccgtccacaccattcgctcctgcatctagtcggtctcacaacatttttgacacacagactcgtccggtcgcttttaatggattcaactataagcattctcggaagggcagtacactcagcatccacagtgacgatggcagaagtcccgtgaagaacgaggacgaaatggagactgggaatgagttcgatgtacctccaacccctacaaaacccaacctcgtgacccaaagttcaaatgagtttgcggtggatcttaacgaaagccccacgacaaatcgcctttctctattctctaagtctactagtggaccggctccggtatggcaatcgcatgccgacagtggttgtaagtttaacgcccaacatgggacttgcgaggacagagccgtcgaggggatcagtctggttcgcgaagacttctcgactactcccggtcaaggacctgcctcagcaaaatccctttccttaccttcttttcgccggtctagagctagacgcggtcccttttctttgcccacaccactcgaacccatggttggagacatggacaaacctgccgtcaaagtacattttgctaagagtcatgttgtaattgcagcgagtcctctggatagagtggagtttgccgacaaaggctcacctagaacacctcaggaaggcacaattccttctgctcctggtggctcatcattgtcgaacgctccagagggattcctctttcctggaagcaatggaagagcctcgattgttccacctgccacacctactactcggcaggatagctttctgatgcaacccgagcgacgtgttgttactcccgttcacggggcagcgagtctggagattgatgccagccttttccgtcgcttttcgaaggttgagttcatcggacgaggtgaattctcgcgagtgtatcgagtagaggaatctgtgagacaatctgttgcgcctcacactagtttcttcaatactccgactcatgcgtcacatacacctccttcaccagtgccgaataaggtttacgctgttaagaagtcgcttgctctgaagggggagaaagatcgggcctttcgcctccgtgaagtctcagtgcttgaaacgctgagaggctgcgaccacgtcttacagcttgtcgataactggcaggagaagaatagtctctacattcagacagagttctgcgaagagggcaatcttcaagagtttctctcagatgttggaatgaaaggtagactagatgacttcaggatgtggaaaatcatgcttgaagtgtgcatgggcctgaagcatatccacgctgctggtattgtccaccgagacatgaagcctgccaacatactagtcacattcgacggaaccttgaaaattggtgacttcggattagctacgagcttatccgctgacgatctgggtcttgagatggagggggaccgaacgtacattgctcctgagcagcttcgatcgcagtattctctgtctaccgatgtgttttctctaggtctcatcatgctagagattgcagctaatgtcaaacttcccgagaacggtactacgtggtcggatctcagacacgataacttcacagagattcctaccctcactcagggtagccatcctatctcgcgggatgctgaaggtatgcccatcgaggagtcggatcgcaatctgagctcgggcgaagacgagaaacaatctgctaggatcaaccgtcgaagctacatgctcagaggcggaagcagacagtctggagacattttcgggttacgtcctagctcttttcggaagtcagagctgcaacagccccctgccttcatggacgagcctagccattacagctctttggaccgggtagtcaaggcaatgctcgcctcagttccggaccaacgtccgaccattcagcagctgcttaacctcgaatctctggtctgggttgctattcgccagcgagcaggggcaactgtttacgagggtaactggggacccaatgatgaaccccaggaggcagtctcactcgacaccgaaatgacggatgtctaa

SEQ ID NO: 26747 - protein, 1197 aa, Muscodor strobelii
  misc_feature: SGI Peptide ID NO. 569151
  misc_feature (809)..(1160): Pfam Id: PF00069 Pfam Desc: Protein kinase domain
  misc_feature (903)..(988): Pfam Id: PF07714 Pfam Desc: Protein tyrosine kinase
  misc_feature (130)..(1197): NCBI GI: 116197737 Blast Desc: CHGG_07024 [Chaetomium globosum CBS 148.51] gi|88178303|gb|EAQ85771.1| CHGG_07024 [Chaetomium globosum CBS 148.51]
  misc_feature (3)..(1197): NCBI GI: 85100474 Blast Desc: NCU04326 [Neurospora crassa OR74A] gi|28922506|gb|EAA31736.1| [Neurospora crassa OR74A] gi|28950186|emb|CAD71054.1| related to protein kinase SWE1
  misc_feature (2)..(1080): NCBI GI: 156055290 Blast Desc: SS1G_04996 [Sclerotinia sclerotiorum 1980] gi|154702781|gb|EDO02520.1| SS1G_04996 [Sclerotinia sclerotiorum 1980]
  misc_feature (4)..(1197): NCBI GI: 225684173 Blast Desc: conserved [Paracoccidioides brasiliensis Pb03]
  misc_feature (4)..(1197): NCBI GI: 239606464 Blast Desc: protein kinase [Ajellomyces dermatitidis ER-3]
  misc_feature (730)..(1197): NCBI GI: 238493887 Blast Desc: protein kinase, [Aspergillus flavus NRRL3357] gi|220696674|gb|EED53016.1| protein kinase, [Aspergillus flavus NRRL3357]
  misc_feature (730)..(1197): NCBI GI: 169784046 Blast Desc: [Aspergillus oryzae RIB40] gi|83775229|dbj|BAE65352.1| protein product [Aspergillus oryzae]
  misc_feature (730)..(1197): NCBI GI: 32400326 Blast Desc: protein kinase [Aspergillus oryzae]
  misc_feature (730)..(1197): NCBI GI: 115386078 Blast Desc: ATEG_06894 [Aspergillus terreus NIH2624] gi|114190578|gb|EAU32278.1| ATEG_06894 [Aspergillus terreus NIH2624]
  misc_feature (730)..(1197): NCBI GI: 145235908 Blast Desc: protein product [Aspergillus niger] gi|134075049|emb|CAK44848.1| protein product [Aspergillus niger]
  misc_feature: Useful for introducing or modulating the production of volatile compounds
MSNGGPTLTLPSPTHHHHQHVDVGAGIRSLRRSLSRSPSKFIVRTASQSSSESGSNPSSPSCRRVQSQYFGAGQSTSSLQPNSAHTQSPLATPFRPSVRLSLRSAKSASKSPVVSASGVRSGIRTRVSPRTSPRSPSRRALNAAASTAGNNTPRVNLEALLPGQENSTTPSTTPFSQSPVPRKSSDKPSNRHSMHLDMSGASLLTLSRFSEASGTPTHGAFASPLKKRSDASLDFDQSFENSPKVKRRSCGPGSLGEGFNIFDHAPKSPSPSDIQDDSANEYQWTQHITSAPVDTSLATTPAAMPRRAGSLRKSTLQQRHAGDRAVGRRNGPSAIPQNTAEATTPIGKTRPRLSMDAFMPPPSRDSPFNIPGPLPNASIHQPHPLSTTMTMSSSGSSLGDDSPTHFPIHHEKPRMNFSKSMPLGAARPRPDDRAVPSVSTPDYQNVKPLAGAFASTGLVSKVNRNPEFGNSTNSFAVPDTPCKRPPTGLAKRPPNGFSTYPPPPPSGAKRYSRRTPFGSPSTPFAPASSRSHNIFDTQTRPVAFNGFNYKHSRKGSTLSIHSDDGRSPVKNEDEMETGNEFDVPPTPTKPNLVTQSSNEFAVDLNESPTTNRLSLFSKSTSGPAPVWQSHADSGCKFNAQHGTCEDRAVEGISLVREDFSTTPGQGPASAKSLSLPSFRRSRARRGPFSLPTPLEPMVGDMDKPAVKVHFAKSHVVIAASPLDRVEFADKGSPRTPQEGTIPSAPGGSSLSNAPEGFLFPGSNGRASIVPPATPTTRQDSFLMQPERRVVTPVHGAASLEIDASLFRRFSKVEFIGRGEFSRVYRVEESVRQSVAPHTSFFNTPTHASHTPPSPVPNKVYAVKKSLALKGEKDRAFRLREVSVLETLRGCDHVLQLVDNWQEKNSLYIQTEFCEEGNLQEFLSDVGMKGRLDDFRMWKIMLEVCMGLKHIHAAGIVHRDMKPANILVTFDGTLKIGDFGLATSLSADDLGLEMEGDRTYIAPEQLRSQYSLSTDVFSLGLIMLEIAANVKLPENGTTWSDLRHDNFTEIPTLTQGSHPISRDAEGMPIEESDRNLSSGEDEKQSARINRRSYMLRGGSRQSGDIFGLRPSSFRKSELQQPPAFMDEPSHYSSLDRVVKAMLASVPDQRPTIQQLLNLESLVWVAIRQRAGATVYEGNWGPNDEPQEAVSLDTEMTDV

SEQ ID NO: 26748 - DNA, 5284 bp, Muscodor strobelii
  misc_feature: SGI EST ID NO. CUFF.63221.1
  misc_feature: Variant of the nucleotide sequence at SEQ ID NO 26746
cttgaatgttcatgtcacttttctgctccggtactcgtgctagagtcgcaaagcgggcgcaaaaccgctaaacccaccaagccctctcacaccgcacctgaatcgcaagaccccaggcttgtaccgcattttgaccgctacttgcgacggaccccttctccttttactccttccctcgtgccaggctcctcccccaatactacccaagaaccactcattgcgaaaagagacggactgactgactggttggggctgggtcgtcttgctgcctatctggaattctacccgttcacctgttcaacctgcaacctgattctggaaattaccatattcaacgtctcttcagtatcgccagtacacgactgtcttgtgcgctctggctatcacgagaggtccaaggtgtgggagaggtcctcgacaccttctcgccacactcccatttgctctgtcaccctaacttagcccgacgtcacgtcaggatcacctgcaagctggtggcgactctccttgtcgtgtcatcatcagtgtgcgccccgtggctcggctgcacttgttcctcatttacgcccatcagcagacttatcagcacacattcgatcctacatccaacttggtgtcgaaatagtaataagggaaagaggaattgcgcgacctagggttggatttctatccgtttcacatacctacaaagacactacctctggaatttcccgtgcctagttctcagtgaaacacatccactcaacacaacatgagcagctttaatggtcgccactgaagaagctcctttgcccttgcatcattggcattccagatgtcttcaatcagttgattagactgctttgttcacattctccattcatccaaccgtaccgacattgtctgttgcatgcgattgttagacctgccgtaggcgcattgtttgatctcacgccacctttcggcccgcctatctaactgccgctctcgtcccgaatgctgtcctgtcgcatgccaatctagcactacagcgcaaaatgtccaacggaggtcccacgctgaccttgccgtcgcccacacatcaccatcatcaacatgtcgatgtgggcgccggaatccggtcactgaggcgctctttatcgcgatctccatccaagttcattgttcgcaccgcctcgcaaagcagctctgagagcggttctaacccttcatcaccttcttgtcgccgtgtacagtcccagtatttcggggccggccagtcgactagctcgctccagccaaactctgctcatacacaatcgcctttagcaacgccgtttcgacctagtgtaagactatcgctacgatctgctaaatcggcgtcgaagagtcctgttgtatctgcttcgggcgttcgatcaggaatcagaacacgcgtgtcgccacgcacatcaccacggagcccgtccagacgagccttgaatgctgccgcttctacagcgggcaataacactccccgtgtaaacttggaagctcttctcccaggacaggaaaactcgaccactccgtcgaccacaccattttcacaaagccccgttccgcgcaagagttccgataagccatccaataggcatagtatgcatcttgacatgtctggcgcatctctactcacactctcgcgcttctcggaggcgagtggtacaccgactcatggtgccttcgcaagtcctctgaaaaagaggagcgatgcatccttagatttcgaccaatcgtttgagaacagccctaaagtgaagcgacgaagttgtggacctggaagtttgggcgaggggttcaatatcttcgaccatgccccgaagtcacctagtcctagcgatatacaggacgactcagctaacgagtaccaatggacgcagcatataacgtctgcccccgttgacacatcgctggcaacaactccagcagcaatgccgcgaagggcaggctcgctccgcaaatctactctgcagcagcgccatgctggcgaccgagctgttggacgacgaaatggaccttcggcgatccctcagaatactgctgaggcgacgacgcctatcggaaagacgcgaccgcggctgtctatggacgccttcatgccgcctcccagtcgagacagtccgttcaacattccaggaccgctccctaacgcatcaatccatcagcctcatccactttccacaacgatgacgatgtcatcatcaggctctagcctaggcgatgattcaccgacccactttcccattcaccacgagaagccgagaatgaatttctctaagagcatgccgcttggtgctgccagacccagacctgatgatcgtgctgttcccagcgtttccacgcctgactaccagaatgtgaagccgttggccggtgccttcgcttctactggtctagtgtctaaagtcaaccggaacccggagtttggaaattctaccaactcattcgctgtccctgatacaccttgtaagaggccgcctactgggttggctaagagaccacctaatggcttttctacttacccaccgccgccaccgtcaggtgccaaaagatacagtagacgcacaccgtttggttcaccgtccacaccattcgctcctgcatctagtcggtctcacaacatttttgacacacagactcgtccggtcgcttttaatggattcaactataagcattctcggaagggcagtacactcagcatccacagtgacgatggcagaagtcccgtgaagaacgaggacgaaatggagactgggaatgagttcgatgtacctccaacccctacaaaacccaacctcgtgacccaaagttcaaatgagtttgcggtggatcttaacgaaagccccacgacaaatcgcctttctctattctctaagtctactagtggaccggctccggtatggcaatcgcatgccgacagtggttcgagtcctctggatagagtggagtttgccgacaaaggctcacctagaacacctcaggaaggcacaattccttctgctcctggtggctcatcattgtcgaacgctccagagggattcctctttcctggaagcaatggaagagcctcgattgttccacctgccacacctactactcggcaggatagctttctgatgcaacccgagcgacgtgttgttactcccgttcacggggcagcgagtctggagattgatgccagccttttccgtcgcttttcgaaggttgagttcatcggacgaggtgaattctcgcgagtgtatcgagtagaggaatctgtgagacaatctgttgcgcctcacactagtttcttcaatactccgactcatgcgtcacatacacctccttcaccagtgccgaataaggtttacgctgttaagaagtcgcttgctctgaagggggagaaagatcgggcctttcgcctccgtgaagtctcagtgcttgaaacgctgagaggctgcgaccacgtcttacagcttgtcgataactggcaggagaagaatagtctctacattcagacagagttctgcgaagagggcaatcttcaagagtttctctcagatgttggaatgaaaggtagactagatgacttcaggatgtggaaaatcatgcttgaagtgtgcatgggcctgaagcatatccacgctgctggtattgtccaccgagacatgaagcctgccaacatactagtcacattcgacggaaccttgaaaattggtgacttcggattagctacgagcttatccgctgacgatctgggtcttgagatggagggggaccgaacgtacattgctcctgagcagcttcgatcgcagtattctctgtctaccgatgtgttttctctaggtctcatcatgctagagattgcagctaatgtcaaacttcccgagaacggtactacgtggtcggatctcagacacgataacttcacagagattcctaccctcactcagggtagccatcctatctcgcgggatgctgaaggtatgcccatcgaggagtcggatcgcaatctgagctcgggcgaagacgagaaacaatctgctaggatcaaccgtcgaagctacatgctcagaggcggaagcagacagtctggagacattttcgggttacgtcctagctcttttcggaagtcagagctgcaacagccccctgccttcatggacgagcctagccattacagctctttggaccgggtagtcaaggcaatgctcgcctcagttccggaccaacgtccgaccattcagcagctgcttaacctcgaatctctggtctgggttgctattcgccagcgagcaggggcaactgtttacgagggtaactggggacccaatgatgaaccccaggaggcagtctcactcgacaccgaaatgacggatgtctaaatcgaccagctgcaaatatcgaatttgtatccgaagttcgcaacttgcatattgcttaatctcgggtgtgcgcatatgaattcgcatctgggctgatgttggcgttggttcgcctaacttattgccagctctgctggatatatcaaagaggtggtcatgatgtgacatgctagccaccaccttagggatatgatctttactcattacgattggggtatcgttcgtcactcgacatatgatgcacgactcttacgaacattattgatgacacgggcgcctgcgcgccttaattcagtacaaatggagacagtgattttgtcacttgtcaatagttggggtctcgataaacaatcacggggaatcatcgatgcagatacatcaccagagaatttggcttgccattgcttctctgttaatgctcggagtcgtggctagtagcatttgctcatccacaaactcgaacatcaccgactctgttccatcgacatccctgtgtgtataccactatgatataggaatcaaagggagcatttggcatcgcgaggctttgaccacgtgtctgctccaacggacggcgttctcggcgaaaaaaggaaaaagaggttcaacgggagtaattcacctggaaggcttcatgatggttcaaggaaacggtatctggtcctgtatgaataggaggcggaggaggtttttggctgtcggttgtcaattcccctccgtcggccaaacacccttgtattatggatgcttcgtccccttgttgggtcggaacctggttagatggggaggaaccgaaggaaaggacatcacattaattcttctcgatgtgtgagaaacaagaccttgacaaggcttgatcgagatgtctacgtttttacgaagatttagacgtacgaatgacgatatgatatgactttcctcggcac

SEQ ID NO: 26749 - DNA, 1191 bp, Muscodor strobelii
  misc_feature: SGI cDNA ID NO. 569152
  misc_feature: Encodes the peptide sequence at SEQ ID NO 26750
atgcgtcggttagtacatctcatgacgaccaaattccacctattcgaccacctcaacgcactcaaaagctacatcctcctaggccaaggcgacttcatagccctactcatggagtcgctcgccgcaaacctcgataagcccgccggggctcaatacagacacactctaaccgcacaactcgagcacgcaatccgcggctcaaacgcacaatacgactcccccgaagtcctgcgccgtctcgacgcccgcatgctccagctatcccacggagacataggatgggactgcttcacactggaatacaaaatcgacgccccggtcgacgtcgtagtctcagactgggggaatagacaatatctcaaagtcttcaacttcctctggcgcatcaaacgcgtcgaattcgccctctcctcaacctggcgaaaagtgacaaccgggtcacgaggcgtactacaaacgaaccacgcagtcgtaacagaaacatggaaaacaacacgcggcgtcttagcagaaatggtgcacttcgtaggccagctacaatactacatcctcttcgaagtcatagaatcctcctggaccgaactgcaatcccgactcaagcgcccagacgcgacgctagacgatataatagacgcgcataaaaactacctcaactccataacgcacaaaggtcttctcggcgtccggcgccaacgcttcgcctcatcatcaaacagtaagacggaggaagacacgaacagctacatgattcaactcggtgaactcctccgcaccatgctctcctaccgcgactcagtcgacggcttatactcctggtccgtatccgacttcacgcagcgccaggaggcagacctacgccgtcccggttttggtagaaacgacgagggaccagctagtgaattcccggcactacaagatagattaaagcatctaggcgataggtttagaacaagacttcagttgttactaggtgatctggcgtaccagccagatgtggatctgaggtttttgggcgtcagtatgaatttcaatgatgtgtatcaacctgttgcccgcaggaagcccaagagcaccgctgcgccaactgcgccgagtacgagtgcggacagtgagagggagagggaaagggcggggcttagggataaggggaaggagagggagagggacagacctgagtctagtgcgcggtga

SEQ ID NO: 26750 - protein, 396 aa, Muscodor strobelii
  misc_feature: SGI Peptide ID NO. 569152
  misc_feature (4)..(196): Pfam Id: PF04130 Pfam Desc: Spc97 / Spc98 family
  misc_feature (1)..(367): NCBI GI: 46136789 Blast Desc: FG09910.1 [Gibberella zeae PH-1]
  misc_feature (1)..(352): NCBI GI: 171694351 Blast Desc: protein product [Podospora anserina] gi|170947124|emb|CAP73929.1| protein product [Podospora anserina]
  misc_feature (1)..(362): NCBI GI: 85100446 Blast Desc: NCU04319 [Neurospora crassa OR74A] gi|28922499|gb|EAA31729.1| NCU04319 [Neurospora crassa OR74A] gi|28950179|emb|CAD71047.1| related to GCP3 ( gamma-tubulin
  misc_feature (1)..(396): NCBI GI: 154296299 Blast Desc: BC1G_12976 [Botryotinia fuckeliana B05.10] gi|150843434|gb|EDN18627.1| BC1G_12976 [Botryotinia fuckeliana B05.10]
  misc_feature (1)..(350): NCBI GI: 156055772 Blast Desc: SS1G_05238 [Sclerotinia sclerotiorum 1980] gi|154703022|gb|EDO02761.1| SS1G_05238 [Sclerotinia sclerotiorum 1980]
  misc_feature (1)..(359): NCBI GI: 145613197 Blast Desc: MGG_01815 [Magnaporthe grisea 70-15] gi|145020326|gb|EDK04455.1| MGG_01815 [Magnaporthe grisea 70-15]
  misc_feature (1)..(376): NCBI GI: 212527594 Blast Desc: spindle pole body component (Alp6), [Penicillium marneffei ATCC 18224] gi|210073352|gb|EEA27439.1| spindle pole body component (Alp6), [Penicillium marneffei ATCC 18224]
  misc_feature (1)..(395): NCBI GI: 159127505 Blast Desc: spindle pole body component (Alp6), [Aspergillus fumigatus A1163]
  misc_feature (1)..(395): NCBI GI: 70999536 Blast Desc: spindle pole body component (Alp6) [Aspergillus fumigatus Af293] gi|66852124|gb|EAL92449.1| spindle pole body component (Alp6), [Aspergillus fumigatus Af293]
  misc_feature (1)..(350): NCBI GI: 242784189 Blast Desc: spindle pole body component (Alp6), [Talaromyces stipitatus ATCC 10500] gi|218720484|gb|EED19903.1| spindle pole body component (Alp6), [Talaromyces stipitatus ATCC 10500]
MRRLVHLMTTKFHLFDHLNALKSYILLGQGDFIALLMESLAANLDKPAGAQYRHTLTAQLEHAIRGSNAQYDSPEVLRRLDARMLQLSHGDIGWDCFTLEYKIDAPVDVVVSDWGNRQYLKVFNFLWRIKRVEFALSSTWRKVTTGSRGVLQTNHAVVTETWKTTRGVLAEMVHFVGQLQYYILFEVIESSWTELQSRLKRPDATLDDIIDAHKNYLNSITHKGLLGVRRQRFASSSNSKTEEDTNSYMIQLGELLRTMLSYRDSVDGLYSWSVSDFTQRQEADLRRPGFGRNDEGPASEFPALQDRLKHLGDRFRTRLQLLLGDLAYQPDVDLRFLGVSMNFNDVYQPVARRKPKSTAAPTAPSTSADSERERERAGLRDKGKERERDRPESSAR

SEQ ID NO: 26751 - DNA, 3159 bp, Muscodor strobelii
  misc_feature: SGI EST ID NO. CUFF.63060.0
  misc_feature: Variant of the nucleotide sequence at SEQ ID NO 26749
ccggcgcgtccttggtacttgcatgcgctgggtctgtctggcgcttccaacattaacatctgacttgaggcatgattacacgaccaatcttacagcgaaggaggtgaaaaacatagtcagtcaattaatctagcatcaccccacgcggcagcaagatgcgaccatgtctcgagcggctccggaaaaggccaaacggctcgacgccagcgtcaaccggctcatctcgcagatcatccccgacaacccgtaccaggacgaggacaggaaccagctgagacacgaccagctcttcacgcaggtcactcgccagctcgaggggccccatccgcccccgctcgccgaccagaaccatgcctcggagctcatccgtcgccgcctgacccagtcggaccccgagggcgctctgcgcttcaacaatctctacagcagactgcttgcactgcccatcctcgaccagaaatgggctatgctctacctgctacaccagctgtccgactcgcacgaccccagcatccccgaccccgctgctttcgccgagtttcaacgcgaggtgagggagaaatacggacacggacttgacagtcccgatgatcagacgagtgaggatgattcgtttcggaaaccagtgcccgagtatcgcccgaccgagctgcgcgacgtcttgaaaaagcgcaaaaagaagctctcagacgacgactacagctatgacagcgccaaacggccaatatcgacagagccgttgaaggctaaagctctatacaacgacgatgatcagccgccaccacttaagagggatgtgtctatcaagtccaaattgctagccgacaactatgctgagcttgatccccccgagccggctttactaagagaccttccatacactcttcagggagtgtcctctaccacactgccctttggagatgactattccttaagactacctgcatctcttccgccacccttgattggcttgcttcatactcttgccgagccatcgcttctatgtagaaccctccaagactttgtcaagaccccggccaggggactgttggatcaaagtctccgtgctgctatcagcgatgagcttcggtcatacttgacactcgttgcaacactcgaaggtcagatacggagagcactggcttgcatagacgaggatgcccctcgaagtggtattggtaaggccggggtcagtctcaaacgctgcgtagtctggactcgtgaggcgaccatgggcttacgtcttctaagcctcatcgcagaagagtcgaggacgaaaaaggggggccaaatcatatctctcatacactcattctcgtcatcacacggcgacccaatagtgggcgcgttcgctgagcgactgttaacgcctgtatcaagaccattttacgatatccttcgacattggatctatgatggcgaactgtcagacccatatgaagagttcttcgtgcaattgaaaccccaagacccgactaccaagggcaaatcaggcacaacaaacgtatgggaggagaagtactggatggacgacgacatgatcccctccatcatgacccgtgacttcgccgataaagtgcagctaatcgggaaagcattaaacttcatccgccacagctgcggcgacgcgcaatgggtcgaaaaactactctaaagaatcatccaaggagctacgatacggcgatacaaccacactcggcttatggatcatggacgcatataactacacaatgcgtcggttagtacatctcatgacgaccaaattccacctattcgaccacctcaacgcactcaaaagctacatcctcctaggccaaggcgacttcatagccctactcatggagtcgctcgccgcaaacctcgataagcccgccggggctcaatacagacacactctaaccgcacaactcgagcacgcaatccgcggctcaaacgcacaatacgactcccccgaagtcctgcgccgtctcgacgcccgcatgctccagctatcccacggagacataggatgggactgcttcacactggaatacaaaatcgacgccccggtcgacgtcgtagtctcagactgggggaatagacaatatctcaaagtcttcaacttcctctggcgcatcaaacgcgtcgaattcgccctctcctcaacctggcgaaaagtgacaaccgggtcacgaggcgtactacaaacgaaccacgcagtcgtaacagaaacatggaaaacaacacgcggcgtcttagcagaaatggtgcacttcgtaggccagctacaatactacatcctcttcgaagtcatagaatcctcctggaccgaactgcaatcccgactcaagcgcccagacgcgacgctagacgatataatagacgcgcataaaaactacctcaactccataacgcacaaaggtcttctcggcgtccggcgccaacgcttcgcctcatcatcaaacagtaagacggaggaagacacgaacagctacatgattcaactcggtgaactcctccgcaccatgctctcctaccgcgactcagtcgacggcttatactcctggtccgtatccgacttcacgcagcgccaggaggcagacctacgccgtcccggttttggtagaaacgacgagggaccagctagtgaattcccggcactacaagatagattaaagcatctaggcgataggtttagaacaagacttcagttgttactaggtgatctggcgtaccagccagatgtggatctgaggtttttgggcgtcagtatgaatttcaatgatgtgtatcaacctgttgcccgcaggaagcccaagagcaccgctgcgccaactgcgccgagtacgagtgcggacagtgagagggagagggaaagggcggggcttagggataaggggaaggagagggagagggacagacctgagtctagtgcgcggtgaggagatggggattggtaattgataattggtagatggaggatatcaatgacttaatttttccatggttttggatttgctggttcttgttaactgcttgataagtgcctctggttaacctactgagaatcccgttagcaaatgctattctcggatccagggaaaagatcgcctatctactcatagagcaacgatgagtaggtattgctaatctgtcgaggcacaagatcccgtttcaaac

SEQ ID NO: 26752 - DNA, 1491 bp, Muscodor strobelii
  misc_feature: SGI cDNA ID NO. 569153
  misc_feature: Encodes the peptide sequence at SEQ ID NO 26753
atgtctcgagcggctccggaaaaggccaaacggctcgacgccagcgtcaaccggctcatctcgcagatcatccccgacaacccgtaccaggacgaggacaggaaccagctgagacacgaccagctcttcacgcaggtcactcgccagctcgaggggccccatccgcccccgctcgccgaccagaaccatgcctcggagctcatccgtcgccgcctgacccagtcggaccccgagggcgctctgcgcttcaacaatctctacagcagactgcttgcactgcccatcctcgaccagaaatgggctatgctctacctgctacaccagctgtccgactcgcacgaccccagcatccccgaccccgctgctttcgccgagtttcaacgcgaggtgagggagaaatacggacacggacttgacagtcccgatgatcagacgagtgaggatgattcgtttcggaaaccagtgcccgagtatcgcccgaccgagctgcgcgacgtcttgaaaaagcgcaaaaagaagctctcagacgacgactacagctatgacagcgccaaacggccaatatcgacagagccgttgaaggctaaagctctatacaacgacgatgatcagccgccaccacttaagagggatgtgtctatcaagtccaaattgctagccgacaactatgctgagcttgatccccccgagccggctttactaagagaccttccatacactcttcagggagtgtcctctaccacactgccctttggagatgactattccttaagactacctgcatctcttccgccacccttgattggcttgcttcatactcttgccgagccatcgcttctatgtagaaccctccaagactttgtcaagaccccggccaggggactgttggatcaaagtctccgtgctgctatcagcgatgagcttcggtcatacttgacactcgttgcaacactcgaaggtcagatacggagagcactggcttgcatagacgaggatgcccctcgaagtggtattggtaaggccggggtcagtctcaaacgctgcgtagtctggactcgtgaggcgaccatgggcttacgtcttctaagcctcatcgcagaagagtcgaggacgaaaaaggggggccaaatcatatctctcatacactcattctcgtcatcacacggcgacccaatagtgggcgcgttcgctgagcgactgttaacgcctgtatcaagaccattttacgatatccttcgacattggatctatgatggcgaactgtcagacccatatgaagagttcttcgtgcaattgaaaccccaagacccgactaccaagggcaaatcaggcacaacaaacgtatgggaggagaagtactggatggacgacgacatgatcccctccatcatgacccgtgacttcgccgataaagtgcagctaatcgggaaagcattaaacttcatccgccacagctgcggcgacgcgcaatgggtcgaaaaactactctaa

SEQ ID NO: 26753 - protein, 496 aa, Muscodor strobelii
  misc_feature: SGI Peptide ID NO. 569153
  misc_feature (233)..(494): Pfam Id: PF04130 Pfam Desc: Spc97 / Spc98 family
  misc_feature (11)..(493): NCBI GI: 46136789 Blast Desc: FG09910.1 [Gibberella zeae PH-1]
  misc_feature (10)..(493): NCBI GI: 171694351 Blast Desc: protein product [Podospora anserina] gi|170947124|emb|CAP73929.1| protein product [Podospora anserina]
  misc_feature (1)..(493): NCBI GI: 156055772 Blast Desc: SS1G_05238 [Sclerotinia sclerotiorum 1980] gi|154703022|gb|EDO02761.1| SS1G_05238 [Sclerotinia sclerotiorum 1980]
  misc_feature (8)..(494): NCBI GI: 154296299 Blast Desc: BC1G_12976 [Botryotinia fuckeliana B05.10] gi|150843434|gb|EDN18627.1| BC1G_12976 [Botryotinia fuckeliana B05.10]
  misc_feature (11)..(494): NCBI GI: 261351830 Blast Desc: spindle pole body component alp6 [Verticillium albo-atrum VaMs.102]
  misc_feature (10)..(493): NCBI GI: 169604903 Blast Desc: SNOG_05467 [Phaeosphaeria nodorum SN15] gi|111065411|gb|EAT86531.1| SNOG_05467 [Phaeosphaeria nodorum SN15]
  misc_feature (201)..(494): NCBI GI: 145613197 Blast Desc: MGG_01815 [Magnaporthe grisea 70-15] gi|145020326|gb|EDK04455.1| MGG_01815 [Magnaporthe grisea 70-15]
  misc_feature (62)..(493): NCBI GI: 115396404 Blast Desc: conserved [Aspergillus terreus NIH2624] gi|114193410|gb|EAU35110.1| conserved [Aspergillus terreus NIH2624]
  misc_feature (10)..(493): NCBI GI: 189192645 Blast Desc: spindle pole body component alp6 [Pyrenophora tritici-repentis Pt-1C-BFP] gi|187978225|gb|EDU44851.1| spindle pole body component alp6 [Pyrenophora tritici-repentis Pt-1C-BFP]
  misc_feature (227)..(493): NCBI GI: 85100446 Blast Desc: NCU04319 [Neurospora crassa OR74A] gi|28922499|gb|EAA31729.1| NCU04319 [Neurospora crassa OR74A] gi|28950179|emb|CAD71047.1| related to GCP3 ( gamma-tubulin
MSRAAPEKAKRLDASVNRLISQIIPDNPYQDEDRNQLRHDQLFTQVTRQLEGPHPPPLADQNHASELIRRRLTQSDPEGALRFNNLYSRLLALPILDQKWAMLYLLHQLSDSHDPSIPDPAAFAEFQREVREKYGHGLDSPDDQTSEDDSFRKPVPEYRPTELRDVLKKRKKKLSDDDYSYDSAKRPISTEPLKAKALYNDDDQPPPLKRDVSIKSKLLADNYAELDPPEPALLRDLPYTLQGVSSTTLPFGDDYSLRLPASLPPPLIGLLHTLAEPSLLCRTLQDFVKTPARGLLDQSLRAAISDELRSYLTLVATLEGQIRRALACIDEDAPRSGIGKAGVSLKRCVVWTREATMGLRLLSLIAEESRTKKGGQIISLIHSFSSSHGDPIVGAFAERLLTPVSRPFYDILRHWIYDGELSDPYEEFFVQLKPQDPTTKGKSGTTNVWEEKYWMDDDMIPSIMTRDFADKVQLIGKALNFIRHSCGDAQWVEKLL

SEQ ID NO: 26754 - DNA, 3159 bp, Muscodor strobelii; identical to SEQ ID NO: 26751
  misc_feature: SGI EST ID NO. CUFF.63060.0
  misc_feature: Variant of the nucleotide sequence at SEQ ID NO 26752

SEQ ID NO: 26755 - DNA, 1365 bp, Muscodor strobelii
  misc_feature: SGI cDNA ID NO. 569154
  misc_feature: Encodes the peptide sequence at SEQ ID NO 26756
atgcccgacatagaccccgcggctctcagcagccggccctcgataggcttgacgacacccacgctcaaatccatcaccgtctcgacgcccgcgacgcagaaggtcaccaagaccagccagatcattcccacccgcatcgacctcgaacccctgtatgccaacctgaagtcggccattggcaccgaacaatgggctctctacaccgaatccatcacccaattcatcctgggccgcctgaaccaggtcgaattctccgaacgcgtcgaccccatcctctatactcccaatggcgacaaggtccatctgcacaaccagcttctggctgccatatacgggaacctcactcgggagatgcccgatgcctttcctgcgccctgggtctccgccaacgacaagcctgctgccgctgtcggcgcaaagcctgtcaccggtgacgctgccgagaggaggctcaaggccgatgtcatgcagctacccgctcgcgacaggaggcgtatcaaggacctggctctcaatgatttcgacccccatgatgccatggccgatatgttcatggatcatcaccgtcacaaagctacacgcgctcccgaggtgcctccgagtgcaagtggcttgaacaacatgaacttggatttggaaataagaaagagatatgcgcagcccctcgctgtcgagtcgggcgaattccccgacatagcaagcatcgagtctcgaatgctgcccatggcgtatgaacaaggtctgaccggggggcatgcgcctgacgtggcccaattcatgactgtggccaccgagtcatttaccaaggagtttctcgcgcaggttttcagcaggacgcgaagcaacgggccgggcgactcgggcagcgccgggtttggagccgggaccggatggatccagacacacagatatcgccgtcaactgcggaaggaagagatggctgctagtcgaggggagttgtccagagacaagagtggactcttgccgatcgaggcgaaagcggccagcgaacggccaccgctgaacatggcagacttgcgactggcgctggaaatcggcgattccggcatcagctcgttccccatcgtacgcaagacggtgctacacgcccaccgagagggcgaactggagcactaccataactactcatacttacctggatatgagccgtccaggctcgacgccgaagctgccgctataccgaagaggagggagctgaatggcatcctcacgaatggcaaaagcaacggcatagtgtctgatccgatggacatcgacgaaccggagctggagtgggcgggcgcgggtgagggcgacataggggcgctcgacaacatcctggatggattgttggctatttcctaa

SEQ ID NO: 26756 - protein, 454 aa, Muscodor strobelii
  misc_feature: SGI Peptide ID NO. 569154
  misc_feature (1)..(453): NCBI GI: 85100450 Blast Desc: NCU04320 [Neurospora crassa OR74A] gi|28922500|gb|EAA31730.1| NCU04320 [Neurospora crassa OR74A]
  misc_feature (1)..(453): NCBI GI: 171694349 Blast Desc: protein product [Podospora anserina] gi|170947123|emb|CAP73928.1| protein product [Podospora anserina]
  misc_feature (1)..(453): NCBI GI: 28950180 Blast Desc: related to transcriptional coactivator HFI1 [Neurospora crassa]
  misc_feature (1)..(454): NCBI GI: 46136787 Blast Desc: FG09909.1 [Gibberella zeae PH-1]
  misc_feature (4)..(451): NCBI GI: 39952343 Blast Desc: MGG_01814 [Magnaporthe grisea 70-15] gi|145020327|gb|EDK04456.1| MGG_01814 [Magnaporthe grisea 70-15]
  misc_feature (1)..(453): NCBI GI: 256732082 Blast Desc: [Nectria haematococca mpVI 77-13-4]
  misc_feature (1)..(453): NCBI GI: 156055774 Blast Desc: SS1G_05239 [Sclerotinia sclerotiorum 1980] gi|154703023|gb|EDO02762.1| SS1G_05239 [Sclerotinia sclerotiorum 1980]
  misc_feature (118)..(453): NCBI GI: 154296297 Blast Desc: BC1G_12975 [Botryotinia fuckeliana B05.10] gi|150843433|gb|EDN18626.1| BC1G_12975 [Botryotinia fuckeliana B05.10]
  misc_feature (4)..(454): NCBI GI: 145234444 Blast Desc: An02g14640 [Aspergillus niger] gi|134057539|emb|CAK48893.1| protein product [Aspergillus niger]
  misc_feature (4)..(454): NCBI GI: 115400779 Blast Desc: conserved [Aspergillus terreus NIH2624] gi|114191644|gb|EAU33344.1| conserved [Aspergillus terreus NIH2624]
MPDIDPAALSSRPSIGLTTPTLKSITVSTPATQKVTKTSQIIPTRIDLEPLYANLKSAIGTEQWALYTESITQFILGRLNQVEFSERVDPILYTPNGDKVHLHNQLLAAIYGNLTREMPDAFPAPWVSANDKPAAAVGAKPVTGDAAERRLKADVMQLPARDRRRIKDLALNDFDPHDAMADMFMDHHRHKATRAPEVPPSASGLNNMNLDLEIRKRYAQPLAVESGEFPDIASIESRMLPMAYEQGLTGGHAPDVAQFMTVATESFTKEFLAQVFSRTRSNGPGDSGSAGFGAGTGWIQTHRYRRQLRKEEMAASRGELSRDKSGLLPIEAKAASERPPLNMADLRLALEIGDSGISSFPIVRKTVLHAHREGELEHYHNYSYLPGYEPSRLDAEAAAIPKRRELNGILTNGKSNGIVSDPMDIDEPELEWAGAGEGDIGALDNILDGLLAIS

SEQ ID NO: 26757 - DNA, 2283 bp, Muscodor strobelii
  misc_feature: SGI EST ID NO. CUFF.63160.0
  misc_feature: Variant of the nucleotide sequence at SEQ ID NO 26755
acggggcacggtaacactctgggggtggattgcatatgtgctgggcggcctgggttacaacgatggagccccactgcctcgggcccccgtcgcgtcgtgtccgacgcctgacggttcccagctcccactacagacgacattccatccctcccgcataccgaccgccaaatcaccgccgcttctccatccaatatccggccaccacgacccctttccatctatctgagcccggcagactggtcgcatgagctagcacagccagatccatgggcgttgatcccggtctcgtcgctgcgctgtgtcggtagctgcacgcgacatctgcctctaccgcctctggtaaccgcctccccagcctcgcgccgagcatcgcgacaccctctttcaccacccgatcgggccaccacccaccccccaccatcgcaaaatgcccgacatagaccccgcggctctcagcagccggccctcgataggcttgacgacacccacgctcaaatccatcaccgtctcgacgcccgcgacgcagaaggtcaccaagaccagccagatcattcccacccgcatcgacctcgaacccctgtatgccaacctgaagtcggccattggcaccgaacaatgggctctctacaccgaatccatcacccaattcatcctgggccgcctgaaccaggtcgaattctccgaacgcgtcgaccccatcctctatactcccaatggcgacaaggtccatctgcacaaccagcttctggctgccatatacgggaacctcactcgggagatgcccgatgcctttcctgcgccctgggtctccgccaacgacaagcctgctgccgctgtcggcgcaaagcctgtcaccggtgacgctgccgagaggaggctcaaggccgatgtcatgcagctacccgctcgcgacaggaggcgtatcaaggacctggctctcaatgatgtgcgcatgcgctctgtacacctgatacagcccggagtatcgctaactctgaccgcatagttcgacccccatgatgccatggccgatatgttcatggatcatcaccgtcacaaagctacacgcgctcccgaggtgcctccgagtgcaagtggcttgaacaacatgaacttggatttggaaataagaaagagatatgcgcagcccctcgctgtcgagtcgggcgaattccccgacatagcaagcatcgagtctcgaatgctgcccatggcgtatgaacaaggtctgaccggggggcatgcgcctgacgtggcccaattcatgactgtggccaccgagtcatttaccaaggagtttctcgcgcaggttttcagcaggacgcgaagcaacgggccgggcgactcgggcagcgccgggtttggagccgggaccggatggatccagacacacagatatcgccgtcaactgcggaaggaagagatggctgctagtcgaggggagttgtccagagacaagagtggactcttgccgatcgaggcgaaagcggccagcgaacggccaccgctgaacatggcagacttgcgactggcgctggaaatcggcgattccggcatcagctcgttccccatcgtacgcaagacggtgctacacgcccaccgagagggcgaactggagcactaccataactactcatacttacctggatatgagccgtccaggctcgacgccgaagctgccgctataccgaagaggagggagctgaatggcatcctcacgaatggcaaaagcaacggcatagtgtctgatccgatggacatcgacgaaccggagctggagtgggcgggcgcgggtgagggcgacataggggcgctcgacaacatcctggatggattgttggctatttcctaacttataccagactataggggagtgcattcagcatcgggacggcgttacaaagggcttgtttcggcattggcattttattggaaagatcaaaagaggtgttcggcgtgctgtccatttggaatggagggggcttgcctgtacttgacgtccacgataccccatctgttcaatcattcaagaagatcgattctctgcatatctattatacaaggtgtgaagatgactgacgtgacgaagccaaaagtcagacaagatgaagtcgctcagaacagacaggtgactgacgatacaatgaggatggatggattaattatgatgtacatgacatgagattttaatgttggtttatagatttctgatacagcgaatctgcattgtagtctatgatggaggaattggaacggcagacgcgataccatccttccgtcgtg

SEQ ID NO: 26758 - DNA, 4122 bp, Muscodor strobelii
  misc_feature: SGI cDNA ID NO. 569155
  misc_feature: Encodes the peptide sequence at SEQ ID NO 26759
atggcttcgacacgtgcatcctcgccgggcgagaacgcgtccacgccttcctcaccacaattgagtccacagtctaagatcaaggcactgttggccgctgtagatgcctcggacgagtcagaaggagaagatgctggccccatagacgcaaagaagctgtttgcctcgatcgacaaaaagagacaagctatggcgtcgacaggagctgcccacgataacgatacggaggacgacgacgatgaagacgaagttgtccggccacggggccgacttgctgccagaatgcaagccgagacagccacatatgcctccaaatcagtaccaaacccatccagcagttccaaccacgatctttcgtctgcagaagaagacgaagacgttgctctgccgcgaaggagactagcgagaccagcgcgacaagtaacaccggagccaaacacacaagaagaagaccagccttcttcgcctgaaggactattcgtcactccctccaaatcggtggtctcgaacgacgacgcagcccccgaatcagatcaagatgatctccccatggacctgagcaagaactcccgcttccaggctctcgtcgccaagaagcgtaaggaaagagaggagagagaggcagaagaagaacgcaagcgggaagagcgagctcaacgcttggcggagcagatgcccacaaactctgataccgacgatgtatccgacatttctgacgatgagggtggtcgcaagctcacacaagatgtctcgcgacctactcgcaaagctagcaagaaggctcttgaggagatgcaccgcgagacgcaacgtatcagtcgagggcttcagttagctcatgaggcaaaaacaaaaaagaagatcagcaaggcctcccttttcgaacgtttcaatttccgagcgcaaggagctgctgcgacgactgctgagagccagggcaaattgtcaagttcgagtcggcccacgactcctgggtccgcttaccatacagatgtagaaatgggagatgctgccactccgcccagctccccaccaagcgcgtcgaaagacaagtcagcagcccccgcgacgaatttgcatgtgcccagcaccgaaagcaaccctgccatatttgaagaaaacgaaaataccgaactccctagccttgaagatgtctcagcttcgtggcagcttgataaaggaaaaggcaaagagatcgccaccgagatcaacccctctatcccggaatcaaagggtttgctagccgtaaaaccgaaacgtcaagtcagagtcaagctccccactacaggcattaacacgatcacgatagactctgacgacgagctcgagattacccagacaaaaaagggcagacttgacgccatttttgaccgcgtgcctgagaagacggttcaagagtcaacgggaatgaagatcttacgcaacctcgctcatctacgctctcctggcaaggaatcaacacgtggaaggaatgttaagccatcgatcagtgctggcgagctccacatgtctctccagcagcgtgctaaagcgcaggccaagttagagcgcgacagacgactcgaggctttgcgcgccaaaggcattgtcgttcagtctgccgaagaacgggagcgtgagcgagagcaagtagaggacattgttgctcgcgcccgtcaggaagttgaggaaatcatgcaacgagaacgcgaagatgccaagaaagcccgcaaggagaggaaggaaagtggcgaggacgatcctcttgcttgggacgacagtgatgatgacagctacgaggggggcgaagaagagcaggagcctgaagaagtcgagctttccggttctgaagaggaagatggcgaagaacctgaagacgaaaacgagtcggatggtagttccggggacgaagatacagcaaaagattcgatgttcctggacaaggccgaagaaggtcaatctggcgaggagtcatccgaagaggaggaggatggcttttcagcagcagacttcgaatctatgaagcgtctcaacgcaacaaactcgcgtcgacaaaagaagcgcgtccaggttatttcagacgatgaggatgaggatactggtgaaaatattgaagctacacctaggccgaagaatccttttgccaaatctcccgcggctcctaacactacttctcctcaagttccaacctccgtcttgcgctcagcaaccaaaaatttcattcccggccttcccattgcaaatgcagcacccgctggattaggcctcactcagatgtttgctggcacaatggatgacagccaggctgcatcagctaatggctcgccagaagagttcatgcctagttttgatcagtttcccgattctcaattttccgcgcaagctagtcagtctcagaatgctctaattggtgatagccagccagttgacggagcagattcgcaaggattcgacagccagacgcagcccctaaaactacattactcacaatctcaagcacatggcttcgacagtctcctccagcgcgatgcatcacaaatgtcacaactgtcagagttcatggaagccacacaagacggtggattccaggagtacacacctctcaagcagcgctttattgacccaccgcaatcgactgttgatacgctgctacttaccggcactcctgatgatgaaatcattcaggaatctcctttagtgaggaagaagggcaaactgctacggaggaatgagcgtgatgtctcaatttctgctttaccacctaccgaaatcccaggaagcccgagtcttgtcccggccaacacggctgacggcgctgtttcctccgccgacgcattcgggttgatggagaaggcagccaggcgggagagacgcttgaagaagagattcgacaagaagaagagcaaagccactgaaatgatcgaagagcaggccgaagaatctgaagacgagtacgccggcctcggtggtgctgatggggaagattccagtgacgaggatgacgagttgtataagcagatgattgacgacactggaaagaatgatggagatgaagcgaagatggctggtgtcttcgctgaacaagaacgtgcagcagatgcggcgcaagtcgataagttgtttcgtgatatcaccacggggatgcttcgaaagcgccgccgaggaggagacggtaacgatttcgatctctccgactcagacgacggaggcgaggcacgccgcagaatgaagagacgtcaatttgcgaagatgcagaaagcattgtttgcagatgagagaatcggaaagattgcggagaatccacggaacgctgcgttcctcaagagtatcgaggacagaaacagcgacgatgagtgggagttcggagacaactttgctgctgataccacgtctacgagtggcgatgacagtcaaagccaaagccaaagccaagcagaccaagcgattcctgactcccagcctccggctggagggcgcaagagatctcgtatggatgaccacgcccgcccagactctaaggcacgacgcactcaggaaggcgctcgtcctgccagtctggcagatgtcaggagatcgctttcgagcttactagaagaaccgaatggatccattgggtctgtcatacccgccacgaaccccgaatcagatgatgaagaacggccttcgacggcgaattcgaataaagagaatcgtcacccgcggcgaagcacaggcgtcgtggacagaattgcgctgaagcgtaactcatcgaattcatctacctccagcacggggtcaggccgtctggcatttgcggccccgagcgcaagcgggagtggcttcaaagtcccggtgttgctgagaagggctactacgaattctctcatgtcgcagggatcgcagagtcagcctacgtccgtcaccgggtctacgacggttaggcctagtggcgggagcttgaataaagcgggtagttttggagatgatgggaagttgaagaagaatgcgggcaagaggtcgggtattagtgggtttgcgcatgagaatgaacgacgcgcgaaggttgccgagagtgagaggaggagggaggagaggaagtggaagggtgctgagggacggggcaaagtggttggtggtttgtttggaggtgggagatttgagtaa

SEQ ID NO: 26759 - protein, 1373 aa, Muscodor strobelii
  misc_feature: SGI Peptide ID NO. 569155
  misc_feature (958)..(1102): Pfam Id: PF09444 Pfam Desc: MRC1-like domain
  misc_feature (1)..(1373): NCBI GI: 261351893 Blast Desc: conserved [Verticillium albo-atrum VaMs.102]
  misc_feature (68)..(1373): NCBI GI: 116197739 Blast Desc: CHGG_07025 [Chaetomium globosum CBS 148.51] gi|88178304|gb|EAQ85772.1| CHGG_07025 [Chaetomium globosum CBS 148.51]
  misc_feature (4)..(1359): NCBI GI: 46136847 Blast Desc: FG09939.1 [Gibberella zeae PH-1]
  misc_feature (1)..(1373): NCBI GI: 39952341 Blast Desc: MGG_01813 [Magnaporthe grisea 70-15] gi|145020328|gb|EDK04457.1| MGG_01813 [Magnaporthe grisea 70-15]
  misc_feature (72)..(1373): NCBI GI: 171694347 Blast Desc: protein product [Podospora anserina] gi|170947122|emb|CAP73927.1| protein product [Podospora anserina]
  misc_feature (1)..(1373): NCBI GI: 154294792 Blast Desc: BC1G_13611 [Botryotinia fuckeliana B05.10] gi|150844569|gb|EDN19762.1| BC1G_13611 [Botryotinia fuckeliana B05.10]
  misc_feature (1)..(1373): NCBI GI: 156055256 Blast Desc: SS1G_04979 [Sclerotinia sclerotiorum 1980] gi|154702764|gb|EDO02503.1| SS1G_04979 [Sclerotinia sclerotiorum 1980]
  misc_feature (670)..(1367): NCBI GI: 256732097 Blast Desc: NECHADRAFT_104452 [Nectria haematococca mpVI 77-13-4]
  misc_feature (81)..(878): NCBI GI: 85100454 Blast Desc: NCU04321 [Neurospora crassa OR74A] gi|28922501|gb|EAA31731.1| [Neurospora crassa OR74A] gi|28950181|emb|CAD71049.1| conserved [Neurospora crassa]
  misc_feature (1)..(1274): NCBI GI: 121710812 Blast Desc: conserved [Aspergillus clavatus NRRL 1] gi|119401172|gb|EAW11596.1| conserved [Aspergillus clavatus NRRL 1]
MASTRASSPGENASTPSSPQLSPQSKIKALLAAVDASDESEGEDAGPIDAKKLFASIDKKRQAMASTGAAHDNDTEDDDDEDEVVRPRGRLAARMQAETATYASKSVPNPSSSSNHDLSSAEEDEDVALPRRRLARPARQVTPEPNTQEEDQPSSPEGLFVTPSKSVVSNDDAAPESDQDDLPMDLSKNSRFQALVAKKRKEREEREAEEERKREERAQRLAEQMPTNSDTDDVSDISDDEGGRKLTQDVSRPTRKASKKALEEMHRETQRISRGLQLAHEAKTKKKISKASLFERFNFRAQGAAATTAESQGKLSSSSRPTTPGSAYHTDVEMGDAATPPSSPPSASKDKSAAPATNLHVPSTESNPAIFEENENTELPSLEDVSASWQLDKGKGKEIATEINPSIPESKGLLAVKPKRQVRVKLPTTGINTITIDSDDELEITQTKKGRLDAIFDRVPEKTVQESTGMKILRNLAHLRSPGKESTRGRNVKPSISAGELHMSLQQRAKAQAKLERDRRLEALRAKGIVVQSAEEREREREQVEDIVARARQEVEEIMQREREDAKKARKERKESGEDDPLAWDDSDDDSYEGGEEEQEPEEVELSGSEEEDGEEPEDENESDGSSGDEDTAKDSMFLDKAEEGQSGEESSEEEEDGFSAADFESMKRLNATNSRRQKKRVQVISDDEDEDTGENIEATPRPKNPFAKSPAAPNTTSPQVPTSVLRSATKNFIPGLPIANAAPAGLGLTQMFAGTMDDSQAASANGSPEEFMPSFDQFPDSQFSAQASQSQNALIGDSQPVDGADSQGFDSQTQPLKLHYSQSQAHGFDSLLQRDASQMSQLSEFMEATQDGGFQEYTPLKQRFIDPPQSTVDTLLLTGTPDDEIIQESPLVRKKGKLLRRNERDVSISALPPTEIPGSPSLVPANTADGAVSSADAFGLMEKAARRERRLKKRFDKKKSKATEMIEEQAEESEDEYAGLGGADGEDSSDEDDELYKQMIDDTGKNDGDEAKMAGVFAEQERAADAAQVDKLFRDITTGMLRKRRRGGDGNDFDLSDSDDGGEARRRMKRRQFAKMQKALFADERIGKIAENPRNAAFLKSIEDRNSDDEWEFGDNFAADTTSTSGDDSQSQSQSQADQAIPDSQPPAGGRKRSRMDDHARPDSKARRTQEGARPASLADVRRSLSSLLEEPNGSIGSVIPATNPESDDEERPSTANSNKENRHPRRSTGVVDRIALKRNSSNSSTSSTGSGRLAFAAPSASGSGFKVPVLLRRATTNSLMSQGSQSQPTSVTGSTTVRPSGGSLNKAGSFGDDGKLKKNAGKRSGISGFAHENERRAKVAESERRREERKWKGAEGRGKVVGGLFGGGRFE

SEQ ID NO: 26760 - DNA, 4180 bp, Muscodor strobelii
  misc_feature: SGI EST ID NO. CUFF.63075.0
  misc_feature: Variant of the nucleotide sequence at SEQ ID NO 26758
gatgctggccccatagacgcaaagaagctgtttgcctcgatcgacaaaaagagacaagctatggcgtcgacaggagctgcccacgataacgatacggaggacgacgacgatgaagacgaagttgtccggccacggggccgacttgctgccagaatgcaagccgagacagccacatatgcctccaaatcagtaccaaacccatccagcagttccaaccacgatctttcgtctgcagaagaagacgaagacgttgctctgccgcgaaggagactagcgagaccagcgcgacaagtaacaccggagccaaacacacaagaagaagaccagccttcttcgcctgaaggactattcgtcactccctccaaatcggtggtctcgaacgacgacgcagcccccgaatcagatcaagatgatctccccatggacctgagcaagaactcccgcttccaggctctcgtcgccaagaagcgtaaggaaagagaggagagagaggcagaagaagaacgcaagcgggaagagcgagctcaacgcttggcggagcagatgcccacaaactctgataccgacgatgtatccgacatttctgacgatgagggtggtcgcaagctcacacaagatgtctcgcgacctactcgcaaagctagcaagaaggctcttgaggagatgcaccgcgagacgcaacgtatcagtcgagggcttcagttagctcatgaggcaaaaacaaaaaagaagatcagcaaggcctcccttttcgaacgtttcaatttccgagcgcaaggagctgctgcgacgactgctgagagccagggcaaattgtcaagttcgagtcggcccacgactcctgggtccgcttaccatacagatgtagaaatgggagatgctgccactccgcccagctccccaccaagcgcgtcgaaagacaagtcagcagcccccgcgacgaatttgcatgtgcccagcaccgaaagcaaccctgccatatttgaagaaaacgaaaataccgaactccctagccttgaagatgtctcagcttcgtggcagcttgataaaggaaaaggcaaagagatcgccaccgagatcaacccctctatcccggaatcaaagggtttgctagccgtaaaaccgaaacgtcaagtcagagtcaagctccccactacaggcattaacacgatcacgatagactctgacgacgagctcgagattacccagacaaaaaagggcagacttgacgccatttttgaccgcgtgcctgagaagacggttcaagagtcaacgggaatgaagatcttacgcaacctcgctcatctacgctctcctggcaaggaatcaacacgtggaaggaatgttaagccatcgatcagtgctggcgagctccacatgtctctccagcagcgtgctaaagcgcaggccaagttagagcgcgacagacgactcgaggctttgcgcgccaaaggcattgtcgttcagtctgccgaagaacgggagcgtgagcgagagcaagtagaggacattgttgctcgcgcccgtcaggaagttgaggaaatcatgcaacgagaacgcgaagatgccaagaaagcccgcaaggagaggaaggaaagtggcgaggacgatcctcttgcttgggacgacagtgatgatgacagctacgaggggggcgaagaagagcaggagcctgaagaagtcgagctttccggttctgaagaggaagatggcgaagaacctgaagacgaaaacgagtcggatggtagttccggggacgaagatacagcaaaagattcgatgttcctggacaaggccgaagaaggtcaatctggcgaggagtcatccgaagaggaggaggatggcttttcagcagcagacttcgaatctatgaagcgtctcaacgcaacaaactcgcgtcgacaaaagaagcgcgtccaggttatttcagacgatgaggatgaggatactggtgaaaatattgaagctacacctaggccgaagaatccttttgccaaatctcccgcggctcctaacactacttctcctcaagttccaacctccgtcttgcgctcagcaaccaaaaatttcattcccggccttcccattgcaaatgcagcacccgctggattaggcctcactcagatgtttgctggcacaatggatgacagccaggctgcatcagctaatggctcgccagaagagttcatgcctagttttgatcagtttcccgattctcaattttccgcgcaagctagtcagtctcagaatgctctaattggtgatagccagccagttgacggagcagattcgcaaggattcgacagccagacgcagcccctaaaactacattactcacaatctcaagcacatggcttcgacagtctcctccagcgcgatgcatcacaaatgtcacaactgtcagagttcatggaagccacacaagacggtggattccaggagtacacacctctcaagcagcgctttattgacccaccgcaatcgactgttgatacgctgctacttaccggcactcctgatgatgaaatcattcaggaatctcctttagtgaggaagaagggcaaactgctacggaggaatgagcgtgatgtctcaatttctgctttaccacctaccgaaatcccaggaagcccgagtcttgtcccggccaacacggctgacggcgctgtttcctccgccgacgcattcgggttgatggagaaggcagccaggcgggagagacgcttgaagaagagattcgacaagaagaagagcaaagccactgaaatgatcgaagagcaggccgaagaatctgaagacgagtacgccggcctcggtggtgctgatggggaagattccagtgacgaggatgacgagttgtataagcagatgattgacgacactggaaagaatgatggagatgaagcgaagatggctggtgtcttcgctgaacaagaacgtgcagcagatgcggcgcaagtcgataagttgtttcgtgatatcaccacggggatgcttcgaaagcgccgccgaggaggagacggtaacgatttcgatctctccgactcagacgacggaggcgaggcacgccgcagaatgaagagacgtcaatttgcgaagatgcagaaagcattgtttgcagatgagagaatcggaaagattgcggagaatccacggaacgctgcgttcctcaagagtatcgaggacagaaacagcgacgatgagtgggagttcggagacaactttgctgctgataccacgtctacgagtggcgatgacagtcaaagccaaagccaaagccaagcagaccaagcgattcctgactcccagcctccggctggagggcgcaagagatctcgtatggatgaccacgcccgcccagactctaaggcacgacgcactcaggaaggcgctcgtcctgccagtctggcagatgtcaggagatcgctttcgagcttactagaagaaccgaatggatccattgggtctgtcatacccgccacgaaccccgaatcagatgatgaagaacggccttcgacggcgaattcgaataaagagaatcgtcacccgcggcgaagcacaggcgtcgtggacagaattgcgctgaagcgtaactcatcgaattcatctacctccagcacggggtcaggccgtctggcatttgcggccccgagcgcaagcgggagtggcttcaaagtcccggtgttgctgagaagggctactacgaattctctcatgtcgcagggatcgcagagtcagcctacgtccgtcaccgggtctacgacggttaggcctagtggcgggagcttgaataaagcgggtagttttggagatgatgggaagttgaagaagaatgcgggcaagaggtcgggtattagtgggtttgcgcatgagaatgaacgacgcgcgaaggttgccgagagtgagaggaggagggaggagaggaagtggaagggtgctgagggacggggcaaagtggttggtggtttgtttggaggtgggagatttgagtaagagggatgctggaataggatggatttgttgatatttggactggtgttgaggcgaaagctttgagagtgggttctctggcatgggatgcattggcgtgtatggcgttttgatgtttggtgtcttgaaggtattacatacagacgtttgttgatcaatgagaatcaatgagaatacacttctctccaac

SEQ ID NO: 26761 - DNA, 1272 bp, Muscodor strobelii
  misc_feature: SGI cDNA ID NO. 569156
  misc_feature: Encodes the peptide sequence at SEQ ID NO 26762
atggcgcctccgccagccaccccagcaccccaccgcttcctagttccgaagcgctctcagcctagaacagaaacacctaagcccaagcccaacacctttcactccagtggcagtggtcagcaattccaggccacgccgcggttctcgctgcattctacgccacgcgcttcgtcttctagtacaccgggtccttctgcgttccggaatcgggctgtggagcaagtggatatcgttgatagttcgccgcctgaggactcgcttgaggatcgtgattttggggatggtgacgaagtgattggtgagcgatttaggaggtttgagataccggcacctcggataaagagtgagggtgaagttgttgatggatcttcgcctcttgggagacatgagaaaagtgatggacacgggcatgagagggaagtgaaacggagacggatttctttgtctccattcgatgataggtcgattcactccgatgataacgaaccactcgaagaaacggatacgataacgcaagaccgggattcacgtcatgctttagctatcgaatcctcgtttcctatcccagacgaagtatcagactccggcccactcaacgacaatatcaagataaagtcctccccttcctcccccttctccccccacaaagaacaaaaccatacacctcagaaacaacacccagctccaaccacaaaaacagcacaaccgcgattccacaaagcccctcgcttcaaacttcccgaggtaccagaaggaccggctccggaaccattaccagatgtcttctcgcccaggcgcaagggcgcgaagtatgttcctggtggtctggcggcggagctgagggattggctggttgatgttgaggcgggtactaatagtgcttcggtctcgaacttgacacccagactacccggggagaagggagggaaggaggagtggacggcgaggattagggtcttggattttagaggcggggttagaggtacgcttgttgttggacgggtcgtacgggattggaggggagatggggagattggggatgaggaggttggggatggcggtgacggggagggagagcgtgtgggagagggagagaggttaggcgctgagatgagagttttactcgctggtcatgggaaggtgagtgggatccaggctccgagtcgagtgaggatggggtcgttggttggtgtcaagagaccgatgtgggaggttagcttgagtggactgggacgttggggcgttgtggttaattgggcggttttgggttga

SEQ ID NO: 26762 - protein, 423 aa, Muscodor strobelii
  misc_feature: SGI Peptide ID NO. 569156
  misc_feature (3)..(419): NCBI GI: 154294820 Blast Desc: BC1G_13625 [Botryotinia fuckeliana B05.10] gi|150844583|gb|EDN19776.1| BC1G_13625 [Botryotinia fuckeliana B05.10]
  misc_feature (41)..(409): NCBI GI: 116197769 Blast Desc: CHGG_07040 [Chaetomium globosum CBS 148.51] gi|88178319|gb|EAQ85787.1| CHGG_07040 [Chaetomium globosum CBS 148.51]
  misc_feature (7)..(409): NCBI GI: 46136853 Blast Desc: FG09942.1 [Gibberella zeae PH-1]
  misc_feature (142)..(421): NCBI GI: 145612559 Blast Desc: MGG_07208 [Magnaporthe grisea 70-15] gi|145019700|gb|EDK03928.1| MGG_07208 [Magnaporthe grisea 70-15]
  misc_feature (7)..(422): NCBI GI: 171693785 Blast Desc: protein product [Podospora anserina] gi|170946841|emb|CAP73645.1| protein product [Podospora anserina]
  misc_feature (260)..(422): NCBI GI: 169597249 Blast Desc: SNOG_20014 [Phaeosphaeria nodorum SN15] gi|160707478|gb|EDP89932.1| SNOG_20014 [Phaeosphaeria nodorum SN15]
  misc_feature (258)..(422): NCBI GI: 85101087 Blast Desc: NCU04299 [Neurospora crassa OR74A] gi|28922627|gb|EAA31853.1| [Neurospora crassa OR74A] gi|28950160|emb|CAD71028.1| [Neurospora crassa]
  misc_feature (242)..(422): NCBI GI: 189190734 Blast Desc: [Pyrenophora tritici-repentis Pt-1C-BFP] gi|187973312|gb|EDU40811.1| [Pyrenophora tritici-repentis Pt-1C-BFP]
  misc_feature (228)..(274): NCBI GI: 261351892 Blast Desc: [Verticillium albo-atrum VaMs.102]
MAPPPATPAPHRFLVPKRSQPRTETPKPKPNTFHSSGSGQQFQATPRFSLHSTPRASSSSTPGPSAFRNRAVEQVDIVDSSPPEDSLEDRDFGDGDEVIGERFRRFEIPAPRIKSEGEVVDGSSPLGRHEKSDGHGHEREVKRRRISLSPFDDRSIHSDDNEPLEETDTITQDRDSRHALAIESSFPIPDEVSDSGPLNDNIKIKSSPSSPFSPHKEQNHTPQKQHPAPTTKTAQPRFHKAPRFKLPEVPEGPAPEPLPDVFSPRRKGAKYVPGGLAAELRDWLVDVEAGTNSASVSNLTPRLPGEKGGKEEWTARIRVLDFRGGVRGTLVVGRVVRDWRGDGEIGDEEVGDGGDGEGERVGEGERLGAEMRVLLAGHGKVSGIQAPSRVRMGSLVGVKRPMWEVSLSGLGRWGVVVNWAVLG

SEQ ID NO: 26763 - DNA, 1872 bp, Muscodor strobelii
  misc_feature: SGI EST ID NO. CUFF.63078.0
  misc_feature: Variant of the nucleotide sequence at SEQ ID NO 26761
gtttagtgggtcaaggccactaaatccatcaaagcataccgttttactgaggacagaacgacaaacgtcatcattgaacatctttcttttcgggagtcagttcccgcgatagatatctcaatgcatctgagacaccagcataaataaacatgacgagccatggatcatgagagaccatcatcctgcccgagatagatgcccgtcgatgacgacattccacccgtcaaaacatccacagcagtctcgcgatgttctgtgagaatggcgcctccgccagccaccccagcaccccaccgcttcctagttccgaagcgctctcagcctagaacagaaacacctaagcccaagcccaacacctttcactccagtggcagtggtcagcaattccaggccacgccgcggttctcgctgcattctacgccacgcgcttcgtcttctagtacaccgggtccttctgcgttccggaatcgggctgtggagcaagtggatatcgttgatagttcgccgcctgaggactcgcttgaggatcgtgattttggggatggtgacgaagtgattggtgagcgatttaggaggtttgagataccggcacctcggataaagagtgagggtgaagttgttgatggatcttcgcctcttgggagacatgagaaaagtgatggacacgggcatgagagggaagtgaaacggagacggatttctttgtctccattcgatgataggtcgattcactccgatgataacgaaccactcgaagaaacggatacgataacgcaagaccgggattcacgtcatgctttagctatcgaatcctcgtttcctatcccagacgaagtatcagactccggcccactcaacgacaatatcaagataaagtcctccccttcctcccccttctccccccacaaagaacaaaaccatacacctcagaaacaacacccagctccaaccacaaaaacagcacaaccgcgattccacaaagcccctcgcttcaaacttcccgaggtaccagaaggaccggctccggaaccattaccagatgtcttctcgcccaggcgcaagggcgcgaagtatgttcctggtggtctggcggcggagctgagggattggctggttgatgttgaggcgggtactaatagtgcttcggtctcgaacttgacacccagactacccggggagaagggagggaaggaggagtggacggcgaggattagggtcttggattttagaggcggggttagaggtacgcttgttgttggacgggtcgtacgggattggaggggagatggggagattggggatgaggaggttggggatggcggtgacggggagggagagcgtgtgggagagggagagaggttaggcgctgagatgagagttttactcgctggtcatgggaaggtgagtgggatccaggctccgagtcgagtgaggatggggtcgttggttggtgtcaagagaccgatgtgggaggttagcttgagtggactgggacgttggggcgttgtggttaattgggcggttttgggttgatcgggtggcatagaggatgatgcgtgagtttgatatgatttgagtgttatttgatgttatgattgcttatgtatacgagttgctatgggctattggccgtgttgttgagaatttttgttatttgtgcaatgtgtttttgcacaatgtagtttatctaggtaacgacaagcttctgtactgcacatcacagcagagagaaagattttcgtagctggagactcggcggaagattgataaggtcgtcaagtcgagatcactagattcgttgatcaagcagaccgggtcacagagcgagatattttttctgacaagcaggaataaagttgagcgttgtttttc

SEQ ID NO: 26764 - DNA, 1770 bp, Muscodor strobelii
  misc_feature: SGI cDNA ID NO. 569157
  misc_feature: Elevated expression when VOC is produced
  misc_feature: Encodes the peptide sequence at SEQ ID NO 26765
atgctcgacttgacgagacaccaagcactccagacaaattcaaaattgagcgcacgccttgatcaagtgaacataacgcaagaagacgcttctttctatggcgctcgtatcgaaataggaacacctggtcaagcggtcaccgtccaaattgattttacaagcaaatgggatggcaacgatgtcttcgtcccagccacgaactccacgatgtgccagaacacttccaccatttacggcggatgctggctaggatcatttaatagcaatatctcgcaaacgttcacacaacttccgggcggctacgtgaaaccagccgagacttgctcagatgtgattaattttggtggtatcaacgttacagatgtggttatcgtgcaagcttacagcctctcttccgatgacctgcggtccattgttactcctagcttaagtcttcttgatgcacccggagacaatcctattccgagcgtattgtaccaacttgttgatcaaggacacctcactactgtcgcattcagcatctggctcggagatactgggaaatccgatgggcaattgctcctgggtgcagttgacgaagcgaggttcaaccaacctctcatcagcctcgaagcgtatggagagaccccggcgaccggcacactggaaaacaatcgatggaacaattccttacgactattgatgacttcaatgtctgctaatagctcgacaggagatgacactttagaccttatcgatctaatcccaatccaaatgaatcttcgaacatcaataattctaccccaagcactcgcattacaggcatggaatatcgcgggagtatcccagcatgtggactcaaacggtgggaatagttcgatgggagtcattccttgttcgaagaaggacagtgaaggtgtttttacctttggattaggaggaccccaaggtgtctctatcgaagttcacatgcaacagatggtgttcaagccaagtctcatgaaccaagatgcggttaacaaactaggggatgacttgtgcattttctctattggctttgatgcgaatccgctttcttggcaactcggtgtgccactctggagttcaatctacgccgtagttgacttgaacaacgcgaaagtggcaatagcacctatcaaccacgacagcccaataggcgaatcaaatatcgtctcgttcagaggtcaaggtgccccgattccgtccgcgacacaggctccaagtcaacctgtctcgccaacaacgtcgttgaaatacgcattcacgaagggtgtctactccaccgacgcatcattcaacgcacagcaagggtttagcatattaaccactactacgtcgagatcgtcgccgacggatgaacctacgacttcttcacacggtgggctctcgaagggaggtaagatcggagtcggcatcggagtagccgtcggtgtgctgttagctgttggaatcggtggcttctgctggggacagaagagagggaagaaagcagaagcaaaacgagtgtcgagtcaggcaattcaggaagaattgagaaacgagaaacctgaattggatggaagtgcaatgggctctccaactgtgcatattccacaggagacgttctttgaggtagatgctgaagtcccgaggagggagctttcacatttgagtgagatcttcgagctaccaggtgggcaaccgactcctacattatcacaggagctcccaggcaatgaaagagacgagtccggaaacgagagaccagttgaacaagaagtgcagcattga

SEQ ID NO: 26765 - protein, 589 aa, Muscodor strobelii
  misc_feature: SGI Peptide ID NO. 569157
  misc_feature (32)..(379): Pfam Id: PF00026 Pfam Desc: Eukaryotic aspartyl protease
  misc_feature (33)..(439): NCBI GI: 85117939 Blast Desc: NCU02956 [Neurospora crassa OR74A] gi|28927151|gb|EAA36107.1| conserved [Neurospora crassa OR74A] gi|38566948|emb|CAE76250.1| related to acid proteinase PEPI
  misc_feature (15)..(437): NCBI GI: 171695874 Blast Desc: protein product [Podospora anserina] gi|170948179|emb|CAP60343.1| protein product [Podospora anserina]
  misc_feature (3)..(439): NCBI GI: 116181454 Blast Desc: CHGG_01355 [Chaetomium globosum CBS 148.51] gi|88185652|gb|EAQ93120.1| CHGG_01355 [Chaetomium globosum CBS 148.51]
  misc_feature (33)..(438): NCBI GI: 256730864 Blast Desc: NECHADRAFT_98619 [Nectria haematococca mpVI 77-13-4]
  misc_feature (15)..(438): NCBI GI: 154312485 Blast Desc: BC1G_05845 [Botryotinia fuckeliana B05.10] gi|114149216|gb|AAR87746.3| aspartic proteinase precursor [Botryotinia fuckeliana] gi|150849946|gb|EDN25139.1| BC1G_05845
  misc_feature (6)..(409): NCBI GI: 46109016 Blast Desc: FG01390.1 [Gibberella zeae PH-1]
  misc_feature (184)..(438): NCBI GI: 145613524 Blast Desc: MGG_01565 [Magnaporthe grisea 70-15] gi|145020591|gb|EDK04720.1| MGG_01565 [Magnaporthe grisea 70-15]
  misc_feature (6)..(409): NCBI GI: 156035531 Blast Desc: SS1G_12969 [Sclerotinia sclerotiorum 1980] gi|154698374|gb|EDN98112.1| SS1G_12969 [Sclerotinia sclerotiorum 1980]
  misc_feature (2)..(405): NCBI GI: 42742379 Blast Desc: aspartic protease-like protein [Verticillium dahliae]
  misc_feature (33)..(405): NCBI GI: 261354357 Blast Desc: aspartic proteinase [Verticillium albo-atrum VaMs.102]
  misc_feature: Useful for introducing or modulating the production of volatile compounds
MLDLTRHQALQTNSKLSARLDQVNITQEDASFYGARIEIGTPGQAVTVQIDFTSKWDGNDVFVPATNSTMCQNTSTIYGGCWLGSFNSNISQTFTQLPGGYVKPAETCSDVINFGGINVTDVVIVQAYSLSSDDLRSIVTPSLSLLDAPGDNPIPSVLYQLVDQGHLTTVAFSIWLGDTGKSDGQLLLGAVDEARFNQPLISLEAYGETPATGTLENNRWNNSLRLLMTSMSANSSTGDDTLDLIDLIPIQMNLRTSIILPQALALQAWNIAGVSQHVDSNGGNSSMGVIPCSKKDSEGVFTFGLGGPQGVSIEVHMQQMVFKPSLMNQDAVNKLGDDLCIFSIGFDANPLSWQLGVPLWSSIYAVVDLNNAKVAIAPINHDSPIGESNIVSFRGQGAPIPSATQAPSQPVSPTTSLKYAFTKGVYSTDASFNAQQGFSILTTTTSRSSPTDEPTTSSHGGLSKGGKIGVGIGVAVGVLLAVGIGGFCWGQKRGKKAEAKRVSSQAIQEELRNEKPELDGSAMGSPTVHIPQETFFEVDAEVPRRELSHLSEIFELPGGQPTPTLSQELPGNERDESGNERPVEQEVQH

SEQ ID NO: 26766 - DNA, 2379 bp, Muscodor strobelii
  misc_feature: SGI EST ID NO. CUFF.63209.0
  misc_feature: Variant of the nucleotide sequence at SEQ ID NO 26764
tctagcccccagctaacatggttgaagggagagggcatctccatcagctcggataccctttacggttgaaacgagcttcttcgccctcaaacatctacaaatgactttttaaactcctcaagtatgattgcgtcgtcggcgatctatggagggtgtcttttgacgtcgctgccgattggcagtgcttatgtcatgctcgacttgacgagacaccaagcactccagacaaattcaaaattgagcgcacgccttgatcaagtgaacataacgcaagaagacgcttctttctatggcgctcgtatcgaaataggaacacctggtcaagcggtcaccgtccaaattgattttacaagcaaatgggatggcaacgatgtcttcgtcccagccacgaactccacgatgtgccagaacacttccaccatttacggcggatgctggctaggatcatttaatagcaatatctcgcaaacgttcacacaacttccgggcggctacgtgaaaccagccgagacttgctcagatgtgattaattttggtggtatcaacgttacagatgtggttatcgtgcaagcttacagcctctcttccgatgacctgcggtccattgttactcctagcttaagtcttcttgatgcacccggagacaatcctattccgagcgtattgtaccaacttgttgatcaaggacacctcactactgtcgcattcagcatctggctcggagatactgggaaatccgatgggcaattgctcctgggtgcagttgacgaagcgaggttcaaccaacctctcatcagcctcgaagcgtatggagagaccccggcgaccggcacactggaaaacaatcgatggaacaattccttacgactattgatgacttcaatgtctgctaatagctcgacaggagatgacactttagaccttatcgatctaatcccaatccaaatgaatcttcgaacatcaataattctaccccaagcactcgcattacaggcatggaatatcgcgggagtatcccagcatgtggactcaaacggtgggaatagttcgatgggagtcattccttgttcgaagaaggacagtgaaggtgtttttacctttggattaggaggaccccaaggtgtctctatcgaagttcacatgcaacagatggtgttcaagccaagtctcatgaaccaagatgcggttaacaaactaggggatgacttgtgcattttctctattggctttgatgcgaatccgctttcttggcaactcggtgtgccactctggagttcaatctacgccgtagttgacttgaacaacgcgaaagtggcaatagcacctatcaaccacgacagcccaataggcgaatcaaatatcgtctcgttcagaggtcaaggtgccccgattccgtccgcgacacaggctccaagtcaacctgtctcgccaacaacgtcgttgaaatacgcattcacgaagggtgtctactccaccgacgcatcattcaacgcacagcaagggtttagcatattaaccactactacgtcgagatcgtcgccgacggatgaacctacgacttcttcacacggtgggctctcgaagggaggtaagatcggagtcggcatcggagtagccgtcggtgtgctgttagctgttggaatcggtggcttctgctggggacagaagagagggaagaaagcagaagcaaaacgagtgtcgagtcaggcaattcaggaagaattgagaaacgagaaacctgaattggatggaagtgcaatgggctctccaactgtgcatattccacaggagacgttctttgaggtagatgctgaagtcccgaggagggagctttcacatttgagtgagatcttcgagctaccaggtgggcaaccgactcctacattatcacaggagctcccaggcaatgaaagagacgagtccggaaacgagagaccagttgaacaagaagtgcagcattgaaaaatttgtgcgtgttgtggctgagcaagttcaacgatctagccatgggtttcggcatgcttaacaaggtccatgaaacactattccatctttaatcagtgaacatacgcgtatgtagtcgattggaaggagagatctctgttggctagagctgcgcggcacatataacaaagctgaaactgagttttatttgtgatcattgttattactagcgatgtgagtctccgattccaccaattggcttatgctattcaatgcgagcaggtgataggctagcttggagtcatcgcctggccagaaatctagatgaagttgatgatatccgtatactgccacgacttagctccctatgccagaaaatacgtaatatttcgtcctgtgattcagattatgttctatatgccagcaccaactctg

SEQ ID NO: 26767 - DNA, 1359 bp, Muscodor strobelii
  misc_feature: SGI cDNA ID NO. 569158
  misc_feature: Encodes the peptide sequence at SEQ ID NO 26768
atggtcaacctctttcagcaacctgaccttcccccatttccctatgagcagcttggcggatacatgaacgagaaaggatactacccagacgaaaaatcaagagatgcgttttcgactatacccacgaaaccatcttacgagcatgctatggcggacattccattatcacaattaccggctcatgagccaccagcaccaccaaccgaatggattatcccaccagttgagtctggattcttgaaagtgttcaaatggtggggatcgacaatgggtactggcatcgtggcgatccttttcttcaatttttcgaccatctaccccacggctgcaggcgttctccgaccacttagtgtcattttctacataggcaatgtcgttctgttcggcatcctactcttaatgactattcttcgatatctcctatacccgaaactatttgttatgatggtatcggatcccggccaagctatgtacttgggcactttccctatgggtttcgctacgatcgttaccatgactgtgaatgtcgccgttccggatcttggagatgcctggattggaattgcctgggcgttctggtgggtagacgttgttattagtatggccacagccttggtcataccttggcttctacaggtcaggcatcatggcattaccgacttggataagatgactgctggatggcttctccccatcgtcgcccctatcgtcgccgctgctactgggagtgtagtagcttcggttctggaccccgatcgcgccctagtcacaatactgacctgttatgccatccttggtactggtctctcggcagctctcgccatcattgtcatttacttcctgagaatcgcaactaaaaaactaccccctattgagcatatggtcagcgtcttccttccgctcggccctctcggtcaaggaggtttcgcagctcagaagctcggcgagcaggctttaagagtgtttccgctaactaacaccattcctgctgctcaaaatgccggcgaaatattatatgtcattggattcgtggttgcaataaccctctggggctttggcctcatgtggcttttcttcgccatgctgtctatcgctacttctacaccaaggatacctttctctctcggctggtgggcattcacatttcctctaggtgtgtttgccgtttccaccctgacaatgggtgtgaatctaccaagtgtcacgtttcaagtacttggcacaatattcgggtctgctgttatcgtactttgggtcatggtggcagtgatgttggtgtctcgattagtaggagggaagaagtatacaatattcaaagcgccagaagtcactggggctcacaacaagcgtcaggcatag

SEQ ID NO: 26768 - protein, 452 aa, Muscodor strobelii
  misc_feature: SGI Peptide ID NO. 569158
  misc_feature (83)..(390): Pfam Id: PF03595 Pfam Desc: C4-dicarboxylate transporter/malic acid transport protein
  misc_feature (90)..(452): NCBI GI: 169614383 Blast Desc: SNOG_10332 [Phaeosphaeria nodorum SN15] gi|160707335|gb|EAT82667.2| SNOG_10332 [Phaeosphaeria nodorum SN15]
  misc_feature (84)..(450): NCBI GI: 121709274 Blast Desc: C4-dicarboxylate transporter/malic acid transport protein, [Aspergillus clavatus NRRL 1] gi|119400516|gb|EAW10941.1| C4-dicarboxylate transporter/malic 1]
  misc_feature (84)..(410): NCBI GI: 261356394 Blast Desc: sulfite transporter Ssu1 [Verticillium albo-atrum VaMs.102]
  misc_feature (66)..(435): NCBI GI: 76057134 Blast Desc: malate permease [Aspergillus niger]
  misc_feature (66)..(409): NCBI GI: 145245839 Blast Desc: An12g00870 [Aspergillus niger] gi|134079885|emb|CAK41017.1| protein product [Aspergillus niger]
  misc_feature (85)..(428): NCBI GI: 238845934 Blast Desc: sulphite efflux pump protein [Microsporum canis CBS 113480]
  misc_feature (90)..(451): NCBI GI: 119489032 Blast Desc: C4-dicarboxylate transporter/malic acid transport protein, [Neosartorya fischeri NRRL 181] gi|119410974|gb|EAW20919.1| C4-dicarboxylate transporter/malic
  misc_feature (85)..(428): NCBI GI: 259511968 Blast Desc: C4-dicarboxylate transporter/malic acid transport protein, [Neosartorya fischeri NRRL 181] gi|119410974|gb|EAW20919.1| C4-dicarboxylate transporter/malic
  misc_feature (83)..(409): NCBI GI: 169781986 Blast Desc: [Aspergillus oryzae RIB40] gi|83774198|dbj|BAE64323.1| protein product [Aspergillus oryzae]
  misc_feature (85)..(451): NCBI GI: 238500744 Blast Desc: MFS transporter, [Aspergillus flavus NRRL3357] gi|220691843|gb|EED48190.1| MFS transporter, [Aspergillus flavus NRRL3357]
MVNLFQQPDLPPFPYEQLGGYMNEKGYYPDEKSRDAFSTIPTKPSYEHAMADIPLSQLPAHEPPAPPTEWIIPPVESGFLKVFKWWGSTMGTGIVAILFFNFSTIYPTAAGVLRPLSVIFYIGNVVLFGILLLMTILRYLLYPKLFVMMVSDPGQAMYLGTFPMGFATIVTMTVNVAVPDLGDAWIGIAWAFWWVDVVISMATALVIPWLLQVRHHGITDLDKMTAGWLLPIVAPIVAAATGSVVASVLDPDRALVTILTCYAILGTGLSAALAIIVIYFLRIATKKLPPIEHMVSVFLPLGPLGQGGFAAQKLGEQALRVFPLTNTIPAAQNAGEILYVIGFVVAITLWGFGLMWLFFAMLSIATSTPRIPFSLGWWAFTFPLGVFAVSTLTMGVNLPSVTFQVLGTIFGSAVIVLWVMVAVMLVSRLVGGKKYTIFKAPEVTGAHNKRQA

SEQ ID NO: 26769 - DNA, 2487 bp, Muscodor strobelii
  misc_feature: SGI EST ID NO. CUFF.63092.0
  misc_feature: Variant of the nucleotide sequence at SEQ ID NO 26767
cgcatgttgacccacagtggcacaaagcttcatgttgcggccgtgttagaaacacgagtcaaacagagacccgccatgtaattaattgactatcactagatatgtttgcgcctctgggggcgagaacgtggtgttatggcccggccgttgtaatacgactttgatctaacatctctctcatcaaaagtacgcgtggggcggtttgtttgttgttccttttgtttctcttcgaccttgtgagcttgacgcaacacattcttctttctagcgagcttttaatttgctatatcactttctttaataatactatagtgaaaaatgagtacagtcaacgttggtggtgaccagtcaccaaactcatattcatctgaacaccagactgaagcagtcacgataggttatgcttccgatactggagatagaggccgaaacctctatcgaaactactcaagaggccattcacattcacaatcagcacatagcccaggtggccagattacacaatggagttcctggagaacaccgcgtcaacgagatcccatctctcaacctctgacaatcaatttaactttcggtggcccaaatggggcgagccagtctctaagaatcaatcatgaccaacatcaacgcgaaccgagcgcgccttggacagatgaggtcgagcagcgacgaaggttgaatcagccttccttgcgaaacccaaaggaaggcaagaacgacttaatggtcaacctctttcagcaacctgaccttcccccatttccctatgagcagcttggcggatacatgaacgagaaaggatactacccagacgaaaaatcaagagatgcgttttcgactatacccacgaaaccatcttacgagcatgctatggcggacattccattatcacaattaccggctcatgagccaccagcaccaccaaccgaatggattatcccaccagttgagtctggattcttgaaagtggtgcaaaatttcgatggtgagtgaccttccgccaacgattataatatgcgaatatcttggactaatgacttattacagtacgtgattatacacattgagaatctagtaaaatacttcgaaaactaacatcgtcaacagttcaaatggtggggatcgacaatgggtactggcatcgtggcgatccttttcttcaatttttcgaccatctaccccacggctgcaggcgttctccgaccacttagtgtcattttctacataggcaatgtcgttctgttcggcatcctactcttaatgactattcttcgatatctcctatacccgaaactatttgttatgatggtatcggatcccggccaagctatgtacttgggcactttccctatgggtttcgctacgatcgttaccatgactgtgaatgtcgccgttccggatcttggagatgcctggattggaattgcctgggcgttctggtgggtagacgttgttattagtatggccacagccttggtcataccttggcttctacaggtcaggcatcatggcattaccgacttggataagatgactgctggatggcttctccccatcgtcgcccctatcgtcgccgctgctactgggagtgtagtagcttcggttctggaccccgatcgcgccctagtcacaatactgacctgttatgccatccttggtactggtctctcggcagctctcgccatcattgtcatttacttcctgagaatcgcaactaaaaaactaccccctattgagcatatggtcagcgtcttccttccgctcggccctctcggtcaaggaggtttcgcagctcagaagctcggcgagcaggctttaagagtgtttccgctaactaacaccattcctgctgctcaaaatgccggcgaaatattatatgtcattggattcgtggttgcaataaccctctggggctttggcctcatgtggcttttcttcgccatgctgtctatcgctacttctacaccaaggatacctttctctctcggctggtgggcattcacatttcctctaggtgtgtttgccgtttccaccctgacaatgggtgtgaatctaccaagtgtcacgtttcaagtacttggcacaatattcgggtctgctgttatcgtactttgggtcatggtggcagtgatgttggtgtctcgattagtaggagggaagaagtatacaatattcaaagcgccagaagtcactggggctcacaacaagcgtcaggcatagcttgaggagacgctttaatgactgattttatgaagtatgaatatgacagcgcctaaagcttgtcgcttgtataacagcattgaacttggatagagaacaattgtggaaaacatcaatgccacttaaggggggcaagttttatttgccaattgaagcccatgaaaatgacgataccaattgcaaatgcctctgctaacctgtgcattttacacgaatgaagaggataaacaaaaatcatttatgtgtcttatgttcaaataattagtc

SEQ ID NO: 26770 - DNA, 1212 bp, Muscodor strobelii
  misc_feature: SGI cDNA ID NO. 569159
  misc_feature: Encodes the peptide sequence at SEQ ID NO 26771
atgaacgcaaacactacctacggattttcctctccatacttggagcccttttcacctatcaaaccctcacaccttgacgagaccagcaccatcactatcaatgaaatcattcacaacgaagatgcgctagaaatcattgttcttgatgatggtgcacaggacactgatatatgcgatgtcccggagttcgattatacctccgatcgctcttcaacgtcttccccagaaccacctcagattttattcacagaaatccatcttaagcacttgaacgaacaactcgaacacctctctccacaagatatcttgcgcatatgcaagcttatgttccccaatctatatcaaactacagctttcggtctcaccggtctagtcacattagacatgttatcaaagctacatctcgagactccgggctcgtcgcccgtagatctcatattcttagatactttgtatcacttccaagagacttaccagcttgtctcacgcatcagggaacactaccctgacgtattcattcacactttccgccctcagggctgcggatccgcatcggagttcgaagcgcgatatggctccgcattatgggagatcgatgcggagcgctatgattacttggccaaagttgaaccgcaacaacgttcgtacgaggtccttggagttgccgcaatcctgacaggccgtcggagatcccaaggcgctaaaaggggagacattcccatcttagaaatggaccgggagaggggtgtcgtgaagatcaaccccttcgtcaactggtcgttccaccaagttctcgaatacatcaagaccaataatgtgccatacaacgagcttttagatagaggctacaagagtgtcggtgactggcattctacgcagcctgtcgccgagggtgaagacgagcgtgccggccgttggaaaggccaggataaatcagaatgtggaatccacaacaagaaaagtcgctacgctatgttcctcgaggaaatggcgaagaagcaggctgaagaagagcactcggagatgcacgagtccgagtccgagtctactgaccatagtacaacgacgagcacaatatcgtctcttcaatcttcgaatacgagtgtctccgagcagcccgaggctgaaattcttgtaccgcgcctcgcggcgaatgagccaggtagaaaaataggcttcggagccggcccagaaattgctagaacagactaa

SEQ ID NO: 26771 - protein, 403 aa, Muscodor strobelii
  misc_feature: SGI Peptide ID NO. 569159
  misc_feature (112)..(294): Pfam Id: PF01507 Pfam Desc: Phosphoadenosine phosphosulfate reductase family
  misc_feature (70)..(336): NCBI GI: 85115415 Blast Desc: phosphoadenosine phosphosulfate reductase [Neurospora crassa OR74A] gi|28926666|gb|EAA35634.1| phosphoadenosine phosphosulfate reductase [Neurospora crassa OR74A] PHOSPHOSULFATE
  misc_feature (78)..(334): NCBI GI: 261357923 Blast Desc: phosphoadenosine phosphosulfate reductase [Verticillium albo-atrum VaMs.102]
  misc_feature (59)..(327): NCBI GI: 145615958 Blast Desc: MGG_03662 [Magnaporthe grisea 70-15] gi|145009747|gb|EDJ94403.1| MGG_03662 [Magnaporthe grisea 70-15]
  misc_feature (78)..(338): NCBI GI: 256733625 Blast Desc: [Nectria haematococca mpVI 77-13-4]
  misc_feature (54)..(337): NCBI GI: 119192158 Blast Desc: phosphoadenosine phosphosulfate reductase [Coccidioides immitis RS] gi|240106200|gb|EER24393.1| Phosphoadenosine phosphosulfate reductase, [Coccidioides C735
  misc_feature (71)..(337): NCBI GI: 116193649 Blast Desc: CHGG_06542 [Chaetomium globosum CBS 148.51] gi|88182455|gb|EAQ89923.1| CHGG_06542 [Chaetomium globosum CBS 148.51]
  misc_feature (70)..(342): NCBI GI: 171684987 Blast Desc: protein product [Podospora anserina] gi|170942454|emb|CAP68106.1| protein product [Podospora anserina]
  misc_feature (78)..(338): NCBI GI: 46128301 Blast Desc: FG08528.1 [Gibberella zeae PH-1]
  misc_feature (59)..(346): NCBI GI: 255944213 Blast Desc: 3-phosphoadenosine-5-phosphosulfate reductase ParA-Penicillium chrysogenum [Penicillium chrysogenum Wisconsin 54-1255] gi|211587609|emb|CAP85651.1| reductase ParA-Penicillium
  misc_feature (59)..(346): NCBI GI: 10945373 Blast Desc: AF227433_1 3'-phosphoadenosine-5'-phosphosulfate reductase [Penicillium chrysogenum]
  misc_feature (52)..(334): SWISSPROT Homolog: EC 1.8.4.8 Phosphoadenylyl-sulfate reductase (thioredoxin)
MNANTTYGFSSPYLEPFSPIKPSHLDETSTITINEIIHNEDALEIIVLDDGAQDTDICDVPEFDYTSDRSSTSSPEPPQILFTEIHLKHLNEQLEHLSPQDILRICKLMFPNLYQTTAFGLTGLVTLDMLSKLHLETPGSSPVDLIFLDTLYHFQETYQLVSRIREHYPDVFIHTFRPQGCGSASEFEARYGSALWEIDAERYDYLAKVEPQQRSYEVLGVAAILTGRRRSQGAKRGDIPILEMDRERGVVKINPFVNWSFHQVLEYIKTNNVPYNELLDRGYKSVGDWHSTQPVAEGEDERAGRWKGQDKSECGIHNKKSRYAMFLEEMAKKQAEEEHSEMHESESESTDHSTTTSTISSLQSSNTSVSEQPEAEILVPRLAANEPGRKIGFGAGPEIARTD

SEQ ID NO: 26772 - DNA, 2059 bp, Muscodor strobelii
  misc_feature: SGI EST ID NO. CUFF.63100.0
  misc_feature: Variant of the nucleotide sequence at SEQ ID NO 26770
cctctctccacaagatatcttgcgcatatgcaagcttatgttccccaatctatatcaaactacagctttcggtctcaccggtctagtcacattagacatgttatcaaagctacatctcgagactccgggctcgtcgcccgtagatctcatattcttagatactttgtatcacttccaagagacttaccagcttgtctcacgcatcagggaacactaccctgacgtattcattcacactttccgccctcagggctgcggatccgcatcggagttcgaagcgcgatatggctccgcattatgggagatcgatgcggagcgctatgattacttggccaaagttgaaccgcaacaacgttcgtacgaggtccttggagttgccgcaatcctgacaggccgtcggagatcccaaggcgctaaaaggggagacattcccatcttagaaatggaccgggagaggggtgtcgtgaagatcaaccccttcgtcaactggtcgttccaccaagttctcgaatacatcaagaccaataatgtgccatacaacgagcttttagatagaggctacaagagtgtcggtgactggcattctacgcagcctgtcgccgagggtgaagacgagcgtgccggccgttggaaaggccaggataaatcagaatgtggaatccacaacaagaaaagtcgctacgctatgttcctcgaggaaatggcgaagaagcaggctgaagaagagcactcggagatgcacgagtccgagtccgagtctactgaccatagtacaacgacgagcacaatatcgtctcttcaatcttcgaatacgagtgtctccgagcagcccgaggctgaaattcttgtaccgcgcctcgcggcgaatgagccaggtagaaaaataggcttcggagccggcccagaaattgctagaacagactaaggatattttcaatgaagcacttggatgttagatatgtataaagatattttctgtatttggattgagggcgtttgggaagggctacctagatatagaggctgctggtcagactgttaggatatccgattggcgatagacctgatcatgggccaacactatttctaagctctagaagagagttgaaaatgagagttgattgagtataagaccattctatgtgaagtcatgaaatagaacagaatggggcatctacgaaagaacagtctgacgaacgcttgattctcagcagtcttctacaaggatagcacggtaaaccccgaattccagtctattccaagatccgacgaaataattgcgaagcggatggcaaacagactcaactagcttacgaaacccatcgtccctacacatttcatgtgtgaaatcaaatatccagtcagttttactccaagtcgcgaccttgtgtgtaatctcacattcccggagccgcgggtagacggcgtccgagccggcagtaacgagatgtgggctctggtcttgcgaccgatctttgacgatgtataattttctaacagaataataacagttgaatatttcatcaatctctgccgacaatccttgcagcgatgattctggtattgcaactttcgtaatgcgggggcgttgtgagtggcttctttcaatcatgtccggctcaaacgcccgatcgatgctctctgtaagacattcggaccattcgtgtttggtcacgaatagtgcgtcataatctggatcgaagtttctcgtaaagtaagttttattctctgttgtacggtggcaaatgcgcggtgcttgttttcgcgcccattcgatggcaacgcaatgagcttctgtgttgacgaaggctacaggcatgtcgagctgcccttcgcctagaagctcataacgaaactccatgatcagattgagatcagaatttgtatcgtcgtactcccattcacctggtgccagcattcttggacaccagcatccccttttgtatgggaataaggcgggtcgtaggtcctggtctagagcggcgcgccaaatcatgatgcgcagttctggaggaagttcccagagtgtcggcatcggccgaacttggttcatttcttc

SEQ ID NO: 26773 - DNA, 1416 bp, Muscodor strobelii
  misc_feature: SGI cDNA ID NO. 569160
  misc_feature: Encodes the peptide sequence at SEQ ID NO 26774
atgttgtcgacacttcctaccgagctcatccaggaagttctttcccagatctgcgatgtcccttccttgcttgcgacgatgcagacctgccatgccatccatgatgcgtacgttagcggcagaaatttcatagccaataatgcagtactgaactccattcatccctcggttcttccagatgccattgcgcgacacgagtctcggcactggaaagtggatatgatgtggttcgggtatgacccagagagggatgagtaccttgctaccatcgctgctttcacttcacgcttcttaggcgcgcgcccgacgccaccaagagcctgggaattctccgacgccatggcacttgttcagttccatggcattgtcaagcactttgccacctggatcgcgaatactgctctcagaagagtctccaagcatgtagaccaacgcccgccaacctattccgaactttgtcgaatacagcgagccctctatcgctacgacacgtgggtcaatctatttggtctcagacaaatgtcgaacgacaagcctggcggtcccggagaaatattttttccgtatttctcgaagcacgagaccgaacaaatgatttgcgttgacaggatcctcacggaggtagtcgctgaaccattcaatcaacttgtcgagcatgatgttcgatggggcttcctgaaagttgatcctatcaggtcacgacacgactaccgcgcgacctatgttgttcatcgcggtttacgcttccttttcaagttatccactgaaaccgacttttggcgacgacgagaagcgctcagtcgcagcgatgagtttgactgcaatgacgaaccaccacgggcctggcatatgttctctgaacacgggatagggatgaagggttttgatttaggctcagacttccccaaggccgacgcgactgtttcaagttctacgacggcgcaccttgacctcgatcgaggaccaagagcagcattgaagtggggagggcgctttctcgtcgataaagacaaccagctctggagatatgtcttttgggacctagaaaggcttgcgagcaatggtgttatacataaaccccagttgtcaatcaaagtctctcacgagctggacaaaagtcaacaagtggaccactggattgaactaactcattcacgacgcgagagaacgagaatcaaacacttactaggattcggttggtgggacattcatgatcaaagccagatcatctggaactacaaatatttattcttcggcgcagaaccttctgtattcaatgtgccgaggacgattaggagtctagagtggaataatggcacggaatggctatctaaggagtttaataggctggagcaaaataagtctttgctcttcgatataggcaacatcaaagacatcacttggcagcaaagatga

SEQ ID NO: 26774 - protein, 471 aa, Muscodor strobelii
  misc_feature: SGI Peptide ID NO. 569160
  misc_feature (2)..(409): NCBI GI: 238845280 Blast Desc: conserved [Microsporum canis CBS 113480]
  misc_feature (2)..(392): NCBI GI: 119182895 Blast Desc: [Coccidioides immitis RS]
  misc_feature (2)..(392): NCBI GI: 240109431 Blast Desc: CPC735_029360 [Coccidioides posadasii C735 delta SOWgp]
  misc_feature (4)..(411): NCBI GI: 159123500 Blast Desc: AFUB_080550 [Aspergillus fumigatus A1163]
  misc_feature (4)..(411): NCBI GI: 70983990 Blast Desc: AFUA_8G07220 [Aspergillus fumigatus Af293] gi|66845146|gb|EAL85482.1| AFUA_8G07220 [Aspergillus fumigatus Af293]
  misc_feature (2)..(224): NCBI GI: 258567816 Blast Desc: [Uncinocarpus reesii 1704] gi|237906098|gb|EEP80499.1| [Uncinocarpus reesii 1704]
  misc_feature (2)..(359): NCBI GI: 258571307 Blast Desc: [Uncinocarpus reesii 1704] gi|237904727|gb|EEP79128.1| [Uncinocarpus reesii 1704]
  misc_feature (2)..(411): NCBI GI: 119485841 Blast Desc: NFIA_100030 [Neosartorya fischeri NRRL 181] gi|119410419|gb|EAW20366.1| conserved [Neosartorya fischeri NRRL 181]
  misc_feature (112)..(224): NCBI GI: 154294559 Blast Desc: [Botryotinia fuckeliana B05.10] gi|150844722|gb|EDN19915.1| [Botryotinia fuckeliana B05.10]
  misc_feature (13)..(363): NCBI GI: 145245225 Blast Desc: An11g09220 [Aspergillus niger] gi|134079576|emb|CAK97052.1| [Aspergillus niger]
MLSTLPTELIQEVLSQICDVPSLLATMQTCHAIHDAYVSGRNFIANNAVLNSIHPSVLPDAIARHESRHWKVDMMWFGYDPERDEYLATIAAFTSRFLGARPTPPRAWEFSDAMALVQFHGIVKHFATWIANTALRRVSKHVDQRPPTYSELCRIQRALYRYDTWVNLFGLRQMSNDKPGGPGEIFFPYFSKHETEQMICVDRILTEVVAEPFNQLVEHDVRWGFLKVDPIRSRHDYRATYVVHRGLRFLFKLSTETDFWRRREALSRSDEFDCNDEPPRAWHMFSEHGIGMKGFDLGSDFPKADATVSSSTTAHLDLDRGPRAALKWGGRFLVDKDNQLWRYVFWDLERLASNGVIHKPQLSIKVSHELDKSQQVDHWIELTHSRRERTRIKHLLGFGWWDIHDQSQIIWNYKYLFFGAEPSVFNVPRTIRSLEWNNGTEWLSKEFNRLEQNKSLLFDIGNIKDITWQQR

SEQ ID NO: 26775 - DNA, 1386 bp, Muscodor strobelii
  misc_feature: SGI cDNA ID NO. 569161
  misc_feature: Encodes the peptide sequence at SEQ ID NO 26776
atgttgtcaacactgccgactgagcttatccaagaggtgcttgagcacgtcggcaacctcaagtccctggcggctgctgccctgacctgccatgccgtacatgaggcattcacaggagccaaagatattatcttgatcaataccctccgacgactcattcacccctctgtgctgcccgaggctctcgctcgatcgaaggcatatcagatacaccatccctctgcccttcgtgacacggacattgtgaatgacttcatcacaaacctctacaccacagagtttgcgccccccaagtcgtggacaactcgtaatgctctttctctttgcaagtttcacaacattatcgagcatttctcgacgctgttgcttgacaaatacattggacgagctggagatctgcttgaaaaaggacagacaactgcaacagagcttcgaagaatgcaaaaagccttgtatcgctatgatatttggtgtcaattatttgcaaaccaaggtcgcgatttcggcttcgccaaacgagaattcttcagccactacgaaatgtgggaaatcgagcaaattgtgtgcatggatgacgttcttttcgagatagccgaaaaagcgtacgtttttcgtccttttattgatttgaatgacgttgacaagattgatttagcctacaacgaaatggttgagcatgacgttgggtggggtgccttgaaggtgccttatctcagacgccagactggcgagcttgactacattcttggcaatggcttagagtttctctataagctatccagcaccgatagccacgaggaattacgacagatgctcgacgcccgaagcatcggactacatcaatcctggatgaccggtaactatagattcagtcagactgttgcccgtggcttatgggtatgggattctaccggcatcaacagatcctctcatctaggatgggaagaaaaacgccgtcagaactcgaagaaaaggcttacgatcgcagctgatgatgaggacatggatacgggaccagccacggcatggaaactcgtcaacccggcaatgagagccttagagggtaccagggcataccatccgtcacttggttactctcccgatatcgagtggggctatgtattctgggacatgggcagacttgagcgtggtgggttcctgcacagggaggacgaggatgatgatacacttcgtgacgtccgaggtcgtatggagccgcgatccctcgagccttcatcgaggtcgcaagagttgaggcgatgggtagatattcagggaggatctggttggtggagtgagcaggatcaaagcaaggttgtctacaagcagtctcagatgaggaaaagagttgtttggttggccgctcaactcggagcaccaggctga

SEQ ID NO: 26776 - protein, 461 aa, Muscodor strobelii
  misc_feature: SGI Peptide ID NO. 569161
  misc_feature (2)..(439): NCBI GI: 238845280 Blast Desc: conserved [Microsporum canis CBS 113480]
  misc_feature (2)..(454): NCBI GI: 256720789 Blast Desc: [Nectria haematococca mpVI 77-13-4]
  misc_feature (2)..(387): NCBI GI: 240109431 Blast Desc: CPC735_029360 [Coccidioides posadasii C735 delta SOWgp]
  misc_feature (2)..(387): NCBI GI: 119182895 Blast Desc: [Coccidioides immitis RS]
  misc_feature (2)..(388): NCBI GI: 258571307 Blast Desc: [Uncinocarpus reesii 1704] gi|237904727|gb|EEP79128.1| [Uncinocarpus reesii 1704]
  misc_feature (2)..(451): NCBI GI: 159123500 Blast Desc: AFUB_080550 [Aspergillus fumigatus A1163]
  misc_feature (2)..(451): NCBI GI: 70983990 Blast Desc: AFUA_8G07220 [Aspergillus fumigatus Af293] gi|66845146|gb|EAL85482.1| AFUA_8G07220 [Aspergillus fumigatus Af293]
  misc_feature (2)..(237): NCBI GI: 258567816 Blast Desc: [Uncinocarpus reesii 1704] gi|237906098|gb|EEP80499.1| [Uncinocarpus reesii 1704]
  misc_feature (2)..(439): NCBI GI: 119485841 Blast Desc: NFIA_100030 [Neosartorya fischeri NRRL 181] gi|119410419|gb|EAW20366.1| conserved [Neosartorya fischeri NRRL 181]
  misc_feature (74)..(387): NCBI GI: 238841616 Blast Desc: conserved [Microsporum canis CBS 113480]
MLSTLPTELIQEVLEHVGNLKSLAAAALTCHAVHEAFTGAKDIILINTLRRLIHPSVLPEALARSKAYQIHHPSALRDTDIVNDFITNLYTTEFAPPKSWTTRNALSLCKFHNIIEHFSTLLLDKYIGRAGDLLEKGQTTATELRRMQKALYRYDIWCQLFANQGRDFGFAKREFFSHYEMWEIEQIVCMDDVLFEIAEKAYVFRPFIDLNDVDKIDLAYNEMVEHDVGWGALKVPYLRRQTGELDYILGNGLEFLYKLSSTDSHEELRQMLDARSIGLHQSWMTGNYRFSQTVARGLWVWDSTGINRSSHLGWEEKRRQNSKKRLTIAADDEDMDTGPATAWKLVNPAMRALEGTRAYHPSLGYSPDIEWGYVFWDMGRLERGGFLHREDEDDDTLRDVRGRMEPRSLEPSSRSQELRRWVDIQGGSGWWSEQDQSKVVYKQSQMRKRVVWLAAQLGAPG

SEQ ID NO: 26777 - DNA, 876 bp, Muscodor strobelii
  misc_feature: SGI EST ID NO. CUFF.63115.0
  misc_feature: Variant of the nucleotide sequence at SEQ ID NO 26775
agcatgacgttgggtggggtgccttgaaggtgccttatctcagacgccagactggcgagcttgactacattcttggcaatggcttagagtttctctataagctatccagcaccgatagccacgaggaattacgacagatgctcgacgcccgaagcatcggactacatcaatcctggatgaccggtaactatagattcagtcagactgttgcccgtggcttatgggtatgggattctaccggcatcaacagatcctctcatctaggatgggaagaaaaacgccgtcagaactcgaagaaaaggcttacgatcgcagctgatgatgaggacatggatacgggaccagccacggcatggaaactcgtcaacccggcaatgagagccttagagggtaccagggcataccatccgtcacttggttactctcccgatatcgagtggggctatgtattctgggacatgggcagacttgagcgtggtgggttcctgcacagggaggacgaggatgatgatacacttcgtgacgtccgaggtcgtatggagccgcgatccctcgagccttcatcgaggtcgcaagagttgaggcgatgggtagatattcagggaggatctggttggtggagtgagcaggatcaaagcaaggttgtctacaagcagtctcagatgaggaaaagagttgtttggttggccgctcaactcggagcaccaggctgaaaatgtaactggctatgataagcagactagagagaccctcacgtcaaactggtcgtatcacttggtactcatagtactattgtataagcgggtcattagggagcaaacggggatcttcgatacatgtaggtatgagcgacgggttgtaataaagaaggcagat

SEQ ID NO: 26778 - DNA, 2112 bp, Muscodor strobelii
  misc_feature: SGI cDNA ID NO. 569162
  misc_feature: Encodes the peptide sequence at SEQ ID NO 26779
atgtggctactgaactcctgtacgtgggagttgaaagacttcatctcaaacgaacaagtaccaccctacgctatcctatcgcacacatggcgcgacgaggaagtcctatttcgacactgggagtctctgccgcgggaggaaatcgagaaaatggacggctatcagaagatctcctattgctgtagacaagcattctctgagggcttggagtgggtttgggtcgataccgtatgcattgacaagaccagtagtgctgagctgtccgaggccatcaattcaatgtttcagtggtatcgccgggcggctgtctgctacgcctatatcgatgatattccagcgggaattgaaagtttggatatgggattagagatagggaaaagtcgatggatcacacgaggttggacactgcaggaactgatcgcaccgtcggaagtgatgttctactctcaggactggatatatatcggtagacgttcagagctttcggcctctctcgcagctgtatcacagattgacgagccgtacctcaaaggccgaaatcacagtctggcaagtatagcacagcgaatgtcttgggcctcgagacgtaacacttctcgaaaagaggatgaagcatactgtcttttgggtatttttgacgtaaacatgccccttatatacggagagggcgtgagagcttttcagcggcttcaagaactaattatgcatgaattcccagaagatcattccttgtttgcttggggcaaggttgtgacagactactcgaagctggtctacgacacggaacaaatatggggttccaaacgcatcgaatacaatcctgagttggctgatgataactacttgggcctcctagccgaaagtccttcggctttcaaagactctggtcggttcatcacagctcctcacgcagcagcctttttcagtcaacgcttcggcgcgctacctcccatacctgtggttcatgggagacaggccgttaaggttgaactgatcgatctcaagttcgtagtacggcacgctgtcttccatttgaagcgtcataaactggctcagctacgctatgttaaacatgctatgcttctctgcggacattgggatgaagccggcgagaaattccacttcgtcatcctacccctaacctcaggcgctatccgcgccgcccgaacagccgaaatagtagtcaacgaccaattcgttgacgctttcgaccccaacacctacggcatccgtccctacttctacagacaagacttcatcataggccccgtaccaccaatccacaccggcaaaggcgggatattaatcaagcgatacacatcatggaaagcaaggggggatttcatagtcctctccgaaatcaacagcagaatccaagacggctgggtaaatctacgaagcacattcttcggtccaatatgtgcattcgtccacctcatgacacctgacaagaaacgcggtttcgggctgttcctcatgcgtcttgcaccattgaaaccggggactgcgaagatacccgagggaaagacaccaggggctctacagcttggattcttacctgctaatatggctcttgacttattcacgctcactcgaaagaacccgtctccatctgcaccttcctcacaaacggatagtcaacaggagttcatgaataaatttcggtccaagtttcccacgagtgctaaacaaactccaattcttaggaaagaaacctcaagctttaggaaagaaactccaagtctgaggaaagaatcctcaagcttcaggaaatccacctcgttcataaacgagacggatacgtcgagtctgacgagcgtatgggatacatgtaactcgttcgaaacacgcaccaaccaattcccactcgcgatagacacggtagatgcctatgaagagtggcatctgagcgtgaagggcttctgcgaggtcaatatcacgatcgagcgcatacccttacctgacgacccagacgacgacgtggatcctagcgggccgtttagtgggaatttcgtggatgtgctggatattgttagtccgcagcctgaagaagagaggaaggcccaggaacgagctgcggctgctaagaaggctggggatagtcaggggtga

SEQ ID NO: 26779 - protein, 703 aa, Muscodor strobelii
  misc_feature: SGI Peptide ID NO. 569162
  misc_feature (23)..(138): Pfam Id: PF06985 Pfam Desc: Heterokaryon incompatibility protein (HET)
  misc_feature (23)..(108): Pfam Id: PF06985 Pfam Desc: Heterokaryon incompatibility protein (HET)
  misc_feature (126)..(138): Pfam Id: PF06985 Pfam Desc: Heterokaryon incompatibility protein (HET)
  misc_feature (1)..(331): NCBI GI: 169595686 Blast Desc: SNOG_00587 [Phaeosphaeria nodorum SN15] gi|111070962|gb|EAT92082.1| SNOG_00587 [Phaeosphaeria nodorum SN15]
  misc_feature (1)..(299): NCBI GI: 169776259 Blast Desc: [Aspergillus oryzae RIB40] gi|83771331|dbj|BAE61463.1| protein product [Aspergillus oryzae]
  misc_feature (1)..(339): NCBI GI: 46139565 Blast Desc: FG11297.1 [Gibberella zeae PH-1]
  misc_feature (1)..(247): NCBI GI: 256720831 Blast Desc: NECHADRAFT_28122 [Nectria haematococca mpVI 77-13-4]
  misc_feature (1)..(336): NCBI GI: 119481395 Blast Desc: HET domain protein [Neosartorya fischeri NRRL 181] gi|119408880|gb|EAW18829.1| HET domain protein [Neosartorya fischeri NRRL 181]
  misc_feature (1)..(247): NCBI GI: 156035539 Blast Desc: SS1G_12973 [Sclerotinia sclerotiorum 1980] gi|154698378|gb|EDN98116.1| SS1G_12973 [Sclerotinia sclerotiorum 1980]
  misc_feature (1)..(438): NCBI GI: 145607537 Blast Desc: MGG_12213 [Magnaporthe grisea 70-15] gi|145015064|gb|EDJ99632.1| MGG_12213 [Magnaporthe grisea 70-15]
  misc_feature (1)..(316): NCBI GI: 71001840 Blast Desc: HET domain protein [Aspergillus fumigatus Af293] gi|66853239|gb|EAL93563.1| HET domain protein [Aspergillus fumigatus Af293] gi|159129660|gb|EDP54774.1| HET domain protein
  misc_feature (1)..(323): NCBI GI: 169770123 Blast Desc: [Aspergillus oryzae RIB40] gi|83767390|dbj|BAE57529.1| protein product [Aspergillus oryzae]
  misc_feature (19)..(295): NCBI GI: 145235123 Blast Desc: An03g03270 [Aspergillus niger] gi|134057890|emb|CAK38231.1| protein product [Aspergillus niger]
MWLLNSCTWELKDFISNEQVPPYAILSHTWRDEEVLFRHWESLPREEIEKMDGYQKISYCCRQAFSEGLEWVWVDTVCIDKTSSAELSEAINSMFQWYRRAAVCYAYIDDIPAGIESLDMGLEIGKSRWITRGWTLQELIAPSEVMFYSQDWIYIGRRSELSASLAAVSQIDEPYLKGRNHSLASIAQRMSWASRRNTSRKEDEAYCLLGIFDVNMPLIYGEGVRAFQRLQELIMHEFPEDHSLFAWGKVVTDYSKLVYDTEQIWGSKRIEYNPELADDNYLGLLAESPSAFKDSGRFITAPHAAAFFSQRFGALPPIPVVHGRQAVKVELIDLKFVVRHAVFHLKRHKLAQLRYVKHAMLLCGHWDEAGEKFHFVILPLTSGAIRAARTAEIVVNDQFVDAFDPNTYGIRPYFYRQDFIIGPVPPIHTGKGGILIKRYTSWKARGDFIVLSEINSRIQDGWVNLRSTFFGPICAFVHLMTPDKKRGFGLFLMRLAPLKPGTAKIPEGKTPGALQLGFLPANMALDLFTLTRKNPSPSAPSSQTDSQQEFMNKFRSKFPTSAKQTPILRKETSSFRKETPSLRKESSSFRKSTSFINETDTSSLTSVWDTCNSFETRTNQFPLAIDTVDAYEEWHLSVKGFCEVNITIERIPLPDDPDDDVDPSGPFSGNFVDVLDIVSPQPEEERKAQERAAAAKKAGDSQG

SEQ ID NO: 26780 - DNA, 957 bp, Muscodor strobelii
  misc_feature: SGI EST ID NO. CUFF.63124.0
  misc_feature: Variant of the nucleotide sequence at SEQ ID NO 26778
ccaccctacgctatcctatcgcacacatggcgcgacgaggaagtcctatttcgacactgggagtctctgccgcgggaggaaatcgagaaaatggacggctatcagaagatctcctattgctgtagacaagcattctctgagggcttggagtgggtttgggtcgataccgtatgcattgacaagaccagtagtgctgagctgtccgaggccatcaattcaatgtttcagtggtatcgccgggcggctgtctgctacgcctatatcgatgatattccagcgggaattgaaagtttggatatgggattagagatagggaaaagtcgatggatcacacgaggttggacactgcaggaactgatcgcaccgtcggaagtgatgttctactctcaggactggatatatatcggtagacgttcagagctttcggcctctctcgcagctgtatcacagattgacgagccgtacctcaaaggccgaaatcacagtctggcaagtatagcacagcgaatgtcttgggcctcgagacgtaacacttctcgaaaagaggatgaagcatactgtcttttgggtatttttgacgtaaacatgccccttatatacggagagggcgtgagagcttttcagcggcttcaagaactaattatgcatgaattcccagaagatcattccttgtttgcttggggcaaggttgtgacagactactcgaagctggtctacgacacggaacaaatatggggttccaaacgcatcgaatacaatcctgagttggctgatgataactacttgggcctcctagccgaaagtccttcggctttcaaagactctggtcggttcatcacagctcctcacgcagcagcctttttcagtcaacgcttcggcgcgctacctcccatacctgtggttcatgggagacaggccgttaaggttgaactgatcgatctcaagttcgtagtacgg

SEQ ID NO: 26781 - DNA, 1410 bp, Muscodor strobelii
  misc_feature: SGI cDNA ID NO. 569163
  misc_feature: Encodes the peptide sequence at SEQ ID NO 26782
atgcatgaattcccagaagatcattccttgtttgcttggggcaaggttgtgacagactactcgaagctggtctacgacacggaacaaatatggggttccaaacgcatcgaatacaatcctgagttggctgatgataactacttgggcctcctagccgaaagtccttcggctttcaaagactctggtcggttcatcacagctcctcacgcagcagcctttttcagtcaacgcttcggcgcgctacctcccatacctgtggttcatgggagacaggccgttaaggttgaactgatcgatctcaagttcgtagtacggcacgctgtcttccatttgaagcgtcataaactggctcagctacgctatgttaaacatgctatgcttctctgcggacattgggatgaagccggcgagaaattccacttcgtcatcctacccctaacctcaggcgctatccgcgccgcccgaacagccgaaatagtagtcaacgaccaattcgttgacgctttcgaccccaacacctacggcatccgtccctacttctacagacaagacttcatcataggccccgtaccaccaatccacaccggcaaaggcgggatattaatcaagcgatacacatcatggaaagcaaggggggatttcatagtcctctccgaaatcaacagcagaatccaagacggctgggtaaatctacgaagcacattcttcggtccaatatgtgcattcgtccacctcatgacacctgacaagaaacgcggtttcgggctgttcctcatgcgtcttgcaccattgaaaccggggactgcgaagatacccgagggaaagacaccaggggctctacagcttggattcttacctgctaatatggctcttgacttattcacgctcactcgaaagaacccgtctccatctgcaccttcctcacaaacggatagtcaacaggagttcatgaataaatttcggtccaagtttcccacgagtgctaaacaaactccaattcttaggaaagaaacctcaagctttaggaaagaaactccaagtctgaggaaagaatcctcaagcttcaggaaatccacctcgttcataaacgagacggatacgtcgagtctgacgagcgtatgggatacatgtaactcgttcgaaacacgcaccaaccaattcccactcgcgatagacacggtagatgcctatgaagagtggcatctgagcgtgaagggcttctgcgaggtcaatatcacgatcgagcgcatacccttacctgacgacccagacgacgacgtggatcctagcgggccgtttagtgggaatttcgtggatgtgctggatattgttagtccgcagcctgaagaagagaggaaggcccaggaacgagctgcggctgctaagaaggctggggatagtcaggggtga

SEQ ID NO: 26782 - protein, 469 aa, Muscodor strobelii
  misc_feature: SGI Peptide ID NO. 569163
  misc_feature (1)..(205): NCBI GI: 145607537 Blast Desc: MGG_12213 [Magnaporthe grisea 70-15] gi|145015064|gb|EDJ99632.1| MGG_12213 [Magnaporthe grisea 70-15]
MHEFPEDHSLFAWGKVVTDYSKLVYDTEQIWGSKRIEYNPELADDNYLGLLAESPSAFKDSGRFITAPHAAAFFSQRFGALPPIPVVHGRQAVKVELIDLKFVVRHAVFHLKRHKLAQLRYVKHAMLLCGHWDEAGEKFHFVILPLTSGAIRAARTAEIVVNDQFVDAFDPNTYGIRPYFYRQDFIIGPVPPIHTGKGGILIKRYTSWKARGDFIVLSEINSRIQDGWVNLRSTFFGPICAFVHLMTPDKKRGFGLFLMRLAPLKPGTAKIPEGKTPGALQLGFLPANMALDLFTLTRKNPSPSAPSSQTDSQQEFMNKFRSKFPTSAKQTPILRKETSSFRKETPSLRKESSSFRKSTSFINETDTSSLTSVWDTCNSFETRTNQFPLAIDTVDAYEEWHLSVKGFCEVNITIERIPLPDDPDDDVDPSGPFSGNFVDVLDIVSPQPEEERKAQERAAAAKKAGDSQG

SEQ ID NO: 26783 - DNA, 849 bp, Muscodor strobelii
  misc_feature: SGI cDNA ID NO. 569164
  misc_feature: Encodes the peptide sequence at SEQ ID NO 26784
atgtcttccaccgaggacgtcaaggaggccaccgccatgtcccactccgccgctcccgtcgacgacgacgagcctgcagcccccgcagaggacgagaccctcgacctccccaagaagaagaagaaggccaagaagatggagaacggcgaagacggcgacgccccagccgacggcgcacctgacggtctcgacttgaccctcaagaaaaagaagaagaagaagcccaagaccgagggtgcagaagacgacttcgccgccaaggtcgccgcgcttgatctcgacaaggacggtggagcggacggcaaggccgacgagcaggccggcgacatggacaagggcaccggcatatggcagcacgacgaggccgtcgccatcaagtacgacctcctcctcgaccgcttcttcaacctgctcgccgagaagaaccccgaccatgcctccagcggctcgcggagctacaagatcccgcccccacagtgtctccgtgaaggcaacaagaagaccatcttcgccaacctcgaggagatcaccaagcgcatgaagcggagctccgagcacgtcactgcttacctctttgccgagttgggaaccaacggctcagtcgacggaagcaagagactagtcatcaagggtcgtttccagcagaagcagttagagaacgtcttgcgaaaatacatcatcgaatacgtcacctgtaaaacctgccgatctgcagataccgacctcagcaagggagagaaccgtttgtattttcttacctgcaactcctgcggctcgcgtcgttctgtcacagccatcaagtccggttttactgcccaggtcggcaagaggaaaaagatgcaaggttaa

SEQ ID NO: 26784 - protein, 282 aa, Muscodor strobelii
  misc_feature: SGI Peptide ID NO. 569164
  misc_feature (133)..(262): Pfam Id: PF01873 Pfam Desc: Domain found in IF2B/IF5
  misc_feature (23)..(282): NCBI GI: 156044608 Blast Desc: SS1G_10408 [Sclerotinia sclerotiorum 1980] gi|154694796|gb|EDN94534.1| SS1G_10408 [Sclerotinia sclerotiorum 1980]
  misc_feature (57)..(282): NCBI GI: 85092012 Blast Desc: eukaryotic translation initiation factor 2 beta subunit [Neurospora crassa OR74A] gi|21622307|emb|CAD37010.1| translation initiation factor eIF-2 beta chain [Neurospora factor
  misc_feature (3)..(280): NCBI GI: 145610941 Blast Desc: MGG_00789 [Magnaporthe grisea 70-15] gi|145018275|gb|EDK02554.1| MGG_00789 [Magnaporthe grisea 70-15]
  misc_feature (47)..(282): NCBI GI: 261351784 Blast Desc: eukaryotic translation initiation factor 2 subunit beta [Verticillium albo-atrum VaMs.102]
  misc_feature (49)..(281): NCBI GI: 116179862 Blast Desc: CHGG_00559 [Chaetomium globosum CBS 148.51] gi|88184856|gb|EAQ92324.1| CHGG_00559 [Chaetomium globosum CBS 148.51]
  misc_feature (63)..(282): NCBI GI: 154298128 Blast Desc: eukaryotic translation initiation factor eIF-2 [Botryotinia fuckeliana B05.10] gi|150858215|gb|EDN33407.1| eukaryotic translation initiation factor eIF-2 [Botryotinia
  misc_feature (62)..(282): NCBI GI: 256732110 Blast Desc: NECHADRAFT_41007 [Nectria haematococca mpVI 77-13-4]
  misc_feature (84)..(279): NCBI GI: 171691695 Blast Desc: protein product [Podospora anserina] gi|170945796|emb|CAP72596.1| protein product [Podospora anserina]
  misc_feature (80)..(282): NCBI GI: 169617453 Blast Desc: SNOG_11906 [Phaeosphaeria nodorum SN15] gi|160703412|gb|EAT80950.2| SNOG_11906 [Phaeosphaeria nodorum SN15]
  misc_feature (80)..(282): NCBI GI: 189188068 Blast Desc: eukaryotic translation initiation factor 2 subunit beta [Pyrenophora tritici-repentis Pt-1C-BFP] gi|187971979|gb|EDU39478.1| eukaryotic translation initiation 2
MSSTEDVKEATAMSHSAAPVDDDEPAAPAEDETLDLPKKKKKAKKMENGEDGDAPADGAPDGLDLTLKKKKKKKPKTEGAEDDFAAKVAALDLDKDGGADGKADEQAGDMDKGTGIWQHDEAVAIKYDLLLDRFFNLLAEKNPDHASSGSRSYKIPPPQCLREGNKKTIFANLEEITKRMKRSSEHVTAYLFAELGTNGSVDGSKRLVIKGRFQQKQLENVLRKYIIEYVTCKTCRSADTDLSKGENRLYFLTCNSCGSRRSVTAIKSGFTAQVGKRKKMQG

SEQ ID NO: 26785 - DNA, 9681 bp, Muscodor strobelii
  misc_feature: SGI EST ID NO. CUFF.63821.1
  misc_feature: Variant of the nucleotide sequence at SEQ ID NO 26783
gaaattgtttaggaggtttagctattgacgtttagaataatggatacataatcgccacgcggtataacagagacgaagttggatgccagcatcggacacatctcaaatcctccccatctcatggcgcttgggtgatattgccttttgggggacgcacgtaccgatggagagataattgcagaaagattactacagtacactccgcgtatatcactcctttcgccttaagcaattgacaaacgaaatattagctgttgaatctagtcgatttatataccaagaaaagtcggttgtccaataacccaagagagattcgtcgtgaagcagtttgctccgcctggaccattattgagagggtagatgttttgcctataaggcaatatggtttcgctagtaggtaactcttggccattagtcgttactagactttccgacgtgtggtgagatggttcggtatgttgctggagatgatctggccgttttggcattgagattctattccgcatcagctgtaatcaactcaacaacgaaaaggtttgcgacatgaacactcacctaacgacacaacgaggttgatctctatgcaatcaagtaattctgatggattggagacgaaggtggcatatgtctcccctttgtcatcttgacagaacctcgcacggttttcaaagaatgtctgattccgccagtgtaaaatacctcctgccacgaagaatgtcgtacgtatcgtgccctgagagttgccgcgcaagggtatgaaagtaaagcctggatccgttgagacgggcactccatcaatcatgagctgacttctgctcaattcgaatggggtggcatcgctgcaggacaccctatcagcaattcctgaaccatcaacgaatccattgcggactgcctggcgtttcgctcgagccgtttggccacgatcatctctgttgaaaggggcgacttttaggatgataggctcggcgatatcggtagttgctgatgcaggcaagctactttgggtacttgatatagaaccaaaggacgagattggagcggtggagttcgagaagggctcggggagggaggaattcctactaggtgccgatgaactgttcctggtgctctgtgatgacacggccgcttgtgctggtgtcgttgaggtcgtgacttcagtagaactggcggccgttgacagagtagcagaagttaaaggaatgctccccaaactattatttgaagagcttgaagatgtctcctgagcccctgagcttgcaacagtatctgaaattgtaggagaccgagacttggttgcgctacttgccgggattaaactttgcgtctcgctgttcgatgtactcgatactgtactaatgctctccgatgtgatgctgggattgctggaaattggctgggcacggctgctcgtgctatcaatgctcatcgtgtttgacgaactaataatgctatcggagctggttatgatattggatctgcttgtcatcgaggctggattcgtagagctagaagttatcgtgagagtactacttgatacagagcctgagctgggcatactgccactctcattactacttgtgctgtcgctggcggatgagctttgaggaattgtgattgtgatgatgacggtgcttagagtatcagtacttctagtgttgctcgagctaattatatgttactaataagggactgaatacgaggagttgatatttattgcggtgttggcgcttgaaacccggggacaagagatgggtgaaattgagctcgagggagaggcggaggaagaaaggagggcagtggggccatatacctgacagaagactgtgcgctactcgaagtggcaatactaccgctcgaaataatatcagagctgctgaatgacgatgcgctgctagacgtaatatcagagctactagatgatttggaactacttgatgatgaagaggcgttggaagactcgctgctgcttgacgacgaaatactactagaagaatctgcactaatcatgctggagctgctcgtgctggagctactcgagatgcttgaactggaactggaactcgaactctgacttgaagaagtggacgagctgtcactggaactcgtcgaggcgctggaactactagaagtgctttcagtgctgcttgaagattgcgaactagacaaattgcttgtcgaactgctctggacgcttgaagagctgctgtcagcggtgctcattgcactcgaggtcgattcgctgctgctgctactgctgctacttgagtcgctactactccctgaactgctactctctgcactactactggagactgagcttgagctggatgattcggcgctggacgatggttctgtactactagtacttgtaacgatgctgctgctgctgctacttgaactggttgagtccgtgcttgctggcgcttggctcgatgaagaagaagaggatgactctgtactgctgatggtgaccgagctgctgcttgaagatgaattactaggctccacactactcgaagactcttttctggatgattctgaactggtggattgaatactgctgctgctactttcagaactgctcggctccgcactgcttgacgatgccgacgatgacgcagaaccggatgacgcagaactggatgacgcagaactggatgatgacgaacttgaggattctgaagaagaagtactttgggagctgctagtatcagaacttgtcgatacgctactactcgtactccccgagctactgctgctttctgaggagctactcgaatctgagcttgttgaagcggaactcgaacttggggtctccgtgctcgaagactctgagcttgaactggccgagcttgatggttcactgctacttgagctctctgcgctgctgctgctgctgctgctggagctttcagacgcggaactagacgattcagaacttgtcggcgccgaactagaactactcgagctcgacgaactagacacatctgaactcgtcggttccaaactggtagatactgcgctagacgaggtagaagattctgagctcgaggcactcgaactactcgatccggaactgtttatactactagagctgctgctgctctcggaagacgagctagatgtgtcagaactcgtagacgcagagctggatgcctggctactcgaggtactctcgctgctgctcgatgatgaactatcactcgtactgctgctactttctgagctgcttcctgctgatgatgtgctgcttgaggatacactactagaagaagtcgaatctgcaacagaagaacttgtgctctcggagctggtagtgcttgagcttgttgaactcgaactaggacctaacaaccttgtcaacgatgctagacttcagtctctggcaacagaacatctgtgcaagaccaggctgaagatttctttatatcacaaggaaaatcctcaggacttaccacctgtgcagccatactatagttctcatgattagccaaatcctatatgtgtctacatatcatcatcatttatttgaagtaataataactcacagtccgagtcgtgaccgaattggtataggaagtataccacggcccagtggtagcagactctaccacagcaaaaattagcgctcgattttgaccagcacaattctgctgtgagcctgttcccaagcatggctcgttgcaatagtccatagcaatgggattcaacccagacaaaacgctatcgccacaaatacaccttgttccagtccgtggaccactcacggcggcccacgagcttcccattgcatagcaataattggcacatttatcaacgtcaatattatccggtgtgccagacggcgccgcagtcgcgatcgcggcggtagaagagaggactttgagatcgttgatatcataacaaccatagttgatcattgatgatgttacggcgccacttgtcacggtagcagttgcgacgaaagaagctgatctcgtaattgtaggattcgccactccaccagttgagtactgagtgaatgagttcctgtgggctgagaggctcgccggagttgctatacacgtatattcggtcgacactggcgtcgcaggaccaccgacttgctcgatgggggcaaatccaggtattcgtgggatctcacatcctataagacgcgggttggcatatacgggatagatttgataattaggatcgccgcaacacgttgtgcctcctgtagttggatcgcaagtacttgtccaaattagcaccattgcgtgaaatctccctcctggatacgaaccgggagcccgtgctgcaatcgacagcacatttcttgtcattgggattagcgtcattcacgctgtcgtcgtatgatcttgatccaacaccaaaatctgttccacaatagcatctgatgggtttatctgcattactagtcaagtcaactactgtcgtctctccaaagtatcattggcccatttaccctccgtctctgaacatgtaggtcaaagggaatccatattgcgcacagttggcaagacatgcagctgggttcgcttgttgtgtattactagccggatcatctgaggggagatttggtttcgcaaaacaaccaagatatccggcactactagcgacgtctgagaagccagctgcaatgagagcggtctctggctcaaaagaaggatcaacatagagacgtgcccgtcctcctccgttcggctggccacaattctctaatgcatcgccagaacaaggatttgggtcgggaacagtcttgcaggtttgatcagaagacctcgcagtgatgagtgagccaagggccgagccgcaacgacagtttcgattgtagagtgatgcgtacttgaagccatgtgcgcgacacgcagctacgcagaagttgggtgtcgccgtactgttaatgttgttgccacccccatcatagtcggcatatgaccttgacgcatcgctgccaatgaacccgttctgaacggcatatgtgaatggatcgttggaaacatcgtaacagcctagctcctggaagttttgcgaagcagaacaagtgaagggcttgaagaaatatccctgagcgtcgacagtcccggaaaagccgcaagacaagagcgcaacgactacgatgctcctcttccagacgcccatggcgacgggtcaggtgaggtaagacacctggggctgtgaaaacgcatctatggcgattatgaagttttcaaatacgggcagacttgaccgacataccaagggatagtgtcaaaagatagtggacgtttcgtccgctaaggagatgttctatcgaacatagttgatctcgtaaacatgatcatagcgggatactgtctgatctctcaaaaccgtatgggggcaggaatacaatgttatgacctcttggcaacttgaagatggcatatatagatagcctagatgaaggaatgctgggttggcctggagttccaaggctgtctctggtcggtcaactctaggtgtgaaacccattgctagtcggttttgagactgagacctgtcctagtcaattctcctaaagcagtaacgccacacctgagtattgactgcccgggatagtcgttgtcgtcattttgtcgtagaagctatggatcacgcagtgctggacgtagtgatatcagcgatatttcttgctcagagtgccgctcagaagactaggagcactcaatcgcaaaatacatgtcaagatttaatacagagactttgatccctaacccctttggaaaatttagattgtgacatttagcttggtgacaggccaattccatcaagatggattgttcgattcatattgatctagataattgcacgattggtggcgtctcggtcaagaatttggacatcgagtggtaacgagtttgcatcttctcgagacaatagcgtgccgcagaaaagcgagatgcggttgtcgatggctgtgatcgagcggagtggatatggctacctaggtatgttatgtgcagcttcatggccatagtggacatgggcggccctgggttctggcggagccgcgtctgtttcctttgtttttcaagtacatgattctatttcgttataacgttgctgcggcttcaacggcaccgacagctttgaacttcttcttgttggtccagttgatctcgacattgtgtgtccactccatgtatcttgcccagcctagtcgggggtcagcaggtgggtaagggggttgtagcggttcacggcgcgatggacatactccaatatgcaaacttgcgaccaaagtacttgccagcaaaggggactatgatcatggtcagaagaagctggagctgttccaagctctgctcccactctttctgggcatcgtactcgtcgtcagactcgtagctctcggtggagctggagggcagcgaatcgacgtcgtcagtgtcggatgtcgaggtgtcggggatggcaaaggagtcggagagagacatggctggagccgggagtcaggggtcgggaggcggaagagtgtagcgagtgagggagaagggcgcagcggtcgggacgctacctggcgcaggacgggtgatgcatgggatctcgaggaccggctatcgctatgagaactgtggcaaccaaggaccgaggctcgggctggtcaaagaggaagaggcggtcgaagagacctgtcttgtcaatgtcgttgtccaacttgaagtcgctgcgaaggccggacggagctaacggcgcaatgggagctagcacggcattggcggtccgttggtggttgaacaagctgtcgccagctgcctcggatggtgtgagcaatgacgcatcgtcgcattcacgttcataccttacgtctttggcgcggccaacccggaagtcctgggttactaaaggcagacccaatcttgctcagtgcaatgtgagtcagtcttgtcagttaggttaggtactagcattgaacatggaactctgggccagcggcgccaacgcattcgcaaatcgcaacgacacttggaaggcgacaagacattgatgctttaatctttcccaaatttgcctcctctcttctcttctccctcttcgtcccaactccacactgtcgaccgccaaatctcacgcaatactacgaacggtagctcgagtattctcgcctcttctacgaccatattcagcgacagcccacagcagcgcacagcagggccgagcactgctaaacgtcagatattcgagtcagggtcggaaagcatggatgccacagagacagtaggttcaagccgtttcttctcccgtttccaccttgacgccgcctcttgcgcgttgctttgtcctttgttcttctgcaactgtcaggcacacacaccactgctaggtcgtcctgtgtatgctggaagtctgtaacccctctacccgctctgtccgttctgtccgctctgtccgcccagcccagccaaacccgtcccgtctgcagtctgagcttggctttgggatatcagtcatcttgtaggtgcaggtgcaagacaagaaagacggaccaagcccttttctatctgtttgaggtattcatgtccccataccatccccattcattcccgtctacaatccaccactgcccgccgcctgagtccggtcgggacccccaggccctcttgcccctccaatcagcccaccccgcccgcttctcttagctctgtgcgccccaccaaaaagcacctctcctccagaaattgcagacgtcggcagcgaaaagagtcacccacgagtcacccacgagtcaccgtcattgccattgcccgttccactacttctgactggctgctatcctcgcgcctctctcattatttccacccgcatcctccgccacacgcacacctcgatatctgacactttctcacctgtcacattctcccgtcgtcgtctgtttgtgtgcattccccatttcgcctgcacctttacaccttgcacatccctacccctccgcccgctgctgtgcttctttcttcgtgtcccaaattccagcgacacgcagcaacagcaacacacgcagccaaactaaaaagattgcccgctacccaggaccctcggccgtcccttcctgatcgcaaacagcgcaagtccgtcgtgttcagctccgaagccgtcgtagtccagcccgacggtcaagtcaccatgtcttccaccgaggacgtcaaggaggccaccgccatgtcccactccgccgctcccgtcgacgacgacgagcctgcagcccccgcagaggacgagaccctcgacctccccaagaagaagaagaaggccaagaagatggagaacggcgaagacggcgacgccccagccgacggcgcacctgacggtctcgacttgaccctcaagaaaaagaagaagaagaagcccaagaccgagggtgcagaagacgacttcgccgccaaggtcgccgcgcttgatctcgacaaggacggtggagcggacggcaaggccgacgagcaggccggcgacatggacaagggcaccggcatatggcagcacgacgaggccgtcgccatcaagtacgacctcctcctcgaccgcttcttcaacctgctcgccgagaagaaccccgaccatgcctccagcggctcgcggagctacaagatcccgcccccacagtgtctccgtgaaggcaacaagaagaccatcttcgccaacctcgaggagatcaccaagcgcatgaagcggagctccgagcacgtcactgcttacctctttgccgagttgggaaccaacggctcagtcgacggaagcaagagactagtcatcaagggtcgtttccagcagaagcagttagagaacgtcttgcgaaaatacatcatcgaatacgtcacctgtaaaacctgccgatctgcagataccgacctcagcaagggagagaaccgtttgtattttcttacctgcaactcctgcggctcgcgtcgttctgtcacagccatcaagtccggttttactgcccaggtcggcaagaggaaaaagatgcaaggttaaagagattcacgatgatgattcgacgcttcatgtttccctccgtagcatggcatctttggcgtcccggttcccaaacattctggcatggttcatggggtcgctctataggacgagactcatggatggcggcctacgtcatggttacgacacactgcggaactgcccgtactgaattctagattccatgaggcattagagcagccatgtcgattacgagaggcaacctgaaagctcctgagagctaatagactcaggtattcatattctgaatatataccattcattgcggcgcatgcggcgtttccatcatgtgatgaagaaggagttgatattgtgaccaccgtgatgggggccggacgcctggatctaggaattgcggtcatgtagctcagtagtatgaaaagctgaatactgaataccaatttcttaccacgaaacctgatacagatattcttagtttgcatgattctatcggccacatcatggagcgtctctgaaaaaagttccaatttttagaacggagtcttggcttaaagaccaatgtacacttgtaatgtgggcaggacagtgtgtaccattgtataagaattattcaacgtatcaaaaccatcgccttcaggcaacacggtcattaccggtactttggtatagcggtacaattgagaatgaatcaacagctgggcg

SEQ ID NO: 26786 - DNA, 324 bp, Muscodor strobelii
  misc_feature: SGI cDNA ID NO. 569165
  misc_feature: Encodes the peptide sequence at SEQ ID NO 26787
atgtctctctccgactcctttgccatccccgacacctcgacatccgacactgacgacgtcgattcgctgccctccagctccaccgagagctacgagtctgacgacgagtacgatgcccagaaagagtgggagcagagcttggaacagctccagcttcttctgaccatgatcatagtcccctttgctggcaagtactttggtcgcaagtttgcatattggagctgggcaagatacatggagtggacacacaatgtcgagatcaactggaccaacaagaagaagttcaaagctgtcggtgccgttgaagccgcagcaacgttataa

SEQ ID NO: 26787 - protein, 107 aa, Muscodor strobelii
  misc_feature: SGI Peptide ID NO. 569165
  misc_feature (1)..(107): NCBI GI: 261351785 Blast Desc: conserved [Verticillium albo-atrum VaMs.102]
  misc_feature (2)..(107): NCBI GI: 171691693 Blast Desc: protein product [Podospora anserina] gi|170945795|emb|CAP72595.1| protein product [Podospora anserina]
  misc_feature (16)..(107): NCBI GI: 256731731 Blast Desc: [Nectria haematococca mpVI 77-13-4]
  misc_feature (25)..(107): NCBI GI: 39974131 Blast Desc: MGG_00788 [Magnaporthe grisea 70-15] gi|145018276|gb|EDK02555.1| MGG_00788 [Magnaporthe grisea 70-15]
  misc_feature (24)..(107): NCBI GI: 46136903 Blast Desc: FG09967.1 [Gibberella zeae PH-1]
  misc_feature (1)..(107): NCBI GI: 169617455 Blast Desc: SNOG_11907 [Phaeosphaeria nodorum SN15] gi|111059831|gb|EAT80951.1| SNOG_11907 [Phaeosphaeria nodorum SN15]
  misc_feature (12)..(107): NCBI GI: 159127764 Blast Desc: conserved [Aspergillus fumigatus A1163]
  misc_feature (12)..(107): NCBI GI: 146323364 Blast Desc: conserved [Aspergillus fumigatus Af293] gi|129558327|gb|EAL92718.2| conserved [Aspergillus fumigatus Af293]
  misc_feature (12)..(107): NCBI GI: 119492331 Blast Desc: NFIA_068540 [Neosartorya fischeri NRRL 181] gi|119411741|gb|EAW21684.1| conserved [Neosartorya fischeri NRRL 181]
  misc_feature (18)..(107): NCBI GI: 115384858 Blast Desc: conserved [Aspergillus terreus NIH2624] gi|114196668|gb|EAU38368.1| conserved [Aspergillus terreus NIH2624]
MSLSDSFAIPDTSTSDTDDVDSLPSSSTESYESDDEYDAQKEWEQSLEQLQLLLTMIIVPFAGKYFGRKFAYWSWARYMEWTHNVEINWTNKKKFKAVGAVEAAATL

SEQ ID NO: 26788 - DNA, 9495 bp, Muscodor strobelii
  misc_feature: SGI EST ID NO. CUFF.63820.0
  misc_feature: Variant of the nucleotide sequence at SEQ ID NO 26786
cgcccagctgttgattcattctcaattgtaccgctataccaaagtaccggtaatgaccgtgttgcctgaaggcgatggttttgatacgttgaataattcttatacaatggtacacactgtcctgcccacattacaagtgtacattggtctttaagccaagactccgttctaaaaattggaacttttttcagagacgctccatgatgtggccgatagaatcatgcaaactaagaatatctgtatcaggtttcgtggtaagaaattggtattcagtattcagcttttcatactactgagctacatgaccgcaattcctagatccaggcgtccggcccccatcacggtggtcacaatatcaactccttcttcatcacatgatggaaacgccgcatgcgccgcaatgaatggtatatattcagaatatgaatacctgagtctattagctctcaggagctttcaggttgcctctcgtaatcgacatggctgctctaatgcctcatggaatctagaattcagtacgggcagttccgcagtgtgtcgtaaccatgacgtaggccgccatccatgagtctcgtcctatagagcgaccccatgaaccatgccagaatgtttgggaaccgggacgccaaagatgccatgctacggagggaaacatgaagcgtcgaatcatcatcgtgaatctctttaaccttgcatctttttcctcttgccgacctgggcagtaaaaccggacttgatggctgtgacagaacgacgcgagccgcaggagttgcaggtaagaaaatacaaacggttctctcccttgctgaggtcggtctgaaggttgcagggtcagtatatatatgctagaaagaagagataagtcgctgcgagagactcacatctgcagatcggcaggttttacaggtgacgtattcgatgatgtctgcatgtaaagtcaatatggactgtcatggtaggaggatgccgctcgaggctgaggcgactcacattttcgcaagacgttctctaactgcttctgctggaaacgacccttgatgactagtctcttgcttccgtcgactgagccgttggttcccaactcggcaaagaggtaagcagtgacgtgctcggagctccgcttcatgcgcttggtgatctcctcgaggttggcgaagatggtcttcttgttgccttcacggagacactgtgggggcgggatcttgtagctccgcgagccgctggaggcatggtcggggttcttctcggcgagcaggttgaagaagcggtcgaggaggaggtcgtacttgatggcgacggcctcgtcgtgctgccatatgccggtgcccttgtccatgtcgccggcctgctcgtcggccttgccgtccgctccaccgtccttgtcgagatcaagcgcggcgaccttggcggcgaagtcgtcttctgcaccctcggtcttgggcttcttcttcttctttttcttgagggtcaagtcgagaccgtcaggtgcgccgtcggctggggcgtcgccgtcttcgccgttctccatcttcttggccttcttcttcttcttggggaggtcgagggtctcgtcctctgcgggggctgcaggctcgtcgtcgtcgacgggagcggcggagtgggacatggcggtggcctccttgacgtcctcggtggaagacatggtgacttgaccgtcgggctggactacgacggcttcggagctgaacacgacggacttgcgctgtttgcgatcaggaagggacggccgagggtcctgggtagcgggcaatctttttagtttggctgcgtgtgttgctgttgctgcgtgtcgctggaatttgggacacgaagaaagaagcacagcagcgggcggaggggtagggatgtgcaaggtgtaaaggtgcaggcgaaatggggaatgcacacaaacagacgacgacgggagaatgtgacaggtgagaaagtgtcagatatcgaggtgtgcgtgtggcggaggatgcgggtggaaataatgagagaggcgcgaggatagcagccagtcagaagtagtggaacgggcaatggcaatgacggtgactcgtgggtgactcgtgggtgactcttttcgctgccgacgtctgcaatttctggaggagaggtgctttttggtggggcgcacagagctaagagaagcgggcggggtgggctgattggaggggcaagagggcctgggggtcccgaccggactcaggcggcgggcagtggtggattgtagacgggaatgaatggggatggtatggggacatgaatacctcaaacagatagaaaagggcttggtccgtctttcttgtcttgcacctgcacctacaagatgactgatatcccaaagccaagctcagactgcagacgggacgggtttggctgggctgggcggacagagcggacagaacggacagagcgggtagaggggttacagacttccagcatacacaggacgacctagcagtggtgtgtgtgcctgacagttgcagaagaacaaaggacaaagcaacgcgcaagaggcggcgtcaaggtggaaacgggagaagaaacggcttgaacctactgtctctgtggcatccatgctttccgaccctgactcgaatatctgacgtttagcagtgctcggccctgctgtgcgctgctgtgggctgtcgctgaatatggtcgtagaagaggcgagaatactcgagctaccgttcgtagtattgcgtgagatttggcggtcgacagtgtggagttgggacgaagagggagaagagaagagaggaggcaaatttgggaaagattaaagcatcaatgtcttgtcgccttccaagtgtcgttgcgatttgcgaatgcgttggcgccgctggcccagagttccatgttcaatgctagtacctaacctaactgacaagactgactcacattgcactgagcaagattgggtctgcctttagtaacccaggacttccgggttggccgcgccaaagacgtaaggtatgaacgtgaatgcgacgatgcgtcattgctcacaccatccgaggcagctggcgacagcttgttcaaccaccaacggaccgccaatgccgtgctagctcccattgcgccgttagctccgtccggccttcgcagcgacttcaagttggacaacgacattgacaagacaggtctcttcgaccgcctcttcctctttgaccagcccgagcctcggtccttggttgccacagttctcatagcgatagccggtcctcgagatcccatgcatcacccgtcctgcgccaggtagcgtcccgaccgctgcgcccttctccctcactcgctacactcttccgcctcccgacccctgactcccggctccagccatgtctctctccgactcctttgccatccccgacacctcgacatccgacactgacgacgtcgattcgctgccctccagctccaccgagagctacgagtctgacgacgagtacgatgcccagaaagagtgggagcagagcttggaacagctccagcttcttctgaccatgatcatagtcccctttgctggcaagtactttggtcgcaagtttgcatattggagctgggcaagatacatggagtggacacacaatgtcgagatcaactggaccaacaagaagaagttcaaagctgtcggtgccgttgaagccgcagcaacgttataacgaaatagaatcatgtacttgaaaaacaaaggaaacagacgcggctccgccagaacccagggccgcccatgtccactatggccatgaagctgcacataacatacctaggtagccatatccactccgctcgatcacagccatcgacaaccgcatctcgcttttctgcggcacgctattgtctcgagaagatgcaaactcgttaccactcgatgtccaaattcttgaccgagacgccaccaatcgtgcaattatctagatcaatatgaatcgaacaatccatcttgatggaattggcctgtcaccaagctaaatgtcacaatctaaattttccaaaggggttagggatcaaagtctctgtattaaatcttgacatgtattttgcgattgagtgctcctagtcttctgagcggcactctgagcaagaaatatcgctgatatcactacgtccagcactgcgtgatccatagcttctacgacaaaatgacgacaacgactatcccgggcagtcaatactcaggtgtggcgttactgctttaggagaattgactaggacaggtctcagtctcaaaaccgactagcaatgggtttcacacctagagttgaccgaccagagacagccttggaactccaggccaacccagcattccttcatctaggctatctatatatgccatcttcaagttgccaagaggtcataacattgtattcctgcccccatacggttttgagagatcagacagtatcccgctatgatcatgtttacgagatcaactatgttcgatagaacatctccttagcggacgaaacgtccactatcttttgacactatcccttggtatgtcggtcaagtctgcccgtatttgaaaacttcataatcgccatagatgcgttttcacagccccaggtgtcttacctcacctgacccgtcgccatgggcgtctggaagaggagcatcgtagtcgttgcgctcttgtcttgcggcttttccgggactgtcgacgctcagggatatttcttcaagcccttcacttgttctgcttcgcaaaacttccaggagctaggctgttacgatgtttccaacgatccattcacatatgccgttcagaacgggttcattggcagcgatgcgtcaaggtcatatgccgactatgatgggggtggcaacaacattaacagtacggcgacacccaacttctgcgtagctgcgtgtcgcgcacatggcttcaagtacgcatcactctacaatcgaaactgtcgttgcggctcggcccttggctcactcatcactgcgaggtcttctgatcaaacctgcaagactgttcccgacccaaatccttgttctggcgatgcattagagaattgtggccagccgaacggaggaggacgggcacgtctctatgttgatccttcttttgagccagagaccgctctcattgcagctggcttctcagacgtcgctagtagtgccggatatcttggttgttttgcgaaaccaaatctcccctcagatgatccggctagtaatacacaacaagcgaacccagctgcatgtcttgccaactgtgcgcaatatggattccctttgacctacatgttcagagacggagggtaaatgggccaatgatactttggagagacgacagtagttgacttgactagtaatgcagataaacccatcagatgctattgtggaacagattttggtgttggatcaagatcatacgacgacagcgtgaatgacgctaatcccaatgacaagaaatgtgctgtcgattgcagcacgggctcccgtacttgcgatccaactacaggaggcacaacgtgttgcggcgatcctaattatcaaatctatcccgtatatgccaacccgcgtcttataggatgtgagatcccacgaatacctggatttgcccccatcgagcaagtcggtggtcctgcgacgccagtgtcgaccgaatatacgtgtatagcaactccggcgagcctctcagcccacaggaactcattcactcagtactcaactggtggagtggcgaatcctacaattacgagatcagcttctttcgtcgcaactgctaccgtgacaagtggcgccgtaacatcatcaatgatcaactatggttgttatgatatcaacgatctcaaagtcctctcttctaccgccgcgatcgcgactgcggcgccgtctggcacaccggataatattgacgttgataaatgtgccaattattgctatgcaatgggaagctcgtgggccgccgtgagtggtccacggactggaacaaggtgtatttgtggcgatagcgttttgtctgggttgaatcccattgctatggactattgcaacgagccatgcttgggaacaggctcacagcagaattgtgctggtcaaaatcgagcgctaatttttgctgtggtagagtctgctaccactgggccgtggtatacttcctataccaattcggtcacgactcggactgtgagttattattacttcaaataaatgatgatgatatgtagacacatataggatttggctaatcatgagaactatagtatggctgcacaggtggtaagtcctgaggattttccttgtgatataaagaaatcttcagcctggtcttgcacagatgttctgttgccagagactgaagtctagcatcgttgacaaggttgttaggtcctagttcgagttcaacaagctcaagcactaccagctccgagagcacaagttcttctgttgcagattcgacttcttctagtagtgtatcctcaagcagcacatcatcagcaggaagcagctcagaaagtagcagcagtacgagtgatagttcatcatcgagcagcagcgagagtacctcgagtagccaggcatccagctctgcgtctacgagttctgacacatctagctcgtcttccgagagcagcagcagctctagtagtataaacagttccggatcgagtagttcgagtgcctcgagctcagaatcttctacctcgtctagcgcagtatctaccagtttggaaccgacgagttcagatgtgtctagttcgtcgagctcgagtagttctagttcggcgccgacaagttctgaatcgtctagttccgcgtctgaaagctccagcagcagcagcagcagcagcgcagagagctcaagtagcagtgaaccatcaagctcggccagttcaagctcagagtcttcgagcacggagaccccaagttcgagttccgcttcaacaagctcagattcgagtagctcctcagaaagcagcagtagctcggggagtacgagtagtagcgtatcgacaagttctgatactagcagctcccaaagtacttcttcttcagaatcctcaagttcgtcatcatccagttctgcgtcatccagttctgcgtcatccggttctgcgtcatcgtcggcatcgtcaagcagtgcggagccgagcagttctgaaagtagcagcagcagtattcaatccaccagttcagaatcatccagaaaagagtcttcgagtagtgtggagcctagtaattcatcttcaagcagcagctcggtcaccatcagcagtacagagtcatcctcttcttcttcatcgagccaagcgccagcaagcacggactcaaccagttcaagtagcagcagcagcagcatcgttacaagtactagtagtacagaaccatcgtccagcgccgaatcatccagctcaagctcagtctccagtagtagtgcagagagtagcagttcagggagtagtagcgactcaagtagcagcagtagcagcagcagcgaatcgacctcgagtgcaatgagcaccgctgacagcagctcttcaagcgtccagagcagttcgacaagcaatttgtctagttcgcaatcttcaagcagcactgaaagcacttctagtagttccagcgcctcgacgagttccagtgacagctcgtccacttcttcaagtcagagttcgagttccagttccagttcaagcatctcgagtagctccagcacgagcagctccagcatgattagtgcagattcttctagtagtatttcgtcgtcaagcagcagcgagtcttccaacgcctcttcatcatcaagtagttccaaatcatctagtagctctgatattacgtctagcagcgcatcgtcattcagcagctctgatattatttcgagcggtagtattgccacttcgagtagcgcacagtcttctgtcagctcgagcaacactagaagtactgatactctaagcaccgtcatcatcacaatcacaattcctcaaagctcatccgccagcgacagcacaagtagtaatgagagtggcagtatgcccagctcaggctctgtatcaagtagtactctcacgataacttctagctctacgaatccagcctcgatgacaagcagatccaatatcataaccagctccgatagcattattagttcgtcaaacacgatgagcattgatagcacgagcagccgtgcccagccaatttccagcaatcccagcatcacatcggagagcattagtacagtatcgagtacatcgaacagcgagacgcaaagtttaatcccggcaagtagcgcaaccaagtctcggtctcctacaatttcagatactgttgcaagctcaggggctcaggagacatcttcaagctcttcaaataatagtttggggagcattcctttaacttctgctactctgtcaacggccgccagttctactgaagtcacgacctcaacgacaccagcacaagcggccgtgtcatcacagagcaccaggaacagttcatcggcacctagtaggaattcctccctccccgagcccttctcgaactccaccgctccaatctcgtcctttggttctatatcaagtacccaaagtagcttgcctgcatcagcaactaccgatatcgccgagcctatcatcctaaaagtcgcccctttcaacagagatgatcgtggccaaacggctcgagcgaaacgccaggcagtccgcaatggattcgttgatggttcaggaattgctgatagggtgtcctgcagcgatgccaccccattcgaattgagcagaagtcagctcatgattgatggagtgcccgtctcaacggatccaggctttactttcatacccttgcgcggcaactctcagggcacgatacgtacgacattcttcgtggcaggaggtattttacactggcggaatcagacattctttgaaaaccgtgcgaggttctgtcaagatgacaaaggggagacatatgccaccttcgtctccaatccatcagaattacttgattgcatagagatcaacctcgttgtgtcgttagaatctcaatgccaaaacggccagatcatctccagcaacataccgaaccatctcaccacacgtcggaaagtctagtaacgactaatggccaagagttacctactagcgaaaccatattgccttataggcaaaacatctaccctctcaataatggtccaggcggagcaaactgcttcacgacgaatctctcttgggttattggacaaccgacttttcttggtatataaatcgactagattcaacagctaatatttcgtttgtcaattgcttaaggcgaaaggagtgatatacgcggagtgtactgtagtaatctttctgcaattatctctccatcggtacgtgcgtcccccaaaaggcaatatcacccaagcgccatgagatggggaggatttgagatgtgtccgatgctggcatccaacttcgtctctgttataccgcgtggcgattatgtatccattattctaaacgtcaatagctaaacctcctaaacaatttc

SEQ ID NO: 26789 - DNA, 681 bp, Muscodor strobelii
  misc_feature: SGI cDNA ID NO. 569166
  misc_feature: Encodes the peptide sequence at SEQ ID NO 26790
atgggcgtctggaagaggagcatcgtagtcgttgcgctcttgtcttgcggcttttccgggactgtcgacgctcagggatatttcttcaagcccttcacttgttctgcttcgcaaaacttccaggagctaggctgttacgatgtttccaacgatccattcacatatgccgttcagaacgggttcattggcagcgatgcgtcaaggtcatatgccgactatgatgggggtggcaacaacattaacagtacggcgacacccaacttctgcgtagctgcgtgtcgcgcacatggcttcaagtacgcatcactctacaatcgaaactgtcgttgcggctcggcccttggctcactcatcactgcgaggtcttctgatcaaacctgcaagactgttcccgacccaaatccttgttctggcgatgcattagagaattgtggccagccgaacggaggaggacgggcacgtctctatgttgatccttcttttgagccagagaccgctctcattgcagctggcttctcagacgtcgctagtagtgccggatatcttggttgttttgcgaaaccaaatctcccctcagatgatccggctagtaatacacaacaagcgaacccagctgcatgtcttgccaactgtgcgcaatatggattccctttgacctacatgttcagagacggagggtaa

SEQ ID NO: 26790 - protein, 226 aa, Muscodor strobelii
  misc_feature: SGI Peptide ID NO. 569166
  misc_feature (4)..(225): NCBI GI: 164428534 Blast Desc: NCU10264 [Neurospora crassa OR74A] gi|157072183|gb|EDO65373.1| [Neurospora crassa OR74A]
  misc_feature (6)..(219): NCBI GI: 171684831 Blast Desc: protein product [Podospora anserina] gi|170942376|emb|CAP68028.1| protein product [Podospora anserina]
  misc_feature (14)..(220): NCBI GI: 116193261 Blast Desc: [Chaetomium globosum CBS 148.51] gi|88182261|gb|EAQ89729.1| [Chaetomium globosum CBS 148.51]
  misc_feature (81)..(216): NCBI GI: 256722839 Blast Desc: NECHADRAFT_52943 [Nectria haematococca mpVI 77-13-4]
  misc_feature (51)..(218): NCBI GI: 46125721 Blast Desc: FG07238.1 [Gibberella zeae PH-1]
  misc_feature (85)..(216): NCBI GI: 256724920 Blast Desc: NECHADRAFT_34566 [Nectria haematococca mpVI 77-13-4]
  misc_feature (81)..(216): NCBI GI: 46139165 Blast Desc: FG11097.1 [Gibberella zeae PH-1]
  misc_feature (51)..(218): NCBI GI: 256733246 Blast Desc: NECHADRAFT_38105 [Nectria haematococca mpVI 77-13-4]
  misc_feature (89)..(217): NCBI GI: 145614322 Blast Desc: MGG_11335 [Magnaporthe grisea 70-15] gi|145021262|gb|EDK05391.1| MGG_11335 [Magnaporthe grisea 70-15]
MGVWKRSIVVVALLSCGFSGTVDAQGYFFKPFTCSASQNFQELGCYDVSNDPFTYAVQNGFIGSDASRSYADYDGGGNNINSTATPNFCVAACRAHGFKYASLYNRNCRCGSALGSLITARSSDQTCKTVPDPNPCSGDALENCGQPNGGGRARLYVDPSFEPETALIAAGFSDVASSAGYLGCFAKPNLPSDDPASNTQQANPAACLANCAQYGFPLTYMFRDGG

SEQ ID NO: 26791 - DNA, 9495 bp, Muscodor strobelii; identical to SEQ ID NO: 26788
  misc_feature: SGI EST ID NO. CUFF.63820.0
  misc_feature: Variant of the nucleotide sequence at SEQ ID NO 26789

SEQ ID NO: 26792 - DNA, 1356 bp, Muscodor strobelii
  misc_feature: SGI cDNA ID NO. 569167
  misc_feature: Encodes the peptide sequence at SEQ ID NO 26793
atgataggctcggcgatatcggtagttgctgatgcaggcaagctactttgggtacttgatatagaaccaaaggacgagattggagcggtggagttcgagaagggctcggggagggaggaattcctactaggtgccgatgaactgttcctggtgctctgtgatgacacggccgctttggacgagctgtcactggaactcgtcgaggcgctggaactactagaagtgctttcagtgctgcttgaagattgcgaactagacaaattgcttgtcgaactgctctggacgcttgaagagctgctgtcagcggtgctcattgcactcgaggtcgattcgctgctgctgctactgctgctacttgagtcgctactactccctgaactgctactctctgcactactactggagactgagcttgagctggatgattcggcgctggacgatgaactgctcggctccgcactgcttgacgatgccgacgatgacgcagaaccggatgacgcagaactggatgacgcagaactggatgatgacgaacttgaggattctgaagaagaagtactttgggagctgctagtatcagaacttgtcgatacgctactactcgtactccccgagctactgctgctttctgaggagctactcgaatctgagcttgttgaagcggaactcgaacttggggtctccgtgctcgaagactctgagcttgaactggccgagcttgatggttcactgctacttgagctctctgcgctgctgctgctgctgctgctggagctttcagacgcggaactagacgattcagaacttgtcggcgccgaactagaactactcgagctcgacgaactagacacatctgaactcgtcggttccaaactggtagatactgcgctagacgaggtagaagattctgagctcgaggcactcgaactactcgatccggaactgtttatactactagagctgctgctgctctcggaagacgagctagatgtgtcagaactcgtagacgcagagctggatgcctggctactcgaggtactctcgctgctgctcgatgatgaactatcactcgtactgctgctactttctgagctgcttcctgctgatgatgtgctgcttgaggatacactactagaagaagtcgaatctgcaacagaagaacttgtgctctcggagctggtagtgcttgagcttgttgaactcgaactaggacctaacaaccttgtcaacgatgctagacttcagtctctggcaacagaacatctgtgcaagaccaggctgaagatttctttatatcacaaggaaaatcctcaggacttaccacctgtgcagccatactatagttctcatgattag

SEQ ID NO: 26793 - protein, 451 aa, Muscodor strobelii
  misc_feature: SGI Peptide ID NO. 569167
MIGSAISVVADAGKLLWVLDIEPKDEIGAVEFEKGSGREEFLLGADELFLVLCDDTAALDELSLELVEALELLEVLSVLLEDCELDKLLVELLWTLEELLSAVLIALEVDSLLLLLLLLESLLLPELLLSALLLETELELDDSALDDELLGSALLDDADDDAEPDDAELDDAELDDDELEDSEEEVLWELLVSELVDTLLLVLPELLLLSEELLESELVEAELELGVSVLEDSELELAELDGSLLLELSALLLLLLLELSDAELDDSELVGAELELLELDELDTSELVGSKLVDTALDEVEDSELEALELLDPELFILLELLLLSEDELDVSELVDAELDAWLLEVLSLLLDDELSLVLLLLSELLPADDVLLEDTLLEEVESATEELVLSELVVLELVELELGPNNLVNDARLQSLATEHLCKTRLKISLYHKENPQDLPPVQPYYSSHD

SEQ ID NO: 26794 - DNA, 1212 bp, Muscodor strobelii
  misc_feature: SGI cDNA ID NO. 569168
  misc_feature: Encodes the peptide sequence at SEQ ID NO 26795
atgatttggaactacttgatgatgaagaggctggacgagctgtcactggaactcgtcgaggcgctggaactactagaagtgctttcagtgctgcttgaagattgcgaactagacaaattgcttgtcgaactgctctggacgcttgaagagctgctgtcagcggtgctcattgcactcgaggtcgattcgctgctgctgctactgctgctacttgagtcgctactactccctgaactgctactctctgcactactactggagactgagcttgagctggatgattcggcgctggacgatgaactgctcggctccgcactgcttgacgatgccgacgatgacgcagaaccggatgacgcagaactggatgacgcagaactggatgatgacgaacttgaggattctgaagaagaagtactttgggagctgctagtatcagaacttgtcgatacgctactactcgtactccccgagctactgctgctttctgaggagctactcgaatctgagcttgttgaagcggaactcgaacttggggtctccgtgctcgaagactctgagcttgaactggccgagcttgatggttcactgctacttgagctctctgcgctgctgctgctgctgctgctggagctttcagacgcggaactagacgattcagaacttgtcggcgccgaactagaactactcgagctcgacgaactagacacatctgaactcgtcggttccaaactggtagatactgcgctagacgaggtagaagattctgagctcgaggcactcgaactactcgatccggaactgtttatactactagagctgctgctgctctcggaagacgagctagatgtgtcagaactcgtagacgcagagctggatgcctggctactcgaggtactctcgctgctgctcgatgatgaactatcactcgtactgctgctactttctgagctgcttcctgctgatgatgtgctgcttgaggatacactactagaagaagtcgaatctgcaacagaagaacttgtgctctcggagctggtagtgcttgagcttgttgaactcgaactaggacctaacaaccttgtcaacgatgctagacttcagtctctggcaacagaacatctgtgcaagaccaggctgaagatttctttatatcacaaggaaaatcctcaggacttaccacctgtgcagccatactatagttctcatgattag

SEQ ID NO: 26795 - protein, 403 aa, Muscodor strobelii
  misc_feature: SGI Peptide ID NO. 569168
MIWNYLMMKRLDELSLELVEALELLEVLSVLLEDCELDKLLVELLWTLEELLSAVLIALEVDSLLLLLLLLESLLLPELLLSALLLETELELDDSALDDELLGSALLDDADDDAEPDDAELDDAELDDDELEDSEEEVLWELLVSELVDTLLLVLPELLLLSEELLESELVEAELELGVSVLEDSELELAELDGSLLLELSALLLLLLLELSDAELDDSELVGAELELLELDELDTSELVGSKLVDTALDEVEDSELEALELLDPELFILLELLLLSEDELDVSELVDAELDAWLLEVLSLLLDDELSLVLLLLSELLPADDVLLEDTLLEEVESATEELVLSELVVLELVELELGPNNLVNDARLQSLATEHLCKTRLKISLYHKENPQDLPPVQPYYSSHD

SEQ ID NO: 26796 - DNA, 948 bp, Muscodor strobelii
  misc_feature: SGI cDNA ID NO. 569169
  misc_feature: Reduced expression when VOC is produced
  misc_feature: Encodes the peptide sequence at SEQ ID NO 26797
atgagcattgatagcacgagcagccgtgcccagccaatttccagcaatcccagcatcacatcggagagcattagtacagtatcgagtacatcgaacagcgagacgcaaagtttaatcccggcaagtagcgcaaccaagtctcggtctcctacaatttcagatactgttgcaagctcaggggctcaggagacatcttcaagctcttcaaataatagtttggggagcattcctttaacttctgctactctgtcaacggccgccagttctactgaagtcacgacctcaacgacaccagcacaagcggccgtgtcatcacagagcaccaggaacagttcatcggcacctagtaggaattcctccctccccgagcccttctcgaactccaccgctccaatctcgtcctttggttctatatcaagtacccaaagtagcttgcctgcatcagcaactaccgatatcgccgagcctatcatcctaaaagtcgcccctttcaacagagatgatcgtggccaaacggctcgagcgaaacgccaggcagtccgcaatggattcgttgatggttcaggaattgctgatagggtgtcctgcagcgatgccaccccattcgaattgagcagaagtcagctcatgattgatggagtgcccgtctcaacggatccaggctttactttcatacccttgcgcggcaactctcagggcacgatacgtacgacattcttcgtggcaggaggtattttacactggcggaatcagacattctttgaaaaccgtgcgaggttctgtcaagatgacaaaggggagacatatgccaccttcgtctccaatccatcagaattacttgattgcatagagatcaacctcgttgtgtcgttagaatctcaatgccaaaacggccagatcatctccagcaacataccgaaccatctcaccacacgtcggaaagtctag

SEQ ID NO: 26797 - protein, 315 aa, Muscodor strobelii
  misc_feature: SGI Peptide ID NO. 569169
  misc_feature: Useful for introducing or modulating the production of volatile compounds
MSIDSTSSRAQPISSNPSITSESISTVSSTSNSETQSLIPASSATKSRSPTISDTVASSGAQETSSSSSNNSLGSIPLTSATLSTAASSTEVTTSTTPAQAAVSSQSTRNSSSAPSRNSSLPEPFSNSTAPISSFGSISSTQSSLPASATTDIAEPIILKVAPFNRDDRGQTARAKRQAVRNGFVDGSGIADRVSCSDATPFELSRSQLMIDGVPVSTDPGFTFIPLRGNSQGTIRTTFFVAGGILHWRNQTFFENRARFCQDDKGETYATFVSNPSELLDCIEINLVVSLESQCQNGQIISSNIPNHLTTRRKV

SEQ ID NO: 26798 - DNA, 9495 bp, Muscodor strobelii; identical to SEQ ID NO: 26788
  misc_feature: SGI EST ID NO. CUFF.63820.0
  misc_feature: Variant of the nucleotide sequence at SEQ ID NO 26796

SEQ ID NO: 26799 - DNA, 1758 bp, Muscodor strobelii
  misc_feature: SGI cDNA ID NO. 569170
  misc_feature: Encodes the peptide sequence at SEQ ID NO 26800
atggcgccggaatcgcatttcgaccttctcagccttccgcgcgagatacgcgaattcatatacgaggcatacgtcgctgttgacggcggctatgcttaccacttcgaatccggcaagctgagagttgccacttcaggcgagcctatagacctcgcgcttatgttaacctgcaagcaagttgcccaggagatggatggcgtcgcgcttcgaaacaactccatcgtcttcaagactttgtattcagaccagctgcgcgcgcgcgccggtcgtttcgcctatctgcagtaccgccttgcagagatgggccgccttctgctgtcattccacatcgaggacgtcggccacaggcgctgctttgacctgtccgccgcccgtgacatttgtcatgcccacccgaggtttcattcatactttcggacaataaagaactttgggttgaaccttatgctcgagggcgagttctacaattccattatggggaacctaacgcaaagtctcgatgacgaaattctcaatccatgctcctgttggggtattccggaaactgcgtggagggatatgctctcatatgcagtgcaacaccttttgcgcaaggaccattggtggcaaaacgaagagccggaccatacttgtgtccctttcgacaaaccaaagggtgaagcgtacctgagactccgcttggcctaccccccttggagcataccgaccgaccatggcctggacgatttgttcgagacgatgtaccacgccgaccctgacatgtacaaaaaggacaactatacccctttatcaccacaattcgaacgggctaagccctggagccgcgaagacggcatgactgaaaagcatcgcttttcggccgcaaccgtggcgatatctttcttgggtcagctctcgccttcgacacgaaggcatattcgacacctgacgttggtcgaagatcatttttcggttgcccggcctcaaatacatggattgggacttatcgaattctgtgtcgaaaatcccaaattacgcattgagcgtcgagttaatatgtggcggaatgtgtgtcaaacgacatcgagatccgtcgagaagaaccctttctacgggtgtccccttcacaaagcgcacgcactgtataatcgtctgtatcgcaatatgtgggcgggtggtgatcattatatacattacgatgatatttcacgaccagtcgcgtcttggatcatggaagcactagctcttagatcggctggaatgccggctcaatgctttactttagtgctagatggcgatcccgcacccgcccagacgcgtcgcatgttggatcgcgttcagcgcgatgcggcctggcagaccgctttagaaacggcagtcgatacgttgcctcacatgcgtgaagcgggccaatactaccataggacacggcaagcaggctatctttacgatggatttccagaagccttggccaacctgaccaatgcccgcggtgacttggacgccggtggcgtgcagattcgctgcaatttcgaccttggtctgacaatagacccgcaagatatcctgctaagccatcaaaactggacttgggaggattgggaaaccgaatggagcacacaggagttactcgaagacaccccgccgccactacctagctggcttgatttgattagagaagaccttctcccggagtcgatggaataccaccgctattcgcacgaatactatgtacggggttatataccgacagatctgtgggacaagtataagctgtag

SEQ ID NO: 26800 - protein, 585 aa, Muscodor strobelii
  misc_feature: SGI Peptide ID NO. 569170
  misc_feature (9)..(561): NCBI GI: 256728246 Blast Desc: NECHADRAFT_87838 [Nectria haematococca mpVI 77-13-4]
  misc_feature (1)..(555): NCBI GI: 256729016 Blast Desc: NECHADRAFT_79869 [Nectria haematococca mpVI 77-13-4]
  misc_feature (9)..(457): NCBI GI: 189199878 Blast Desc: PTRG_05943 [Pyrenophora tritici-repentis Pt-1C-BFP] gi|187983375|gb|EDU48863.1| PTRG_05943 [Pyrenophora tritici-repentis Pt-1C-BFP]
  misc_feature (3)..(504): NCBI GI: 169613873 Blast Desc: SNOG_10070 [Phaeosphaeria nodorum SN15] gi|111061285|gb|EAT82405.1| SNOG_10070 [Phaeosphaeria nodorum SN15]
  misc_feature (10)..(511): NCBI GI: 189199968 Blast Desc: conserved [Pyrenophora tritici-repentis Pt-1C-BFP] gi|187983420|gb|EDU48908.1| conserved [Pyrenophora tritici-repentis Pt-1C-BFP]
  misc_feature (315)..(557): NCBI GI: 169625447 Blast Desc: SNOG_15996 [Phaeosphaeria nodorum SN15] gi|111055455|gb|EAT76575.1| SNOG_15996 [Phaeosphaeria nodorum SN15]
  misc_feature (1)..(507): NCBI GI: 189191392 Blast Desc: [Pyrenophora tritici-repentis Pt-1C-BFP] gi|187973641|gb|EDU41140.1| [Pyrenophora tritici-repentis Pt-1C-BFP]
  misc_feature (281)..(555): NCBI GI: 256721320 Blast Desc: NECHADRAFT_87025 [Nectria haematococca mpVI 77-13-4]
  misc_feature (281)..(448): NCBI GI: 256725493 Blast Desc: NECHADRAFT_25596 [Nectria haematococca mpVI 77-13-4]
  misc_feature (231)..(507): NCBI GI: 171682854 Blast Desc: protein product [Podospora anserina] gi|170941386|emb|CAP67036.1| protein product [Podospora anserina]
MAPESHFDLLSLPREIREFIYEAYVAVDGGYAYHFESGKLRVATSGEPIDLALMLTCKQVAQEMDGVALRNNSIVFKTLYSDQLRARAGRFAYLQYRLAEMGRLLLSFHIEDVGHRRCFDLSAARDICHAHPRFHSYFRTIKNFGLNLMLEGEFYNSIMGNLTQSLDDEILNPCSCWGIPETAWRDMLSYAVQHLLRKDHWWQNEEPDHTCVPFDKPKGEAYLRLRLAYPPWSIPTDHGLDDLFETMYHADPDMYKKDNYTPLSPQFERAKPWSREDGMTEKHRFSAATVAISFLGQLSPSTRRHIRHLTLVEDHFSVARPQIHGLGLIEFCVENPKLRIERRVNMWRNVCQTTSRSVEKNPFYGCPLHKAHALYNRLYRNMWAGGDHYIHYDDISRPVASWIMEALALRSAGMPAQCFTLVLDGDPAPAQTRRMLDRVQRDAAWQTALETAVDTLPHMREAGQYYHRTRQAGYLYDGFPEALANLTNARGDLDAGGVQIRCNFDLGLTIDPQDILLSHQNWTWEDWETEWSTQELLEDTPPPLPSWLDLIREDLLPESMEYHRYSHEYYVRGYIPTDLWDKYKL

SEQ ID NO: 26801 - DNA, 3263 bp, Muscodor strobelii
  misc_feature: SGI EST ID NO. CUFF.63139.0
  misc_feature: Variant of the nucleotide sequence at SEQ ID NO 26799
tccgtctcttgcgcctaggcaactgctgacttgctagatatagctcgtagctatgaggtcagccatacacgcgacaaagtggactgtatctcttctattattacctatgtggtaccatcgcattgccaacgagaatatagcgtgtcatgaagttgttctcccttgggggacagctttgctaggcgcgggggtttgtattgaccatttaaggttctcacgccgcttctcacacacctcgcattcccggtcgccgtgatgtcgtttcacaagcttccgcatctctaattgtcgaccaataagccattaactatactcattctgcgctatttggagctgccggaatacgataggttgggtatacacttaacgtccgcgccgccgcaattacctcggcgtgagtcacgccgcgccggccaaaactttctttgcttctgtttctcaattcatgttccggcctttggctgataaaagagtacaatgcagccatttgttgctaattctgcgtctcaattccctcctccgcactctgctccccgccctgcctgattgaaaacagccaaatcagatattcagatatcatggcgccggaatcgcatttcgaccttctcagccttccgcgcgagatacgcgaattcatatacgaggcatacgtcgctgttgacggcggctatgcttaccacttcgaatccggcaagctgagagttgccacttcaggcgagcctatagacctcgcgcttatgttaacctgcaagcaagttgcccaggagatggatggcgtcgcgcttcgaaacaactccatcgtcttcaagactttgtattcagaccagctgcgcgcgcgcgccggtcgtttcgcctatctgcagtaccgccttgcagagatgggccgccttctgctgtcattccacatcgaggacgtcggccacaggcgctgctttgacctgtccgccgcccgtgacatttgtcatgcccacccgaggtttcattcatactttcggacaataaagaactttgggttgaaccttatgctcgagggcgagttctacaattccattatggggaacctaacgcaaagtctcgatgacgaaattctcaatccatgctcctgttggggtattccggaaactgcgtggagggatatgctctcatatgcagtgcaacaccttttgcgcaaggaccattggtggcaaaacgaagagccggaccatacttgtgtccctttcgacaaaccaaagggtgaagcgtacctgagactccgcttggcctaccccccttggagcataccgaccgaccatggcctggacgatttgttcgagacgatgtaccacgccgaccctgacatgtacaaaaaggacaactatacccctttatcaccacaattcgaacgggctaagccctggagccgcgaagacggcatgactgaaaagcatcgcttttcggccgcaaccgtggcgatatctttcttgggtcagctctcgccttcgacacgaaggcatattcgacacctgacgttggtcgaagatcatttttcggttgcccggcctcaaatacatggattgggacttatcgaattctgtgtcgaaaatcccaaattacgcattgagcgtcgagttaatatgtggcggaatgtgtgtcaaacgacatcgagatccgtcgagaagaaccctttctacgggtgtccccttcacaaagcgcacgcactgtataatcgtctgtatcgcaatatgtgggcgggtggtgatcattatatacattacgatgatatttcacgaccagtcgcgtcttggatcatggaagcactagctcttagatcggctggaatgccggctcaatgctttactttagtgctagatggcgatcccgcacccgcccagacgcgtcgcatgttggatcgcgttcagcgcgatgcggcctggcagaccgctttagaaacggcagtcgatacgttgcctcacatgcgtgaagcgggccaatactaccataggacacggcaagcaggctatctttacgatggatttccagaagccttggccaacctgaccaatgcccgcggtgacttggacgccggtggcgtgcagattcgctgcaatttcgaccttggtctgacaatagacccgcaagatatcctgctaagccatcaaaactggacttgggaggattgggaaaccgaatggagcacacaggagttactcgaagacaccccgccgccactacctagctggcttgatttgattagagaagaccttctcccggagtcgatggaataccaccgctattcgcacgaatactatgtacggggttatataccgacagatctgtgggacaagtataagctgtaggttggtgactaataattgtgagaaatttgggacattatgatagttgttttcaatgagggatgcgagctatcaactatttgaccttcttataatggagcagtgttactaatcaatacggtcgactactgcatccaccgcgtacaacgttcatctcgcagaaatatccttgcgcaaccgtattctaaagagcctcagcgagtttacgtgtagtgggctttctttgtccatttattaccttccccattggcatcgcgaccgtggcagcaaatcttcgacgatttggctctggcgagatctccactagtgaggcaacaagcgacttacccatatgctgctggcgtattcttctgcgccatgcacttcccattcggcgtggcttttaccagagctcttgagcgcgtcggtacggataaaaatgcggatacagatccggagaaagatattacggcagattttggattctagctgaaggttaatgttgtaagggtgtttgtggcggatatcccttcttgcatctgttattttggcgctttcatgtatggcatgtcttgaataatgttgtagaagatatcaaccattaaactatgttgctatcaaagatatgcttaggtatcattatgttaacatcggtggcacttctcacattctgtccaggaaactcggcggatgaggcacagcagtctgccctgcacgtcttgttgttaaaatacaacgaattgaaactaatactatatcttgctctaacaactatggaaaaatcttgatgttatacgactcttgcctccaggcttgttggcgatcaaagacgaacagcaacaacggacgcaggcaatacaaccgtgccattgactggtcctagctgatctccagagttcgtgacatagagcgtgttgcgatctgcacgagtacggccaagctgcacagaag

SEQ ID NO: 26802 - DNA, 966 bp, Muscodor strobelii
  misc_feature: SGI cDNA ID NO. 569171
  misc_feature: Encodes the peptide sequence at SEQ ID NO 26803
atgcgtgcctcagccgccttcgttgccttggttggcacttttgtcaacgcacgtacaatctccccacgatcaacagtatccaaagtttttgaactcgacaagaacccctcgtggctggaaaatctggctatttcggaaaggggagatatatttgctacacgtcttgatgctccggaaatctggaaaatcgacccaagaaatggaaccggcataaaactggctgagataccgcaagtcacatctctcacgggcattgctgagattggacccttcgaatttgttgtgctcggactcaatgtcactgcagacttcagcccggttcctggatcatcgcaagcctggagattggatgtacacggctgctcaccacatctcgaactcatcactacaattcctgaagccatcttcgtcaacggcgcagcgaaagccaacgatcacacggttctcataacagattctactggcggtgtcatatacaaactcgaccttgttacaaacgacatcgatatcgctctttcagaccccgcaacgatgaccatacccgaaaatgccgcgcttcagtttggcgtcaacggtatcaaggccacaaagaattatgtgtattacaccaacactgcccgggaaattttctgccgcatacccgtcaccagccagctcaacgcagctggcgcggcgcaggttatcgcctccggctttgtccctgatgacttcgctctgctctctgatggaacagcctatatagcaactggcacggagaacacaatactcaaggtggaagccaacggcaaagtttctgtggctgccggcagcgcaaattccgtcgacatcccatctgctacttctgtgcagcttggccgtactcgtgcagatcgcaacacgctctatgtcacgaactctggagatcagctaggaccagtcaatggcacggttgtattgcctgcgtccgttgttgctgttcgtctttga

SEQ ID NO: 26803 - protein, 321 aa, Muscodor strobelii
  misc_feature: SGI Peptide ID NO. 569171
  misc_feature (24)..(321): NCBI GI: 119482818 Blast Desc: NFIA_026140 [Neosartorya fischeri NRRL 181] gi|119409592|gb|EAW19540.1| conserved [Neosartorya fischeri NRRL 181]
  misc_feature (20)..(321): NCBI GI: 256721057 Blast Desc: NECHADRAFT_55444 [Nectria haematococca mpVI 77-13-4]
  misc_feature (6)..(321): NCBI GI: 115397413 Blast Desc: [Aspergillus terreus NIH2624] gi|114192489|gb|EAU34189.1| [Aspergillus terreus NIH2624]
  misc_feature (18)..(321): NCBI GI: 255939348 Blast Desc: Pc16g00180 [Penicillium chrysogenum Wisconsin 54-1255] gi|211585066|emb|CAP92688.1| Pc16g00180 [Penicillium chrysogenum Wisconsin 54-1255]
  misc_feature (24)..(258): NCBI GI: 256726026 Blast Desc: NECHADRAFT_94325 [Nectria haematococca mpVI 77-13-4]
  misc_feature (21)..(321): NCBI GI: 169772533 Blast Desc: [Aspergillus oryzae RIB40] gi|83768596|dbj|BAE58733.1| protein product [Aspergillus oryzae]
  misc_feature (3)..(321): NCBI GI: 121714953 Blast Desc: conserved [Aspergillus clavatus NRRL 1] gi|119403242|gb|EAW13660.1| conserved [Aspergillus clavatus NRRL 1]
  misc_feature (24)..(321): NCBI GI: 67901802 Blast Desc: AN7888.2 [Aspergillus nidulans FGSC A4] gi|40740352|gb|EAA59542.1| AN7888.2 [Aspergillus nidulans FGSC A4]
  misc_feature (24)..(321): NCBI GI: 259480636 Blast Desc: TPA: conserved [Aspergillus nidulans FGSC A4]
  misc_feature (24)..(258): NCBI GI: 46116642 Blast Desc: FG04163.1 [Gibberella zeae PH-1]
MRASAAFVALVGTFVNARTISPRSTVSKVFELDKNPSWLENLAISERGDIFATRLDAPEIWKIDPRNGTGIKLAEIPQVTSLTGIAEIGPFEFVVLGLNVTADFSPVPGSSQAWRLDVHGCSPHLELITTIPEAIFVNGAAKANDHTVLITDSTGGVIYKLDLVTNDIDIALSDPATMTIPENAALQFGVNGIKATKNYVYYTNTAREIFCRIPVTSQLNAAGAAQVIASGFVPDDFALLSDGTAYIATGTENTILKVEANGKVSVAAGSANSVDIPSATSVQLGRTRADRNTLYVTNSGDQLGPVNGTVVLPASVVAVRL

SEQ ID NO: 26804 - DNA, 313 bp, Muscodor strobelii
  misc_feature: SGI EST ID NO. CUFF.63142.0
  misc_feature: Variant of the nucleotide sequence at SEQ ID NO 26802
ccggcataaaactggctgagataccgcaagtcacatctctcacgggcattgctgagattggacccttcgaatttgttgtgctcggactcaatgtcactgcagacttcagcccggttcctggatcatcgcaagcctggagattggatgtacacggctgctcaccacatctcgaactcatcactacaattcctgaagccatcttcgtcaacggcgcagcgaaagccaacgatcacacggttctcataacagattctactggcggtgtcatatacaaactcgaccttgttacaaacgacatcgatatcgctctttc

SEQ ID NO: 26805 - DNA, 1395 bp, Muscodor strobelii
  misc_feature: SGI cDNA ID NO. 569172
  misc_feature: Encodes the peptide sequence at SEQ ID NO 26806
atgtatagtttcttgacgattttagctctgggttctatcccatctgtccttggaggcattgtcgaggaccttggccctcagctttccagcaacgcgaggatcacttctggcaacctgacagctccgcgttggagcgactatgcagcaccatcccccggatatacagttacagtggccgaagagcgagatgtagtgaagacaatccaatactgcaatgcgaaaggaatcaactttctcacgcagtctggagcgcactcctcgccaactacgttccacatcggtcatgatgatattgtcatcaatgtccgaggaataaacttcacgacggtcagtagcgacggaactaccatgcacgttggtgcaggtgctttgaacagcgatattatcgaagctgcataccaaagcggcggagttgtcttaagtggaggatgcaattgtgtcggggcgtcgggtctcacattgggaggaggattgagctatttcatgggtgaatatggcatgcctgctgataacctgatttccctcaacgtcgtcaccgcgaacggcactctagtcacagcatccaaaaccagtcattccgatttgttctgggcgttaggcggtgctggacctaatttcggagtcatcacatctttcaagatccaaactcatccaagatcggaattgagcatatatggtgctggcctcctcttcactggagataaactcgaagcatatatcaaggcgctgaacgacttgaacatgacggaaaagatgacaaacaattggcagcttctatatcaagacaatgtgccttacatcgaagccggaacattatacttggagccaaatgaaactgcagcacgggaggccttcaagtcattatacgatctcgatccaatcatttcgtttgctggtactatcgaatatgatcatatcaatgacggtaccgactacttctgtgtcaagggtgggcgcaagccaagttggcacgtaggccttaaatctttagactatcctacctggcaacaagtctggaatgagttggttgaatttgttgacaataccggcttgaactctacacgtgtactcgtcgagacgtactcgaactatgtagcaagagagatcgggagcgaaaccgtctgctatccgcatcgagcaatcaactatcatgctatcttccaatctgtctacgccgacgacacttgggacaatgcagtagaagcacttggttacaagattcgggatctctggaggagcacggacgggttcgacattcctcggacgtacatcaattttgctcacggagacgaagcccctgaaataatctacggagaaagtctacccaggcttcgagagctcaaagcaacttgggaccccgagaataaattcaatcagtggcttccaatcttgtaa

SEQ ID NO: 26806 - protein, 464 aa, Muscodor strobelii
  misc_feature: SGI Peptide ID NO. 569172
  misc_feature (422)..(462): Pfam Id: PF08031 Pfam Desc: Berberine and berberine like
  misc_feature (52)..(188): Pfam Id: PF01565 Pfam Desc: FAD binding domain
  misc_feature (422)..(458): Pfam Id: PF08031 Pfam Desc: Berberine and berberine like
  misc_feature (20)..(461): NCBI GI: 238501764 Blast Desc: conserved [Aspergillus flavus NRRL3357] gi|220692353|gb|EED48700.1| conserved [Aspergillus flavus NRRL3357]
  misc_feature (20)..(461): NCBI GI: 169769298 Blast Desc: [Aspergillus oryzae RIB40] gi|83766977|dbj|BAE57117.1| protein product [Aspergillus oryzae]
  misc_feature (23)..(463): NCBI GI: 238838229 Blast Desc: FAD binding domain-containing protein [Microsporum canis CBS 113480]
  misc_feature (28)..(404): NCBI GI: 156053664 Blast Desc: SS1G_05679 [Sclerotinia sclerotiorum 1980] gi|154703460|gb|EDO03199.1| SS1G_05679 [Sclerotinia sclerotiorum 1980]
  misc_feature (43)..(463): NCBI GI: 238841546 Blast Desc: FAD binding domain-containing protein [Microsporum canis CBS 113480]
  misc_feature (4)..(463): NCBI GI: 145240595 Blast Desc: An08g08310 [Aspergillus niger] gi|134077467|emb|CAK40032.1| protein product [Aspergillus niger]
  misc_feature (7)..(461): NCBI GI: 259483385 Blast Desc: TPA: conserved [Aspergillus nidulans FGSC A4]
  misc_feature (24)..(463): NCBI GI: 169613607 Blast Desc: SNOG_09934 [Phaeosphaeria nodorum SN15] gi|160707195|gb|EAT82269.2| SNOG_09934 [Phaeosphaeria nodorum SN15]
  misc_feature (1)..(411): NCBI GI: 169604306 Blast Desc: SNOG_05164 [Phaeosphaeria nodorum SN15] gi|160706543|gb|EAT87555.2| SNOG_05164 [Phaeosphaeria nodorum SN15]
  misc_feature (3)..(464): NCBI GI: 46115880 Blast Desc: FG03782.1 [Gibberella zeae PH-1]
MYSFLTILALGSIPSVLGGIVEDLGPQLSSNARITSGNLTAPRWSDYAAPSPGYTVTVAEERDVVKTIQYCNAKGINFLTQSGAHSSPTTFHIGHDDIVINVRGINFTTVSSDGTTMHVGAGALNSDIIEAAYQSGGVVLSGGCNCVGASGLTLGGGLSYFMGEYGMPADNLISLNVVTANGTLVTASKTSHSDLFWALGGAGPNFGVITSFKIQTHPRSELSIYGAGLLFTGDKLEAYIKALNDLNMTEKMTNNWQLLYQDNVPYIEAGTLYLEPNETAAREAFKSLYDLDPIISFAGTIEYDHINDGTDYFCVKGGRKPSWHVGLKSLDYPTWQQVWNELVEFVDNTGLNSTRVLVETYSNYVAREIGSETVCYPHRAINYHAIFQSVYADDTWDNAVEALGYKIRDLWRSTDGFDIPRTYINFAHGDEAPEIIYGESLPRLRELKATWDPENKFNQWLPIL

SEQ ID NO: 26807 - DNA, 1563 bp, Muscodor strobelii
  misc_feature: SGI cDNA ID NO. 569173
  misc_feature: Encodes the peptide sequence at SEQ ID NO 26808
atggtcggcgtaaatgtgcagacggacaatcgcgtccaccgcatggcggtggaggaccctataccttggtaccgcaaaaagaatctccggcgcctctattttatgttgttcccatgccttatgggtattgagatgacttctggttttgattcacaaatcattaatgccgtacagctcgtaccagcatggacagacttcttcggacatcctactgggggctacaaaggaattctggcatctgctctgcccctcggcgctgtcattggacttccatttattcctcttgtgaacgacactcttggccggagatggtgtgtcatgattggaagtctcataatgattatcggatcgatcttacaagggtttgcagttaatgggccgatgtatatcgttgctcgactgatcatcggcttcggactaccctacgctatcgttgcaggctcgagtctcatcggtgaacttgcgtatcccaaggagcgtgctgtattgacatctcttttcaatgctgcatatttcgtcggagcgattgtcgcatcggctgttacttatggcacgcagctcattccatcaaactggtcttggagagtgccttcactgctgcagctttcgccttcgctcgtgcaagttgcattgatcttcttcattcccgaaagccctcgatacctcattagtaaagatcgacatgaagaggcattcaagattttggttgactatcatgctgagggagacatgaattcagagttcgccaaagccgaatttgcggagatcaagacgacaattgcaattgagctcgagcactcaaagagatcgtggctggacttagttagtactgcaggaaaccgacgacgactattgatcggatctcttgtaggcatattcactcagttgtccggcaacgtcgttatttcttattatctaggcgacatcttggctttggttgggtttaccgatccccagttcgctgccaaatacaatattggcaatcaagtttggggtctcctctgtgctgtcatcacagccctcatcatcatgagattcaaacgccgcactatgtatttggttgccatagcgtggatcttgacggcctatgtcggttggactatctccgcaggaattgctgttcaagatcacaacagtgccgccgggaagctgtgtctgttctggatctatttttaccaaccgggctacaatatcggcttcaacgcattgacttacactttcttggttgaacttttcccctatgccatgagagcacgtggaattacagtttttcaattcttcggaaagcttgcacagttcttcgggaccaatgtaaacccgatcggcttagatcctgtgaacggtataggctggaagtttcttattgtttattccgcctggatcctcattgagggtatactcatctattttctctggcccgaaacctcgggtcgtactttggaggaactcgctttcttattcgaggacgaggaccgcgtccggaagacagctgaggctgttgatcatgagatccaccaaagagagtcaagctccgaagagaaagtaccaaaggatgcaatctga

SEQ ID NO: 26808 - protein, 520 aa, Muscodor strobelii
  misc_feature: SGI Peptide ID NO. 569173
  misc_feature (40)..(436): Pfam Id: PF07690 Pfam Desc: Major Facilitator Superfamily
  misc_feature (39)..(487): Pfam Id: PF00083 Pfam Desc: Sugar (and other) transporter
  misc_feature (1)..(513): NCBI GI: 85085012 Blast Desc: NCU07199 [Neurospora crassa OR74A] gi|28918515|gb|EAA28188.1| conserved [Neurospora crassa OR74A] gi|28950216|emb|CAD71083.1| related to hexose transporter protein
  misc_feature (1)..(517): NCBI GI: 171676589 Blast Desc: protein product [Podospora anserina] gi|170936361|emb|CAP61019.1| protein product [Podospora anserina]
  misc_feature (1)..(512): NCBI GI: 116197471 Blast Desc: CHGG_06891 [Chaetomium globosum CBS 148.51] gi|88178170|gb|EAQ85638.1| CHGG_06891 [Chaetomium globosum CBS 148.51]
  misc_feature (8)..(519): NCBI GI: 85094247 Blast Desc: NCU05853 [Neurospora crassa OR74A] gi|28921300|gb|EAA30608.1| conserved [Neurospora crassa OR74A]
  misc_feature (7)..(514): NCBI GI: 116200915 Blast Desc: CHGG_08342 [Chaetomium globosum CBS 148.51] gi|88176860|gb|EAQ84328.1| CHGG_08342 [Chaetomium globosum CBS 148.51]
  misc_feature (3)..(511): NCBI GI: 171677314 Blast Desc: protein product [Podospora anserina] gi|170936725|emb|CAP61383.1| protein product [Podospora anserina]
  misc_feature (18)..(515): NCBI GI: 119473356 Blast Desc: MFS sugar transporter, [Neosartorya fischeri NRRL 181] gi|119406731|gb|EAW16682.1| MFS sugar transporter, [Neosartorya fischeri NRRL 181]
  misc_feature (1)..(505): NCBI GI: 169776808 Blast Desc: [Aspergillus oryzae RIB40] gi|83771606|dbj|BAE61737.1| protein product [Aspergillus oryzae]
  misc_feature (1)..(506): NCBI GI: 115391487 Blast Desc: conserved [Aspergillus terreus NIH2624] gi|114194172|gb|EAU35872.1| conserved [Aspergillus terreus NIH2624]
  misc_feature (1)..(519): NCBI GI: 212538607 Blast Desc: MFS sugar transporter, [Penicillium marneffei ATCC 18224] gi|210069201|gb|EEA23292.1| MFS sugar transporter, [Penicillium marneffei ATCC 18224]
MVGVNVQTDNRVHRMAVEDPIPWYRKKNLRRLYFMLFPCLMGIEMTSGFDSQIINAVQLVPAWTDFFGHPTGGYKGILASALPLGAVIGLPFIPLVNDTLGRRWCVMIGSLIMIIGSILQGFAVNGPMYIVARLIIGFGLPYAIVAGSSLIGELAYPKERAVLTSLFNAAYFVGAIVASAVTYGTQLIPSNWSWRVPSLLQLSPSLVQVALIFFIPESPRYLISKDRHEEAFKILVDYHAEGDMNSEFAKAEFAEIKTTIAIELEHSKRSWLDLVSTAGNRRRLLIGSLVGIFTQLSGNVVISYYLGDILALVGFTDPQFAAKYNIGNQVWGLLCAVITALIIMRFKRRTMYLVAIAWILTAYVGWTISAGIAVQDHNSAAGKLCLFWIYFYQPGYNIGFNALTYTFLVELFPYAMRARGITVFQFFGKLAQFFGTNVNPIGLDPVNGIGWKFLIVYSAWILIEGILIYFLWPETSGRTLEELAFLFEDEDRVRKTAEAVDHEIHQRESSSEEKVPKDAI

SEQ ID NO: 26809 - DNA, 1578 bp, Muscodor strobelii
  misc_feature: SGI EST ID NO. CUFF.63170.0
  misc_feature: Variant of the nucleotide sequence at SEQ ID NO 26807
ctggactggtggaatgagagtcgtgctgggcgtctgagggttcgaagaacggaagatcgactgtgggagaggaggaatgttgcgggagctcgccaggcatatgtcgggctgtacattggctgatcccacatgtgctttttgaatcgtcgtcagatcaatgatctcgcggtcttcttcattcttgatgatgggatcagagatgctagaatgtggagcagatatctcaacggttttcgatgctcggagctcttccctcagactgttcacctcgtctctcagtgctttgttctggccctggagagcagaaagaaccaggtcgtgattacgagcttgcaaagatgccttcgcagcgagatgttgggttttgagctgtttgcgggctgattcgttggcaagaagtagctggatgtcgtcgaactcgtattggagagtgccttcactgctgcagctttcgccttcgctcgtgcaagttgcattgatcttcttcattcccgaaagccctcgatacctcattagtaaagatcgacatgaagaggcattcaagattttggttgactatcatgctgagggagacatgaattcagagttcgccaaagccgaatttgcggagatcaagacgacaattgcaattgagctcgagcactcaaagagatcgtggctggacttagttagtactgcaggaaaccgacgacgactattgatcggatctcttgtaggcatattcactcagttgtccggcaacgtcgttatttcttattatctaggcgacatcttggctttggttgggtttaccgatccccagttcgctgccaaatacaatattggcaatcaagtttggggtctcctctgtgctgtcatcacagccctcatcatcatgagattcaaacgccgcactatgtatttggttgccatagcgtggatcttgacggcctatgtcggttggactatctccgcaggaattgctgttcaagatcacaacagtgccgccgggaagctgtgtctgttctggatctatttttaccaaccgggctacaatatcggcttcaacgcattgacttacactttcttggttgaacttttcccctatgccatgagagcacgtggaattacagtttttcaattcttcggaaagcttgcacagttcttcgggaccaatgtaaacccgatcggcttagatcctgtgaacggtataggctggaagtttcttattgtttattccgcctggatcctcattgagggtatactcatctattttctctggcccgaaacctcgggtcgtactttggaggaactcgctttcttattcgaggacgaggaccgcgtccggaagacagctgaggctgttgatcatgagatccaccaaagagagtcaagctccgaagagaaagtaccaaaggatgcaatctgatatcggtatcgaacaactatcaaagcattggcagatggagcgtagcgtctggataacagcaatcgccataaaacagggactgtgttgcaaagctattcttggtccaaagaggaaagtacgatagattatgagcaatgatataccgtaataatgaaaaaaaatcaaactac

SEQ ID NO: 26810 - DNA, 1029 bp, Muscodor strobelii
  misc_feature: SGI cDNA ID NO. 569174
  misc_feature: Elevated expression when VOC is produced
  misc_feature: Encodes the peptide sequence at SEQ ID NO 26811
atggaggccccgacagcgcagttctcgttgcttccaccagaactcagattccagatatggcacatgacgatggaaccacgactccttcgtatcaatatcggattctgcaagaccgtgaccgctgttgcagactggtcaccatacggcaatccgatcgcgttacgggtctgtcaggagtctcgcgctctggctctagctcgacatcccattgcatggggtatatacgactgttcgcgccgcagaaagtcaccatatcgcttcgcgaagcgctatatcaacttacaagacgacattattcttatagatgtcgcagtatccaatagacctcatagacgcgatgctcatcgctggaaatacgatcattatcatttcctagtggcgtgcctcacaacgcgaggcgtaggtcccaacggcgaaatcatatcgcgcaacctgcgcaacctggcactctcggcgcatttctggtttgctcgagtgttgccgcaaggtggcttaaaggtctgcgaacagctattctgcaattcgcgagaggtctatattgtctcggagttaacgagtgaagagcagcgaaaccgtgctttaaaccgtacgctattcacactcaatcggcagtgcctgcgagcgccaggctggaaggtagagttggaagagcgcactgtaaaagtgacaagaatcaccgccggcggcaacttagtttctcgcattcactgtgggaatgcaggccgcttcagtgaaagagatttcccatctggagagccgcagagtgacactttgggcaaggagccgccgcccagcagcagcagcaaagttgttgattgtcacgtctatcctgcagttggcccaaactctattctgttcgatgcacagcagtcaaagatatatacatggtatggtaaacagtatgcagagcaaaggagaaaggaaagactccgtcgaatcttggttcgccctcgtggatggctggtcaggatgaccaagagggcaaaagttttgccgaggaagaagaagacctcaaactccaccatctga

SEQ ID NO: 26811 - protein, 342 aa, Muscodor strobelii
  misc_feature: SGI Peptide ID NO. 569174
  misc_feature: Useful for introducing or modulating the production of volatile compounds
MEAPTAQFSLLPPELRFQIWHMTMEPRLLRINIGFCKTVTAVADWSPYGNPIALRVCQESRALALARHPIAWGIYDCSRRRKSPYRFAKRYINLQDDIILIDVAVSNRPHRRDAHRWKYDHYHFLVACLTTRGVGPNGEIISRNLRNLALSAHFWFARVLPQGGLKVCEQLFCNSREVYIVSELTSEEQRNRALNRTLFTLNRQCLRAPGWKVELEERTVKVTRITAGGNLVSRIHCGNAGRFSERDFPSGEPQSDTLGKEPPPSSSSKVVDCHVYPAVGPNSILFDAQQSKIYTWYGKQYAEQRRKERLRRILVRPRGWLVRMTKRAKVLPRKKKTSNSTI

SEQ ID NO: 26812 - DNA, 530 bp, Muscodor strobelii
  misc_feature: SGI EST ID NO. CUFF.63191.0
  misc_feature: Variant of the nucleotide sequence at SEQ ID NO 26810
gttcttatcaaaacctcattgagctaaatacacacatcatgtcttcacacaaaacgcacagagaattaaactgtctgttgcttttgggtttcacgaacgcgaatacatagaatcatggaggccccgacagcgcagttctcgttgcttccaccagaactcagattccagatatggcacatgacgatggaaccacgactccttcgtatcaatatcggattctgcaagaccgtgaccgctgttgcagactggtcaccatacggcaatccgatcgcgttacgggtctgtcaggagtctcgcgctctggctctagctcgacatcccattgcatggggtatatacgactgttcgcgccgcagaaagtcaccatatcgcttcgcgaagcgctatatcaacttacaagacgacattattcttatagatgtcgcagtatccaatagacctcatagacgcgatgctcatcgctggaaatacgatcattatcatttcctagtggcgtgcctcacaacgcgaggcgtaggtcccaacggcga

SEQ ID NO: 26813 - DNA, 1089 bp, Muscodor strobelii
  misc_feature: SGI cDNA ID NO. 569175
  misc_feature: Encodes the peptide sequence at SEQ ID NO 26814
atgtcttctctagcaacgctgccggataggaattggttcagcgtcaactgcctcgaagctcgaaaccgtgagatcacctcgcaacttcaaagccatcatgcccagttgatacgcgaagagaggccattgcaggtgtgtcacatgcaggaaaagataggagacctccaatacgagttcgacgacatccagctacttcttgccaacgaatcagcccgcaaacagctcaaaacccaacatctcgctgcgaaggcatctttgcaagctcgtaatcacgacctggttctttctgctctccagggccagaacaaagcactgagagacgaggtgaacagtctgagggaagagctccgagcatcgaaaaccgttgagatatctgctccacattctagcatctctgatcccatcatcaagaatgaagaagaccgcgagatcattgatctgacgacgattcaaaaagcacatgtgggatcagccaatgtacagcccgacatatgcctggcgagctcccgcaacattcctcctctcccacagtcgatcttccgttcttcgaaccctcagacgcccagcacgactctcattccaccagtccagagccctggccatgcacgtcgcaatcagcacgataaagctcttgtcacaacgcttcagacaaaacgaccagggaacgctgatatcgggccaatagactggagtaagagacgacgggctaatgtacacgtcgctgataaaaccagcacggaacctgtcggcgttggaaaggtcgaacatgacaaagtttctcataaatgtatctgcggatttactatcgaagatgacaatccatctagtccgtatttcgtctgtgatagctgtggtggcaagagacataccttttgctcgggcccgagcctattcgacggagattcaactgtcggacatttctgcgagcaatgttcgccgccgtacaagagaatactcgaggacatcaacaagaatggcaatccatcggctgctcaccccatgatcattccacggagacctgacatattgtcaatgtatcacacttttatcgaggtagagaggtcgatctctcctgagttgggtcattag

SEQ ID NO: 26814 - protein, 362 aa, Muscodor strobelii
  misc_feature: SGI Peptide ID NO. 569175
  misc_feature (262)..(328): NCBI GI: 145612920 Blast Desc: MGG_12463 [Magnaporthe grisea 70-15] gi|145020009|gb|EDK04237.1| MGG_12463 [Magnaporthe grisea 70-15]
  misc_feature (262)..(326): NCBI GI: 85091203 Blast Desc: NCU05943 [Neurospora crassa OR74A] gi|28920172|gb|EAA29551.1| [Neurospora crassa OR74A]
  misc_feature (262)..(331): NCBI GI: 46121973 Blast Desc: FG05364.1 [Gibberella zeae PH-1]
  misc_feature (262)..(331): NCBI GI: 256724939 Blast Desc: NECHADRAFT_34591 [Nectria haematococca mpVI 77-13-4]
  misc_feature (262)..(331): NCBI GI: 116203055 Blast Desc: CHGG_09412 [Chaetomium globosum CBS 148.51] gi|88177930|gb|EAQ85398.1| CHGG_09412 [Chaetomium globosum CBS 148.51]
  misc_feature (262)..(325): NCBI GI: 171682784 Blast Desc: protein product [Podospora anserina] gi|170941351|emb|CAP67001.1| protein product [Podospora anserina]
  misc_feature (262)..(331): NCBI GI: 156060013 Blast Desc: SS1G_02143 [Sclerotinia sclerotiorum 1980] gi|154699553|gb|EDN99291.1| SS1G_02143 [Sclerotinia sclerotiorum 1980]
  misc_feature (200)..(328): NCBI GI: 240277967 Blast Desc: PHD finger domain-containing protein [Ajellomyces capsulatus H143]
  misc_feature (200)..(328): NCBI GI: 226282845 Blast Desc: conserved [Paracoccidioides brasiliensis Pb01]
  misc_feature (200)..(328): NCBI GI: 225682198 Blast Desc: conserved [Paracoccidioides brasiliensis Pb03]
MSSLATLPDRNWFSVNCLEARNREITSQLQSHHAQLIREERPLQVCHMQEKIGDLQYEFDDIQLLLANESARKQLKTQHLAAKASLQARNHDLVLSALQGQNKALRDEVNSLREELRASKTVEISAPHSSISDPIIKNEEDREIIDLTTIQKAHVGSANVQPDICLASSRNIPPLPQSIFRSSNPQTPSTTLIPPVQSPGHARRNQHDKALVTTLQTKRPGNADIGPIDWSKRRRANVHVADKTSTEPVGVGKVEHDKVSHKCICGFTIEDDNPSSPYFVCDSCGGKRHTFCSGPSLFDGDSTVGHFCEQCSPPYKRILEDINKNGNPSAAHPMIIPRRPDILSMYHTFIEVERSISPELGH

SEQ ID NO: 26815 - DNA, 206 bp, Muscodor strobelii
  misc_feature: SGI EST ID NO. CUFF.63163.0
  misc_feature: Variant of the nucleotide sequence at SEQ ID NO 26813
agggaacgctgatatcgggccaatagactggagtaagagacgacgggctaatgtacacgtcgctgataaaaccagcacggaacctgtcggcgttggaaaggtcgaacatgacaaagtttctcataaatgtatctgcggatttactatcgaagatgacaatccatctagtccgtatttcgtctgtgatagctgtggtggcaagagac

SEQ ID NO: 26816 - DNA, 459 bp, Muscodor strobelii
  misc_feature: SGI cDNA ID NO. 569176
  misc_feature: Elevated expression when VOC is produced
  misc_feature: Encodes the peptide sequence at SEQ ID NO 26817
atgtcagcaacaagtttaccagagcgttatatcttggtagaaggatatccatcagtcgatgactatcgtaaccttcgccttacgtcaggactgtcgtccaagaccgaagcgcaagcgaccgccgcgatcaaaggcagctggtacggtgtctatgtcacagaggcagctaagcccgagaaagccgtggcaatgggccggatcatcggcgacggcggatggtacttcttgatcgccgacatggcgacgctgccagagcatcagcggcagggtctaggagactttatcttgaagaagttgctagcaagaatcaagtctcacagtgcagaaggaaaggctttggtcacgttaggtgcagatgtgccaggtcgcagattgtacgcgaagaatggcttcgaggacaccatgccactatcgatggggatgtggttgaccgtggaggttcctgaacgcaatgaatga

SEQ ID NO: 26817 - protein, 152 aa, Muscodor strobelii
  misc_feature: SGI Peptide ID NO. 569176
  misc_feature (53)..(132): Pfam Id: PF00583 Pfam Desc: Acetyltransferase (GNAT) family
  misc_feature (2)..(146): NCBI GI: 119473683 Blast Desc: GNAT family acetyltransferase, [Neosartorya fischeri NRRL 181] gi|119406870|gb|EAW16820.1| GNAT family acetyltransferase, [Neosartorya fischeri NRRL 181]
  misc_feature (2)..(146): NCBI GI: 121712377 Blast Desc: GNAT family N-acetyltransferase, [Aspergillus clavatus NRRL 1] gi|119401952|gb|EAW12374.1| GNAT family N-acetyltransferase, [Aspergillus clavatus NRRL 1]
  misc_feature (2)..(146): NCBI GI: 146323139 Blast Desc: GNAT family N-acetyltransferase [Aspergillus fumigatus Af293] gi|129556484|gb|EBA27271.1| GNAT family N-acetyltransferase, [Aspergillus fumigatus Af293] GNAT family
  misc_feature (1)..(141): NCBI GI: 238507217 Blast Desc: GNAT family N-acetyltransferase, [Aspergillus flavus NRRL3357] gi|220689523|gb|EED45874.1| GNAT family N-acetyltransferase, [Aspergillus flavus NRRL3357]
  misc_feature (1)..(146): NCBI GI: 164429699 Blast Desc: NCU11212 [Neurospora crassa OR74A] gi|157073584|gb|EDO65473.1| NCU11212 [Neurospora crassa OR74A]
  misc_feature (5)..(142): NCBI GI: 67540482 Blast Desc: AN6411.2 [Aspergillus nidulans FGSC A4] gi|40739243|gb|EAA58433.1| AN6411.2 [Aspergillus nidulans FGSC A4] gi|259479365|tpe|CBF69524.1| TPA: GNAT family AFUA_3G00870)
  misc_feature (5)..(141): NCBI GI: 116193905 Blast Desc: CHGG_06670 [Chaetomium globosum CBS 148.51] gi|88182583|gb|EAQ90051.1| CHGG_06670 [Chaetomium globosum CBS 148.51]
  misc_feature (10)..(141): NCBI GI: 225559617 Blast Desc: conserved [Ajellomyces capsulatus G186AR]
  misc_feature (5)..(147): NCBI GI: 119183865 Blast Desc: CIMG_06809 [Coccidioides immitis RS]
  misc_feature (5)..(141): NCBI GI: 240109718 Blast Desc: GNAT family acetyltransferase, [Coccidioides posadasii C735 delta SOWgp]
  misc_feature: Useful for introducing or modulating the production of volatile compounds
MSATSLPERYILVEGYPSVDDYRNLRLTSGLSSKTEAQATAAIKGSWYGVYVTEAAKPEKAVAMGRIIGDGGWYFLIADMATLPEHQRQGLGDFILKKLLARIKSHSAEGKALVTLGADVPGRRLYAKNGFEDTMPLSMGMWLTVEVPERNE

SEQ ID NO: 26818 - DNA, 2350 bp, Muscodor strobelii
  misc_feature: SGI EST ID NO. CUFF.63206.0
  misc_feature: Variant of the nucleotide sequence at SEQ ID NO 26816
cggtaattctttaatgaaatcacccgtggatgacaccacttaggcagctagccagcctacgtgtactaaactcattgagatttctgcgagggttaactgtgagtcatatgacttcgtgctgctttcgcgttgccgaatggtgatgcgacgcgcatccgacctacctgatattcttgcctgcatggccggctcctcggggcggtgaagatcgtcggcttcggcttcggaatgcactaaacactttctatcccgagaatatttattcgttcgtataggtcgaagaatgattccttttttaccacgacctgtatcagataagctatcaaataagactctccattctcaaaacaagccgtccttagcatacaccatcgtcgtagtctaagaacccaagaccttgctacgaattagacacaatgtcagcaacaagtttaccagagcgttatatcttggtagaaggatatccatcagtcgatgactatcgtaaccttcgccttacgtcaggactgtcgtccaagaccgaagcgcaagcgaccgccgcgatcaaaggcagctggtacggtgtctatgtcacagaggcagctaagcccgagaaagccgtggcaatgggccggatcatcggcgacggcggatggtacttcttgatcgccgacatggcgacgctgccagagcatcagcggcagggtctaggagactttatcttgaagaagttgctagcaagaatcaagtctcacagtgcagaaggaaaggctttggtcacgttaggtgcagatgtgccaggtcgcagattgtacgcgaagaatggcttcgaggacaccatgccactatcgatggggatgtggttgaccgtggaggttcctgaacgcaatgaatgatgaaggcagatcgtttgggaagatatatcacaccgggtgactcaattccccgatactacaagttcaatacttcagcgggtccataatccatgcggcgcagtcgctggaaatgtggttgattgcgcgaggagctgagggggctgtgtttctcggcagcatcaataccccaaaggccttgcttcacgataccgtttcggggcgtcgaatatagaggaattgatatcagcctgagaacatcgcactggttacctacacttcttctccctgcatatatttccaccctttattctgcgaatatttctcgtattctccctgcaacatggctgttttcatgccctgtcgcagtttggcacctggaagacacaccgctttatacagatattccagtcacccggcgcaggcatgatcgtcagctgaatagaaaatggactcaggcgaacatcagtaccgtagaatactcctataagctcgtgatcattatcaaatagacaataagtcgattatatccggggtaacatgacgcattgggaacgtgacggtcaagattgaggaatcaaagaagagcgggctttttgtataaagatgagcgcgattccgtcagttagacacattgaaatctcatcaacactccaacaccataacttgactagttatcttatcatctctacggctcgctcatagacagttaatatctccaacatgtcgttcgattaaaccgcgaacttcatttccaggttcgagatgttcagtcaagtactcttctctctggctaccttcgccatcactggtcttacaatcccaaccgcaagcaacggtttagaaatccgtcagggatacaccgaaaattgcaccgcgacctataatgttgtatcaggcgatacctgcaatcatattgcggacttgtacaatgacacgttcaatctagctgatctatactcttggaacccagagatcaatagccaatgcagcaatctctttgttggagagaaaatatgcgtcggcgtgggtaactcgaacggaaccgctcctgcttgccccgtcccggcgatgcaggatactatcaagacttgcaatgactgttacctcgtcaaggaaggcgatacatgctatggtatcgagatcacattaaacgtgaccctggatgagctacgtgcctcgaatccgagtctcaacgcgggctgtaccaatcttttgattggatacaactactgcgtcggcgtgagcgagtgatgtcacgcttcttggacaatgataatttgatcaacgcatgtatactgttataggcgtattcaatcaagatcggaagtagaaagatgtcaaattggatcagactctgtagtttacacgtatttcgtatgcaacatccacacgaccttggcgatgtcaaattttgggcaacccaatatttggtgtcatctatgctatatctctcccgttcgtccaacgtcaacgccctaaatatcagtgaaacaaca

SEQ ID NO: 26819 - DNA, 489 bp, Muscodor strobelii
  misc_feature: SGI cDNA ID NO. 569177
  misc_feature: Elevated expression when VOC is produced
  misc_feature: Encodes the peptide sequence at SEQ ID NO 26820
atgttcagtcaagtactcttctctctggctaccttcgccatcactggtcttacaatcccaaccgcaagcaacggtttagaaatccgtcagggatacaccgaaaattgcaccgcgacctataatgttgtatcaggcgatacctgcaatcatattgcggacttgtacaatgacacgttcaatctagctgatctatactcttggaacccagagatcaatagccaatgcagcaatctctttgttggagagaaaatatgcgtcggcgtgggtaactcgaacggaaccgctcctgcttgccccgtcccggcgatgcaggatactatcaagacttgcaatgactgttacctcgtcaaggaaggcgatacatgctatggtatcgagatcacattaaacgtgaccctggatgagctacgtgcctcgaatccgagtctcaacgcgggctgtaccaatcttttgattggatacaactactgcgtcggcgtgagcgagtga

SEQ ID NO: 26820 - protein, 162 aa, Muscodor strobelii
  misc_feature: SGI Peptide ID NO. 569177
  misc_feature (40)..(87): Pfam Id: PF01476 Pfam Desc: LysM domain
  misc_feature (114)..(144): Pfam Id: PF01476 Pfam Desc: LysM domain
  misc_feature (10)..(160): NCBI GI: 238841622 Blast Desc: LysM domain-containing protein [Microsporum canis CBS 113480]
  misc_feature (15)..(160): NCBI GI: 238842262 Blast Desc: LysM domain-containing protein [Microsporum canis CBS 113480]
  misc_feature (29)..(162): NCBI GI: 121719560 Blast Desc: LysM domain protein [Aspergillus clavatus NRRL 1] gi|119404677|gb|EAW15053.1| LysM domain protein [Aspergillus clavatus NRRL 1]
  misc_feature (29)..(160): NCBI GI: 238845964 Blast Desc: LysM domain-containing protein [Microsporum canis CBS 113480]
  misc_feature (10)..(160): NCBI GI: 115385889 Blast Desc: conserved [Aspergillus terreus NIH2624] gi|114187938|gb|EAU29638.1| conserved [Aspergillus terreus NIH2624]
  misc_feature (28)..(161): NCBI GI: 121700893 Blast Desc: LysM domain protein [Aspergillus clavatus NRRL 1] gi|119396854|gb|EAW07285.1| LysM domain protein [Aspergillus clavatus NRRL 1]
  misc_feature (15)..(162): NCBI GI: 255942034 Blast Desc: Pc16g14890 [Penicillium chrysogenum Wisconsin 54-1255] gi|211586409|emb|CAP94159.1| Pc16g14890 [Penicillium chrysogenum Wisconsin 54-1255]
  misc_feature (29)..(160): NCBI GI: 238842165 Blast Desc: LysM domain-containing protein [Microsporum canis CBS 113480]
  misc_feature (19)..(160): NCBI GI: 156037598 Blast Desc: SS1G_12513 [Sclerotinia sclerotiorum 1980] gi|154697921|gb|EDN97659.1| SS1G_12513 [Sclerotinia sclerotiorum 1980]
  misc_feature (29)..(160): NCBI GI: 119467085 Blast Desc: LysM domain protein [Neosartorya fischeri NRRL 181] gi|119405501|gb|EAW15452.1| LysM domain protein [Neosartorya fischeri NRRL 181]
  misc_feature: Useful for introducing or modulating the production of volatile compounds
MFSQVLFSLATFAITGLTIPTASNGLEIRQGYTENCTATYNVVSGDTCNHIADLYNDTFNLADLYSWNPEINSQCSNLFVGEKICVGVGNSNGTAPACPVPAMQDTIKTCNDCYLVKEGDTCYGIEITLNVTLDELRASNPSLNAGCTNLLIGYNYCVGVSE

SEQ ID NO: 26821 - DNA, 2350 bp, Muscodor strobelii; identical to SEQ ID NO: 26818
  misc_feature: SGI EST ID NO. CUFF.63206.0
  misc_feature: Variant of the nucleotide sequence at SEQ ID NO 26819

SEQ ID NO: 26822 - DNA, 1317 bp, Muscodor strobelii
  misc_feature: SGI cDNA ID NO. 569178
  misc_feature: Reduced expression when VOC is produced
  misc_feature: Encodes the peptide sequence at SEQ ID NO 26823
atgagcaataactctcgcagaccaagaccgatctcaaaacttgttggaggagccattggactcacgagagagtacctagctggtgacaaagagaagaaggcagctcaggcagcgaagaacgagaagagctgctcgacttcagctgatgattacttggatcatccagatgaccagtatgacgacagttcttcggatgacgatcaggactgggcacttgatttagacgaggcacagcaagtgcaggaactgccaagctatgatggaccaaacagacatggatcacctaacgacttcatctcgcgaaatccgccaactccctatcgacaaacacctgttaagccgctttccattcctgtgatcctcccacagaggcgtcctgagacaccacaaagagggtttatccgagcatacgcacctatcctacaagattgcaacatagaccagaccgcttggctagattttctagacggattccaaaagagcatcaataagaactcctggttccacgtaatcaacgcaggagtgttcgttgcggataaagtggttgccgcctctgctggatggaaccctatcgcttttgccgccggcatcgccctccatgtcagcattgagactggtcgccggggttatatgaactatcagcataataactatttggacaagatgaacgacgaattcttcaagccgcgcggtctctactgtctgattgtcgaatacaagcccgaaagcaatgaggtgatcgagaatgtcaatctagatggtaacgtggcaaaagtcattggcgagcgtgacggtcagtcgaaatggaaaacattaactaagtcttctgccacatccacacaagaggcagaagtccctactccagcgcctctcgtgtttcctgcacttgacgagatggaagaaggacagaaaaagaatgccgtgaagaaatttgggtcctttctcggagattattatgatcgacaagccgcagctcgatgggaagcacaaaatccagattcgaagttgccctcagcgcagcgtaaggagtttgcgtcgcgatttagcgatccaaatcatgcggtttaccaagggggattggtcggcttcgtgactggcggaaacgtcaatttgcgcgagatgcgccatcgaagacgcaatgagagaagggtgaggcgcggcaaggaggagcgccagcctcgttctgaaagacgcaagaaatctcagagacgtgggttatcgtcactgctcaaaaataatgctgtgtatttgatggttgtaaatatgccaacagaagaggagctagcgctggttagggcgcaaatcgccgagcaataa

SEQ ID NO: 26823 - protein, 438 aa, Muscodor strobelii
  misc_feature: SGI Peptide ID NO. 569178
  misc_feature (56)..(405): NCBI GI: 156044706 Blast Desc: SS1G_10457 [Sclerotinia sclerotiorum 1980] gi|154694845|gb|EDN94583.1| SS1G_10457 [Sclerotinia sclerotiorum 1980]
  misc_feature (9)..(370): NCBI GI: 154309935 Blast Desc: BC1G_06888 [Botryotinia fuckeliana B05.10] gi|150851676|gb|EDN26869.1| BC1G_06888 [Botryotinia fuckeliana B05.10]
  misc_feature (13)..(435): NCBI GI: 154296117 Blast Desc: BC1G_12788 [Botryotinia fuckeliana B05.10] gi|150843749|gb|EDN18942.1| BC1G_12788 [Botryotinia fuckeliana B05.10]
  misc_feature (40)..(421): NCBI GI: 154291935 Blast Desc: BC1G_14270 [Botryotinia fuckeliana B05.10] gi|150846371|gb|EDN21564.1| BC1G_14270 [Botryotinia fuckeliana B05.10]
  misc_feature (13)..(370): NCBI GI: 256726063 Blast Desc: NECHADRAFT_25054 [Nectria haematococca mpVI 77-13-4]
  misc_feature (15)..(367): NCBI GI: 169624559 Blast Desc: SNOG_15540 [Phaeosphaeria nodorum SN15] gi|160705198|gb|EAT77205.2| SNOG_15540 [Phaeosphaeria nodorum SN15]
  misc_feature (115)..(435): NCBI GI: 238499089 Blast Desc: conserved [Aspergillus flavus NRRL3357] gi|220692532|gb|EED48878.1| conserved [Aspergillus flavus NRRL3357]
  misc_feature (115)..(435): NCBI GI: 169778526 Blast Desc: [Aspergillus oryzae RIB40] gi|83772466|dbj|BAE62595.1| protein product [Aspergillus oryzae]
  misc_feature (9)..(430): NCBI GI: 156039277 Blast Desc: [Sclerotinia sclerotiorum 1980] gi|154697512|gb|EDN97250.1| [Sclerotinia sclerotiorum 1980]
  misc_feature (15)..(438): NCBI GI: 115437082 Blast Desc: [Aspergillus terreus NIH2624] gi|114188536|gb|EAU30236.1| [Aspergillus terreus NIH2624]
  misc_feature: Useful for introducing or modulating the production of volatile compounds
MSNNSRRPRPISKLVGGAIGLTREYLAGDKEKKAAQAAKNEKSCSTSADDYLDHPDDQYDDSSSDDDQDWALDLDEAQQVQELPSYDGPNRHGSPNDFISRNPPTPYRQTPVKPLSIPVILPQRRPETPQRGFIRAYAPILQDCNIDQTAWLDFLDGFQKSINKNSWFHVINAGVFVADKVVAASAGWNPIAFAAGIALHVSIETGRRGYMNYQHNNYLDKMNDEFFKPRGLYCLIVEYKPESNEVIENVNLDGNVAKVIGERDGQSKWKTLTKSSATSTQEAEVPTPAPLVFPALDEMEEGQKKNAVKKFGSFLGDYYDRQAAARWEAQNPDSKLPSAQRKEFASRFSDPNHAVYQGGLVGFVTGGNVNLREMRHRRRNERRVRRGKEERQPRSERRKKSQRRGLSSLLKNNAVYLMVVNMPTEEELALVRAQIAEQ

SEQ ID NO: 26824 - DNA, 4432 bp, Muscodor strobelii
  misc_feature: SGI EST ID NO. CUFF.63714.1
  misc_feature: Variant of the nucleotide sequence at SEQ ID NO 26822
cgacgatgacattccacggtggcgatgagatcttgccccatgggaaagctcatggggatatcactccagagtctgtgtaccgcatggcttcatggcggggtgtagctacaggagcggcctcaacccccaggttgtcttccagtttgaatacttaatcatatgatgctacattttgtgatatgtatctgaagttgtcgaccagcacagaactatgcgactgcgaatagcgctcacggctcgtctcgccatggaccgtgtcgggcccaatagacaacaccaaggggcctagattttgagttcatgtctcgtgagctcttttagacgggaaagtttttggttcgcgctagaaccactctccagatccatcaccctcgtctccatatacccagggatctggagtgcccgcatttccccttagcccacacgcatcactgatataaatgccccagagtatcccctcggggtttatacttggagattgagtttataatagcagattcagatctattcttcttgtgcgatcccggtgctcacttttgcgcagccacagaggtgtttgtatcaccgctcttcaccatgggctttttatccattgagcggcctgaaaatgaggccgggaagacgtggccatccatcgccatcggtctattcgtggcctttggcggtgttttgtatggttacgataccggtactatcagtggaatcctcgagatgccatactggcagcgactcttctcgactggttacagagatagctcgggagacttgagcattagctcttctcagtcgtccgctattgtctctatcctttcagcaggcacattcttcggcgctctcggctctccttttcttgccgacaacattggacgtcggttggctttggttgcttcgtgcttcgtcttcattttcggcgtgatcctgcaaaccgtcgcaaccgcgattcccctattccttgctggtcgattctttgccggatttggtgtcggactgatatcttctctcattcccctatatcagagtgagaccgcccccaagtggatccgtggagcgatcgtaggagcatatcaatgggctatcactattggcctgcttctggcaagcattgtcgacaacgcgaccaaggatcgaaacgacaccggatcctaccgtattcctatcgccgttcagtttgcgtgggctctcattcttattggaggtatgctcgtactaccagagaccccaaggtacatggtcaggaagggagaccatgataaggcagcaaaggctcttgcgaagctccgaagattacctgtcgaagatgaatctatcgctgctgagcttgcagagattcaagcgaatcacgaatttgagcttactctcggcaagtcgagctacctcgactgctttagaggaaagctcctcaagcgccagcttactggtattgcccttcaagctctgcagcagctgactggtgtcaactttgtcttttactatggtacccagtatttcaagaactcgggcttcgagaacgccttcatcatccagatcatcactggtgttgtcaacgttgtatccactgtccctggtctctgggctgtggacaagtttggtcgtcgcccgcttctactttggggtgctgtcggtatggccatcagccagttccttgtcgcccttcttggaactctatcgactggtcaggacgccatgggcaacgtcgtcgttcacaatgaggcagcaaacaaggttgccgttgctttcgtcatcatcttcatctttttcttcgccgcgacttggggcccgctcgcttgggttgtgacgggtgagatttaccccctcaagactcgtgccaagagcttgtcgatctcgactgcatcgaattggctcctcaacttcattatcggcttcgtcacgccctacttggttgactatggcccgggaaacgcaaatctgcagagcaaggtcttcttcatctggttcggcgcctgcttcatttgcatctctttcgtgtacttctttatctacgagactaagggactatcgctcgagcaagtcgatcaaatgtacgcagagtgctccagcgcacgcaagagtaacaagtggcaacctagcaacagcttcaccaacggattcgtggagaagaatggcgtcgggcacgtggagaatcccgagaaagaggagatctctgcatgagctgccaggggccactagatctagatatagatgttttgcgaatagaacgcggtgatgatattttctaataatgaatacttcgacggtttctcccaagcgcgagcagatagaagctgtgaccattcaagccagtggcactgctgcctcttgatcctatccgagtgcgaagtctggggacagcccgaattgagtatggtggtggccactagtgtgctgcgggagccagcctcaccatgcttcagcatgttctcgccgggattaagtggagttgatgtcagcactggtgcagatccggcacagccactgacgaactgacaccactgctctccgagtttctggatagactttccagtgattttgttaaatgcgattgcgaagtgaatctggcgagctggtagacttgacctacgcagccaggatagtcgcctcgacctaatgacttcttccgttcacttaaggccatagacatataaaaacctagactaccttcgaggatcactcttccaaagtcatctaagacaacacgcatttatttgaacacttcagtttcatggaagtttgcattcagaaatagaacaattagtttcgacacaaaggaaatcgtcactatgagcaataactctcgcagaccaagaccgatctcaaaacttgttggaggagccattggactcacgagagagtacctagctggtgacaaagagaagaaggcagctcaggcagcgaagaacgagaagagctgctcgacttcagctgatgattacttggatcatccagatgaccagtatgacgacagttcttcggatgacgatcaggactgggcacttgatttagacgaggcacagcaagtgcaggaactgccaagctatgatggaccaaacagacatggatcacctaacgacttcatctcgcgaaatccgccaactccctatcgacaaacacctgttaagccgctttccattcctgtgatcctcccacagaggcgtcctgagacaccacaaagagggtttatccgagcatacgcacctatcctacaagattgcaacatagaccagaccgcttggctagattttctagacggattccaaaagagcatcaataagaactcctggttccacgtaatcaacgcaggagtgttcgttgcggataaagtggttgccgcctctgctggatggaacgtaagtgctgctacaagtttagttccctttctgctcgtctctcttgacgttatcggaaccctcattgaatactaagtgcgatgatagcctatcgcttttgccgccggcatcgccctccatgtcagcattgagactggtcgccggggttatatgaactatcagcataataactatttggacaagatgaacgacgaattcttcaagccgcgcggtctctactgtctgattgtcgaatacaagcccgaaagcaatgaggtgatcgagaatgtcaatctagatggtaacgtggcaaaagtcattggcgagcgtgacggtcagtcgaaatggaaaacattaactaagtcttctgccacatccacacaagaggcagaagtccctactccagcgcctctcgtgtttcctgcacttgacgagatggaagaaggacagaaaaagaatgccgtgaagaaatttgggtcctttctcggagattattatgatcgacaagccgcagctcgatgggaagcacaaaatccagattcgaagttgccctcagcgcagcgtaaggagtttgcgtcgcgatttagcgatccaaatcatgcggtttaccaagggggattggtcggcttcgtgactggcggaaacgtcaatttgcgcgagatgcgccatcgaagacgcaatgagagaagggtgaggcgcggcaaggaggagcgccagcctcgttctgaaagacgcaagaaatctcagagacgtgggttatcgtcactgctcaaaaataatgctgtgtatttgatggttgtaaatatgccaacagaagaggagctagcgctggttagggcgcaaatcgccgagcaataaggggcatcgtcttccgtattcctatcttgcgatccctgaaaaggtagagtttagactacataacgagcagctttttaaccaccacattctcagagttaattcctttcgcttccccggacatcatgaaatggtagctttgacatcgccacaatacatcaccccatttttattttcgataaaatcgtcttccgaaggcgcaagtgttagcattctggaatgtgacaaagtgggatatgaatacttaaagattc

SEQ ID NO: 26825 - DNA, 1593 bp, Muscodor strobelii
  misc_feature: SGI cDNA ID NO. 569179
  misc_feature: Reduced expression when VOC is produced
  misc_feature: Encodes the peptide sequence at SEQ ID NO 26826
atgggctttttatccattgagcggcctgaaaatgaggccgggaagacgtggccatccatcgccatcggtctattcgtggcctttggcggtgttttgtatggttacgataccggtactatcagtggaatcctcgagatgccatactggcagcgactcttctcgactggttacagagatagctcgggagacttgagcattagctcttctcagtcgtccgctattgtctctatcctttcagcaggcacattcttcggcgctctcggctctccttttcttgccgacaacattggacgtcggttggctttggttgcttcgtgcttcgtcttcattttcggcgtgatcctgcaaaccgtcgcaaccgcgattcccctattccttgctggtcgattctttgccggatttggtgtcggactgatatcttctctcattcccctatatcagagtgagaccgcccccaagtggatccgtggagcgatcgtaggagcatatcaatgggctatcactattggcctgcttctggcaagcattgtcgacaacgcgaccaaggatcgaaacgacaccggatcctaccgtattcctatcgccgttcagtttgcgtgggctctcattcttattggaggtatgctcgtactaccagagaccccaaggtacatggtcaggaagggagaccatgataaggcagcaaaggctcttgcgaagctccgaagattacctgtcgaagatgaatctatcgctgctgagcttgcagagattcaagcgaatcacgaatttgagcttactctcggcaagtcgagctacctcgactgctttagaggaaagctcctcaagcgccagcttactggtattgcccttcaagctctgcagcagctgactggtgtcaactttgtcttttactatggtacccagtatttcaagaactcgggcttcgagaacgccttcatcatccagatcatcactggtgttgtcaacgttgtatccactgtccctggtctctgggctgtggacaagtttggtcgtcgcccgcttctactttggggtgctgtcggtatggccatcagccagttccttgtcgcccttcttggaactctatcgactggtcaggacgccatgggcaacgtcgtcgttcacaatgaggcagcaaacaaggttgccgttgctttcgtcatcatcttcatctttttcttcgccgcgacttggggcccgctcgcttgggttgtgacgggtgagatttaccccctcaagactcgtgccaagagcttgtcgatctcgactgcatcgaattggctcctcaacttcattatcggcttcgtcacgccctacttggttgactatggcccgggaaacgcaaatctgcagagcaaggtcttcttcatctggttcggcgcctgcttcatttgcatctctttcgtgtacttctttatctacgagactaagggactatcgctcgagcaagtcgatcaaatgtacgcagagtgctccagcgcacgcaagagtaacaagtggcaacctagcaacagcttcaccaacggattcgtggagaagaatggcgtcgggcacgtggagaatcccgagaaagaggagatctctgcatga

SEQ ID NO: 26826 - protein, 530 aa, Muscodor strobelii
  misc_feature: SGI Peptide ID NO. 569179
  misc_feature (26)..(435): Pfam Id: PF07690 Pfam Desc: Major Facilitator Superfamily
  misc_feature (22)..(489): Pfam Id: PF00083 Pfam Desc: Sugar (and other) transporter
  misc_feature (1)..(525): NCBI GI: 119501617 Blast Desc: high-affinity glucose transporter [Neosartorya fischeri NRRL 181] gi|119415731|gb|EAW25668.1| high-affinity glucose transporter [Neosartorya fischeri NRRL 181]
  misc_feature (7)..(509): NCBI GI: 59802889 Blast Desc: glucose transporter-like protein [Magnaporthe grisea]
  misc_feature (5)..(527): NCBI GI: 256726250 Blast Desc: [Nectria haematococca mpVI 77-13-4]
  misc_feature (8)..(509): NCBI GI: 283482555 Blast Desc: hexose transporter [Glomerella graminicola] gi|283482589|emb|CBA13042.1| hexose transporter [Glomerella graminicola]
  misc_feature (5)..(527): NCBI GI: 46111519 Blast Desc: FG02641.1 [Gibberella zeae PH-1]
  misc_feature (6)..(507): NCBI GI: 256731235 Blast Desc: NECHADRAFT_96496 [Nectria haematococca mpVI 77-13-4]
  misc_feature (1)..(503): NCBI GI: 119499527 Blast Desc: high-affinity glucose transporter [Neosartorya fischeri NRRL 181] gi|119414685|gb|EAW24624.1| high-affinity glucose transporter [Neosartorya fischeri NRRL 181]
  misc_feature (4)..(526): NCBI GI: 261353963 Blast Desc: high-affinity glucose transporter RGT2 [Verticillium albo-atrum VaMs.102]
  misc_feature (1)..(519): NCBI GI: 242810957 Blast Desc: MFS monosaccharide transporter, [Talaromyces stipitatus ATCC 10500] gi|218716314|gb|EED15736.1| MFS monosaccharide transporter, [Talaromyces stipitatus ATCC 10500]
  misc_feature (8)..(495): NCBI GI: 283482565 Blast Desc: hexose transporter [Glomerella graminicola] gi|283482590|emb|CBA13043.1| hexose transporter [Glomerella graminicola]
  misc_feature: Useful for introducing or modulating the production of volatile compounds
MGFLSIERPENEAGKTWPSIAIGLFVAFGGVLYGYDTGTISGILEMPYWQRLFSTGYRDSSGDLSISSSQSSAIVSILSAGTFFGALGSPFLADNIGRRLALVASCFVFIFGVILQTVATAIPLFLAGRFFAGFGVGLISSLIPLYQSETAPKWIRGAIVGAYQWAITIGLLLASIVDNATKDRNDTGSYRIPIAVQFAWALILIGGMLVLPETPRYMVRKGDHDKAAKALAKLRRLPVEDESIAAELAEIQANHEFELTLGKSSYLDCFRGKLLKRQLTGIALQALQQLTGVNFVFYYGTQYFKNSGFENAFIIQIITGVVNVVSTVPGLWAVDKFGRRPLLLWGAVGMAISQFLVALLGTLSTGQDAMGNVVVHNEAANKVAVAFVIIFIFFFAATWGPLAWVVTGEIYPLKTRAKSLSISTASNWLLNFIIGFVTPYLVDYGPGNANLQSKVFFIWFGACFICISFVYFFIYETKGLSLEQVDQMYAECSSARKSNKWQPSNSFTNGFVEKNGVGHVENPEKEEISA

SEQ ID NO: 26827 - DNA, 4432 bp, Muscodor strobelii; identical to SEQ ID NO: 26824
  misc_feature: SGI EST ID NO. CUFF.63714.1
  misc_feature: Variant of the nucleotide sequence at SEQ ID NO 26825

SEQ ID NO: 26828 - DNA, 1959 bp, Muscodor strobelii
  misc_feature: SGI cDNA ID NO. 569180
  misc_feature: Reduced expression when VOC is produced
  misc_feature: Encodes the peptide sequence at SEQ ID NO 26829
atgggtctcggcttcaagactgccgctgtggtggtggtggcggctttactgtccggcccggtgtcaggacagttcttcgggtcctccggtcgtttattgggttcgtcgtttgctactccgggggataatgctacatacgactatgtgattatcggcggtggcactgctggcttagctgtggcagctcgtttggtggagcaacatgccggtacggtcgcagttgttgaggccggcacattctacgaatttagtaacagcaacaatactcagcttcccggaggtgatggagcgtttactggaaagggtgtgaacgattggcagcctatgatcgactggggatatagaacaacaccacaaactggtgctctgaatcaaacactgcattatgcagccggcaagacgttcggtggaggatccgcaagaaatttcatggtataccaacggggaaccgaaggttcatacaaaaaatgggcagacgaggttggcgacgacagttacacatggtcgaagttcctaccatggatgcagaagagtgcagaattctctcctccagatggggaaaagcggactgccaacgcaacgccagtttacgatgctggtattgtagggaaagacggcccagtctccgtatcatacacaaactacccccaggctattgcatcttgggttctcgaggggcttaaagctattgggttgccagtaatcgacggtttcaacagcggcaagctcatcggccagtcatacgccaccttttccattgacgcgcaatcgatgttgcgagactcatcttcaactgcatatctgcaaccttcgctctctaacacagatctctacttataccaccttactctagcgaagaagatcaacttcgactctgacaagagggcgactagcgtggacgtggagactatgggttttacctacaacctgaaggctaacaaggagatcattgtatcatccggtgtgttcggatcgcctcagttgttgatggtttccggaatcggccctaaggagaccctggaatcgctcgatattcccgtcatcgcagaccgccctggtgttggacagaatctccaggaccatatctacttcggcatttcgtataagatcaatgccttgactttctcttcgttccttaacgcagactacgtcaacgagcagaaattcttgttccagacaaaccagactggaatgtacacaaacccgaccgccgacgttattggatgggagaagatccctgaccacctgcgcactggatggtcgaacgagactgtcacggcacttgaagaatttcccgatgattggcccgaagctgagtacatctcgctaggatcgtaccttggcctcgatttggactctcgtttcggtgatccaggcgatggagctcaatatggtacactggtcattgccgtagtctcatctacctcacgtggcactgtatcgatctcatctaccgataccaaggtgcagcccatcatcaaccccaactccctcactacacaggccgacgcagatgtcgccattgccggattcaagcgtgcgcgcgaattctgggccaccgacgtaatgcaagagttggcaattggcgaggaggcttaccccggtccggacgttaccacagacgaggaaatcctggaaaccatccgcaagagctacaacgctatttaccacgcatcgtgcacaaataagatgggcagggagactgactcaatggcagtggtagaccctcaagccagagtctatggtgtgaagggtctgcgtgtcgtcgacgcttccgctatgcccctactacctccaggacatccgcaatcgactatttacggtctggcggagaaaattgcctgcgatattgcaggtaactgtgatcagccaccaacgcagggcggaggatctccgtctactaacgggacggcgtatccatcccgtggctgcaaacgccgccgaagtcctctatactag

SEQ ID NO: 26829 - protein, 652 aa, Muscodor strobelii
  misc_feature: SGI Peptide ID NO. 569180
  misc_feature (467)..(613): Pfam Id: PF05199 Pfam Desc: GMC oxidoreductase
  misc_feature (46)..(376): Pfam Id: PF00732 Pfam Desc: GMC oxidoreductase
  misc_feature (47)..(80): Pfam Id: PF01266 Pfam Desc: FAD dependent oxidoreductase
  misc_feature (46)..(361): Pfam Id: PF00732 Pfam Desc: GMC oxidoreductase
  misc_feature (47)..(77): Pfam Id: PF07992 Pfam Desc: Pyridine nucleotide-disulphide oxidoreductase
  misc_feature (13)..(621): NCBI GI: 212526186 Blast Desc: glucose-methanol-choline (gmc) oxidoreductase, [Penicillium marneffei ATCC 18224] gi|210072648|gb|EEA26735.1| glucose-methanol-choline (gmc) oxidoreductase, [Penicillium ATCC
  misc_feature (11)..(621): NCBI GI: 238845985 Blast Desc: glucose-methanol-choline oxidoreductase [Microsporum canis CBS 113480]
  misc_feature (8)..(619): NCBI GI: 156065439 Blast Desc: SS1G_00730 [Sclerotinia sclerotiorum 1980] gi|154691589|gb|EDN91327.1| SS1G_00730 [Sclerotinia sclerotiorum 1980]
  misc_feature (8)..(619): NCBI GI: 154320081 Blast Desc: BC1G_02021 [Botryotinia fuckeliana B05.10] gi|150854760|gb|EDN29952.1| BC1G_02021 [Botryotinia fuckeliana B05.10]
  misc_feature (28)..(621): NCBI GI: 116181804 Blast Desc: CHGG_01530 [Chaetomium globosum CBS 148.51] gi|88185827|gb|EAQ93295.1| CHGG_01530 [Chaetomium globosum CBS 148.51]
  misc_feature (31)..(620): NCBI GI: 242812067 Blast Desc: choline dehydrogenase, [Talaromyces stipitatus ATCC 10500] gi|218714221|gb|EED13644.1| choline dehydrogenase, [Talaromyces stipitatus ATCC 10500]
  misc_feature (9)..(621): NCBI GI: 121710942 Blast Desc: glucose-methanol-choline (gmc) oxidoreductase [Aspergillus clavatus NRRL 1] gi|119401237|gb|EAW11661.1| glucose-methanol-choline (gmc) oxidoreductase [Aspergillus NRRL
  misc_feature (9)..(623): NCBI GI: 145236316 Blast Desc: protein product [Aspergillus niger] gi|134075258|emb|CAK44899.1| protein product [Aspergillus niger]
  misc_feature (89)..(623): NCBI GI: 145616785 Blast Desc: MGG_14477 [Magnaporthe grisea 70-15] gi|145022986|gb|EDK06647.1| MGG_14477 [Magnaporthe grisea 70-15]
  misc_feature (43)..(614): NCBI GI: 156040363 Blast Desc: SS1G_12198 [Sclerotinia sclerotiorum 1980] gi|154696254|gb|EDN95992.1| SS1G_12198 [Sclerotinia sclerotiorum 1980]
  misc_feature (46)..(624): SWISSPROT Homolog: EC 1.1.99.1 Choline dehydrogenase
  misc_feature: Useful for introducing or modulating the production of volatile compounds
MGLGFKTAAVVVVAALLSGPVSGQFFGSSGRLLGSSFATPGDNATYDYVIIGGGTAGLAVAARLVEQHAGTVAVVEAGTFYEFSNSNNTQLPGGDGAFTGKGVNDWQPMIDWGYRTTPQTGALNQTLHYAAGKTFGGGSARNFMVYQRGTEGSYKKWADEVGDDSYTWSKFLPWMQKSAEFSPPDGEKRTANATPVYDAGIVGKDGPVSVSYTNYPQAIASWVLEGLKAIGLPVIDGFNSGKLIGQSYATFSIDAQSMLRDSSSTAYLQPSLSNTDLYLYHLTLAKKINFDSDKRATSVDVETMGFTYNLKANKEIIVSSGVFGSPQLLMVSGIGPKETLESLDIPVIADRPGVGQNLQDHIYFGISYKINALTFSSFLNADYVNEQKFLFQTNQTGMYTNPTADVIGWEKIPDHLRTGWSNETVTALEEFPDDWPEAEYISLGSYLGLDLDSRFGDPGDGAQYGTLVIAVVSSTSRGTVSISSTDTKVQPIINPNSLTTQADADVAIAGFKRAREFWATDVMQELAIGEEAYPGPDVTTDEEILETIRKSYNAIYHASCTNKMGRETDSMAVVDPQARVYGVKGLRVVDASAMPLLPPGHPQSTIYGLAEKIACDIAGNCDQPPTQGGGSPSTNGTAYPSRGCKRRRSPLY

SEQ ID NO: 26830 - DNA, 2147 bp, Muscodor strobelii
  misc_feature: SGI EST ID NO. CUFF.63401.1
  misc_feature: Variant of the nucleotide sequence at SEQ ID NO 26828
tgtcgctctcgaggatccttggtcgtttttccttttatagtttcagtttctattcttgttgtcttctttcattcattcggaggactatattacacacatcgaaccatgggtctcggcttcaagactgccgctgtggtggtggtggcggctttactgtccggcccggtgtcaggacagttcttcgggtcctccggtcgtttattgggttcgtcgtttgctactccgggggataatgctacatacgactatgtgattatcggcggtggcactgctggcttagctgtggcagctcgtttggtggagcaacatgccggtacggtcgcagttgttgaggccggcacattctacgaatttagtaacagcaacaatactcagcttcccggaggtgatggagcgtttactggaaagggtgtgaacgattggcagcctatgatcgactggggatatagaacaacaccacaaactggtgctctgaatcaaacactgcattatgcagccggcaagacgttcggtggaggatccgcaagaaatttcatggtataccaacggggaaccgaaggttcatacaaaaaatgggcagacgaggttggcgacgacagttacacatggtcgaagttcctaccatggatgcagaagagtgcagaattctctcctccagatggggaaaagcggactgccaacgcaacgccagtttacgatgctggtattgtagggaaagacggcccagtctccgtatcatacacaaactacccccaggctattgcatcttgggttctcgaggggcttaaagctattgggttgccagtaatcgacggtttcaacagcggcaagctcatcggccagtcatacgccaccttttccattgacgcgcaatcgatgttgcgagactcatcttcaactgcatatctgcaaccttcgctctctaacacagatctctacttataccaccttactctagcgaagaagatcaacttcgactctgacaagagggcgactagcgtggacgtggagactatgggttttacctacaacctgaaggctaacaaggagatcattgtatcatccggtgtgttcggatcgcctcagttgttgatggtttccggaatcggccctaaggagaccctggaatcgctcgatattcccgtcatcgcagaccgccctggtgttggacagaatctccaggaccatatctacttcggcatttcgtataagatcaatgccttgactttctcttcgttccttaacgcagactacgtcaacgagcagaaattcttgttccagacaaaccagactggaatgtacacaaacccgaccgccgacgttattggatgggagaagatccctgaccacctgcgcactggatggtcgaacgagactgtcacggcacttgaagaatttcccgatgattggcccgaagctgagtacatctcgctaggatcgtaccttggcctcgatttggactctcgtttcggtgatccaggcgatggagctcaatatggtacactggtcattgccgtagtctcatctacctcacgtggcactgtatcgatctcatctaccgataccaaggtgcagcccatcatcaaccccaactccctcactacacaggccgacgcagatgtcgccattgccggattcaagcgtgcgcgcgaattctgggccaccgacgtaatgcaagagttggcaattggcgaggaggcttaccccggtccggacgttaccacagacgaggaaatcctggaaaccatccgcaagagctacaacgctatttaccacgcatcgtgcacaaataagatgggcagggagactgactcaatggcagtggtagaccctcaagccagagtctatggtgtgaagggtctgcgtgtcgtcgacgcttccgctatgcccctactacctccaggacatccgcaatcgactatttacggtctggcggagaaaattgcctgcgatattgcaggtaactgtgatcagccaccaacgcagggcggaggatctccgtctactaacgggacggcgtatccatcccgtggctgcaaacgccgccgaagtcctctatactaggcgtgacgattacttatcctttctttgcatatagtttaaataggtttctaatgtatatattaaaccatgaatcatgtcgccat

SEQ ID NO: 26831 - DNA, 717 bp, Muscodor strobelii
  misc_feature: SGI cDNA ID NO. 569181
  misc_feature: Elevated expression when VOC is produced
  misc_feature: Encodes the peptide sequence at SEQ ID NO 26832
atgtccacagaagaacacacaacaatctccccagcaatcctctacttcgggacccccgtcctgctaataagcacgacaaacccatccggccacacaaacatagcacccaactcctcagcctggtggctaggccactcctgcgtactaggtcttggacccgaatccgcaacacgatccaacatcttacgcacagggcaatgcgttctgaacctgccatcagaatccatgctagaccacatcaacagcctagcagacacgaccgggatccccgtctccgccctcaaggcatcgcggaactaccgttttgtatctgataaatgggcgacctccggtcttcacccgcaagactcggattttgtggcgccgcagaggattaaggagtgtcctgtgcagatggagtgtgaactcctgcagcatatggggcttcgtcctgatttaccggatcgggagggtcttattcttgctgttgagttgcgcgttttgcgcgttcatgttagaagtgatgtgaggatggagggtcatgctaatagagttgatccggataagtggcggcctatcattatgaattttcaggagttttatgggctcggtgggatgaagctcgggagtagtgtgcttggacgggtcgatgaggagtggtataggggcgcgactaggagtgaggctgttaaggtgcctggggatgatgatgatgatgaggttgccagattgtcgtag

SEQ ID NO: 26832 - protein, 238 aa, Muscodor strobelii
  misc_feature: SGI Peptide ID NO. 569181
  misc_feature (6)..(234): NCBI GI: 33316722 Blast Desc: AF443183_2 Jcg001w [Paracoccidioides brasiliensis]
  misc_feature (6)..(234): NCBI GI: 225684501 Blast Desc: conserved [Paracoccidioides brasiliensis Pb03]
  misc_feature (6)..(234): NCBI GI: 226294159 Blast Desc: conserved [Paracoccidioides brasiliensis Pb18]
  misc_feature (6)..(230): NCBI GI: 261189583 Blast Desc: conserved [Ajellomyces dermatitidis SLH14081] gi|239591438|gb|EEQ74019.1| conserved [Ajellomyces dermatitidis SLH14081] gi|239613031|gb|EEQ90018.1| conserved [Ajellomyces
  misc_feature (6)..(215): NCBI GI: 119473681 Blast Desc: NFIA_001680 [Neosartorya fischeri NRRL 181] gi|119406869|gb|EAW16819.1| conserved [Neosartorya fischeri NRRL 181]
  misc_feature (6)..(227): NCBI GI: 146337786 Blast Desc: BRADO0664 [Bradyrhizobium sp. ORS278] gi|146190592|emb|CAL74594.1| ; conserved domain typically associated with flavoprotein oxygenases, DIM6/NTAB family sp.
  misc_feature (9)..(219): NCBI GI: 91974573 Blast Desc: RPD_0091 [Rhodopseudomonas palustris BisB5] gi|91681029|gb|ABE37331.1| conserved [Rhodopseudomonas palustris BisB5]
  misc_feature (6)..(215): NCBI GI: 107027144 Blast Desc: Bcen_4803 [Burkholderia cenocepacia AU 1054] gi|116691464|ref|YP_836997.1| Bcen2424_3365 [Burkholderia cenocepacia HI2424] gi|105896518|gb|ABF79682.1| conserved AU
  misc_feature (6)..(215): NCBI GI: 254249243 Blast Desc: conserved [Burkholderia cenocepacia PC184] gi|124875744|gb|EAY65734.1| conserved [Burkholderia cenocepacia PC184]
  misc_feature (6)..(215): NCBI GI: 256669744 Blast Desc: StAA4_21439 [Streptomyces sp. AA4]
  misc_feature: Useful for introducing or modulating the production of volatile compounds
MSTEEHTTISPAILYFGTPVLLISTTNPSGHTNIAPNSSAWWLGHSCVLGLGPESATRSNILRTGQCVLNLPSESMLDHINSLADTTGIPVSALKASRNYRFVSDKWATSGLHPQDSDFVAPQRIKECPVQMECELLQHMGLRPDLPDREGLILAVELRVLRVHVRSDVRMEGHANRVDPDKWRPIIMNFQEFYGLGGMKLGSSVLGRVDEEWYRGATRSEAVKVPGDDDDDEVARLS

SEQ ID NO: 26833 - DNA, 1559 bp, Muscodor strobelii
  misc_feature: SGI EST ID NO. CUFF.63215.0
  misc_feature: Variant of the nucleotide sequence at SEQ ID NO 26831
gcgcattgcagcctcgctgttgcttctagaattccgagtaacctgatcctccttgttcaactcgtaaatggtgctcgctttaaaaatagcatcatagctcccatatgcatgttggtattgtgctcttccaattggacgaacaaaaatgtctccgaatattcaatggaattcgaccgactccagagttcgaactagcatctagcgtccgcaacggcgacattggttcgggtgcagatctcactatctggactactgagatgagatagttacctatgtactatacgatcctagtgcaacctctaataaagaatgctgtcaatatagccattcgcatactcaaacctcccaacgtaaaatccgcatagcccacgccgcgaagactcataattctcgtctcagactccacggacgccgtggacatctcgagatgagaggcgacgatgatgtatcacggagatgtaagatcttgatcccagtctctcagtctataaagacaggccgagacacaagacaaaacgtgacactctagcaaagcatcacaaatccccttcaaacaagcaacaactcgcaataaaccacatctcccaccataaaacctcacacccaccaccctaactcaaaatgtccacagaagaacacacaacaatctccccagcaatcctctacttcgggacccccgtcctgctaataagcacgacaaacccatccggccacacaaacatagcacccaactcctcagcctggtggctaggccactcctgcgtactaggtcttggacccgaatccgcaacacgatccaacatcttacgcacagggcaatgcgttctgaacctgccatcagaatccatgctagaccacatcaacagcctagcagacacgaccgggatccccgtctccgccctcaaggcatcgcggaactaccgttttgtatctgataaatgggcgacctccggtcttcacccgcaagactcggattttgtggcgccgcagaggattaaggagtgtcctgtgcagatggagtgtgaactcctgcagcatatggggcttcgtcctgatttaccggatcgggagggtcttattcttgctgttgagttgcgcgttttgcgcgttcatgttagaagtgatgtgaggatggagggtcatgctaatagagttgatccggataagtggcggcctatcattatgaattttcaggagttttatgggctcggtgggatgaagctcgggagtagtgtgcttggacgggtcgatgaggagtggtataggggcgcgactaggagtgaggctgttaaggtgcctggggatgatgatgatgatgaggttgccagattgtcgtagatgttttagatcaggggttgagatttgtgagggaaatagatattctagaccttagagataggcggatggtcttaagactagacttatagatgatcgataaccacgaagtgcttgaaccacttcattattaactgttcgacttatcacgttgcgtataagttgtgaagccattcagcaagtacaactgacccacaatagggaacaggaagataatcaagacg

SEQ ID NO: 26834 - DNA, 2604 bp, Muscodor strobelii
  misc_feature: SGI cDNA ID NO. 569182
  misc_feature: Encodes the peptide sequence at SEQ ID NO 26835
atggattcctctccgttgcgaagcaacatggactccgccaaccgcggtgcttcccagcgctcctcccgcaagcgagcccgcaccggcggcgatgcctcctcttccgtcgccgcctccagccccatgccgtcctcgcccccggtcgggttcaacatggcccacggcgccgacgatgacgacgacatcgaggaagagctcgagatccaggacgatctcgacgagcttgaggaggagctcgaggacgatgtcgatctgttccgcgagggttacgagcgagattatcaggccaaagaggacgatgactacgagcgcatcggtctggacgatgagggtgaatttgaggatatggatctaggggccagacgccgcttggaagcccagttgaaccgcagagaccagactgtccgcagaggcctgcccactgcctggaatctgcccgacgaggatgaggacggcgacattgatctcaccgctcagcccaggagaagacgccacgtctacgatgaagaccctgacgatatcatggaccaagacatcatggatgaagagctgtctctggaggctttgcaggatgtcaaggcttcaagtctgaccgattgggtgtctcaacctgccgtccagcgcaccatcaagcgcgagttcaaggctttcctcacagaatacaccgacgagcacggcatctcagtgtacggaaaccgcatcaagacactcggtgagatcaatgccgagtctctcgaggtctcttacgaccacctctcctcctccaaggccatcctggcctacttcttggccaatgctccccaggagatcctggccctgtttgacgaagtcgctatggatgtcgttctccttcattacccggactacgagcgcatccattccgacattcatgttcgtatcttcgatctgcccgtacactacactctccgtcagctgagacagtcacatctcaactgcctggtcagagtgagcggcgttgtcacccgacgaactggcgtcttccctcagctgaagtacgttaagtttgactgcacgaagtgcggcgtgacactgggcccattccaacaagaatcaaatgtcgaggtcaaggtcaccttctgtcaaaactgccagtctcgtggtcctttcactatcaactcggagaagacggtgtaccgtaattaccagaagatcacacttcaagaatctcccggaaccgtgcctgccggtcgtctccctcgacaccgcgaggtcattctcctgtgggacttgatcgacaaggccaagcctggcgaggagatcgaagtcacaggcgtttacagaaacaattacgatgctcaactgaacaatcgtaacggtttccctgtcttcgctaccattcttgaggccaacaacgtcatcaaggctcacgaccagctggctggtttcagactgacagaggaggatgagcaagaaattcgaaagctctctcgtgatccccaaatcatcgacaagattgtcaactcgatggctccgagtatctatggacacactgatatcaagaccgccgttgccctgtctctctttggtggcgtagctaaaacggccaagggttctcatcaagtccgtggtgacatcaatgtcctgttgctcggtgatcccggaacggccaaatcccaagttctcaagtacgttgagaagacggcacatcgtgctgtcttcgccactggccagggtgcttctgctgtcggtctcacggctagtgtccgtcgagaccctctgacgagtgagtggactttggaaggcggtgctttggtgctggcggataaaggcacttgtctcatcgatgagtttgataagatgaacgaccaagatcgaacatctatccacgaggccatggaacaacagacgatctctatctccaaagccggtattgtaacgaccctacaagctcgctgcggtatcattgccgcagctaaccccatcggaggaagatacaactcaacgatacctttctccgccaacgtcgagcttacggagcctatcttgtcgcgttttgatatcttgtgcgtggtcagagatactgttgacccagctgaggacgagcgcctcgcccgtttcatcgttgggtctcacagccgaagccacccttcaacacagggtggcatagagtctcaggatctcgacatggaccaagacactgttcaagagacccagagtgttgctccgagagaaggagaagtcccacaacagcttctccgcaaatacatcctctatgcccgtgagcactgctcgccgaaacttctccacatggacgaggataaagtcgccagactcttcgcggacatgcgcagagagtcactcgctacaggtgcctatcctatcacggtccgtcatttagaagccatcattcgaatttcagaggcattttgccgcatgcgattatcggagtactgcaatgcgcaggacattgatcgtgccatcgccgtgacggttgatagtttcgtcggcagccaaaaggtcagctgcaagaaggctcttgctcgtgcctttgccaagtatacccttgctcgacccggcggttcgacgtcgagaagaggcggtacatcgcaatcacagagaagggctgcggctgcggctgcatag

SEQ ID NO: 26835 - protein, 867 aa, Muscodor strobelii
  misc_feature: SGI Peptide ID NO. 569182
  misc_feature (475)..(822): Pfam Id: PF00493 Pfam Desc: MCM2/3/5 family
  misc_feature (523)..(687): Pfam Id: PF01078 Pfam Desc: Magnesium chelatase, subunit ChlI
  misc_feature (3)..(854): NCBI GI: 121706162 Blast Desc: DNA replication licensing factor Mcm2, [Aspergillus clavatus NRRL 1] gi|119399490|gb|EAW09918.1| DNA replication licensing factor Mcm2, [Aspergillus clavatus NRRL 1]
  misc_feature (3)..(865): NCBI GI: 259487915 Blast Desc: TPA: similar to DNA replication licensing factor (Eurofung) [Aspergillus nidulans FGSC A4]
  misc_feature (60)..(852): NCBI GI: 239613944 Blast Desc: DNA replication licensing factor mcm2 [Ajellomyces dermatitidis ER-3]
  misc_feature (70)..(865): NCBI GI: 67524067 Blast Desc: AN2491.2 [Aspergillus nidulans FGSC A4] gi|40744820|gb|EAA63976.1| AN2491.2 [Aspergillus nidulans FGSC A4]
  misc_feature (5)..(858): NCBI GI: 255938345 Blast Desc: Pc13g15480 [Penicillium chrysogenum Wisconsin 54-1255] gi|211584563|emb|CAP92617.1| Pc13g15480 [Penicillium chrysogenum Wisconsin 54-1255]
  misc_feature (1)..(855): NCBI GI: 225680160 Blast Desc: minichromosome maintenance protein MCM [Paracoccidioides brasiliensis Pb03]
  misc_feature (3)..(865): NCBI GI: 2735931 Blast Desc: DNA replication licensing factor [Emericella nidulans]
  misc_feature (3)..(854): NCBI GI: 242781563 Blast Desc: DNA replication licensing factor Mcm2, [Talaromyces stipitatus ATCC 10500] gi|218719972|gb|EED19391.1| DNA replication licensing factor Mcm2, [Talaromyces stipitatus ATCC
  misc_feature (3)..(867): NCBI GI: 119191340 Blast Desc: DNA replication licensing factor MCM2 [Coccidioides immitis RS]
  misc_feature (3)..(867): NCBI GI: 240106502 Blast Desc: DNA replication licensing factor mcm2, [Coccidioides posadasii C735 delta SOWgp]
MDSSPLRSNMDSANRGASQRSSRKRARTGGDASSSVAASSPMPSSPPVGFNMAHGADDDDDIEEELEIQDDLDELEEELEDDVDLFREGYERDYQAKEDDDYERIGLDDEGEFEDMDLGARRRLEAQLNRRDQTVRRGLPTAWNLPDEDEDGDIDLTAQPRRRRHVYDEDPDDIMDQDIMDEELSLEALQDVKASSLTDWVSQPAVQRTIKREFKAFLTEYTDEHGISVYGNRIKTLGEINAESLEVSYDHLSSSKAILAYFLANAPQEILALFDEVAMDVVLLHYPDYERIHSDIHVRIFDLPVHYTLRQLRQSHLNCLVRVSGVVTRRTGVFPQLKYVKFDCTKCGVTLGPFQQESNVEVKVTFCQNCQSRGPFTINSEKTVYRNYQKITLQESPGTVPAGRLPRHREVILLWDLIDKAKPGEEIEVTGVYRNNYDAQLNNRNGFPVFATILEANNVIKAHDQLAGFRLTEEDEQEIRKLSRDPQIIDKIVNSMAPSIYGHTDIKTAVALSLFGGVAKTAKGSHQVRGDINVLLLGDPGTAKSQVLKYVEKTAHRAVFATGQGASAVGLTASVRRDPLTSEWTLEGGALVLADKGTCLIDEFDKMNDQDRTSIHEAMEQQTISISKAGIVTTLQARCGIIAAANPIGGRYNSTIPFSANVELTEPILSRFDILCVVRDTVDPAEDERLARFIVGSHSRSHPSTQGGIESQDLDMDQDTVQETQSVAPREGEVPQQLLRKYILYAREHCSPKLLHMDEDKVARLFADMRRESLATGAYPITVRHLEAIIRISEAFCRMRLSEYCNAQDIDRAIAVTVDSFVGSQKVSCKKALARAFAKYTLARPGGSTSRRGGTSQSQRRAAAAAA

SEQ ID NO: 26836 - DNA, 5475 bp, Muscodor strobelii
  misc_feature: SGI EST ID NO. CUFF.63359.1
  misc_feature: Variant of the nucleotide sequence at SEQ ID NO 26834
taagacagtatgtatcatgccggagacgagtgacacaggtcgtgcagctcaagaaagagtggtgtagtacgtgaagacgaaaaagaagctaaagaattcctcataatgatctcaagcgccgaagcatcgcatttcattccatttttccagcatcaacctactttacatgcccaaggggccaatccgtatctcacgcttcaacgtaaatagaaccccccttttcccgtcaaaaagcaagaccaccaacaccacgaaaactccaaacctcactaaaccatcctcccaaatcccacgacaactcaataaccactctgttccttccgatgatcctccttcgcagcctccccagcatctttgatcgcctgatcatcacctctcaacttcgcaaaatactccttaatatcctccgccccaatcgccttcccgctctcagcaaactgtttaaagaacggcgtaagtttttcttttagattattatacgccataacaccctcaatggcgcgcacacgatcgacgttcttcaacgctgattcgccgcgctcgtatagcgacccgctgccgtgtgttgacccgttgtctgaggctgagtcagagagcggaggttcgtattcttcttcttgttcgagaagttggggatggagttttaaattcgggaaacatgccgcgcagcgacagaatttatcccggaaatttgacttgacgaagagtgagaatacaccgtctggcgctggtggtagtgatactagcttgcattctggtggctgggctgagacttcttctttctcatcttcgttcttgattttgattggggtctcgctcggtactggcgcatcggacgacgatgtctggtcctcggggtcgttcttaatgcgcttagccgcttgctcgtctggggtattgccgtcttcttccaatttgcgcttccttgtcatcgaggatacctcttcttctgcatttgcttccttttggaggaagatagctggtagaaagcccggcgtgcctgcgtatctcttaatccaggggtaagcctcgacacacttatagcacagaaaatggtcgaaatcatcttcctctggaaacccgtcggggagaggaacatcctcgtcgtcttccactacgtcgtgcacaccattggttggctcggtctcgccgttctcttgaggcgcgtcttcggcgatgggggcgagagtgccactactattggcggcggggttcttcttgggcatcttctcgtaccacttgggcccttgtccgaccaagcagcccgggtgataccagtcttcgccacagccgccagtcaggtgggtgccgagcccgaggcactggaacatggtgcccttctgctcgtgggggctgtagtctatggagcaggagcagaagcggttgcggaagttctggttgtacttgttggcggggtcgggcagctcggagtggacgtggccctgggtctgggtgtcgggatggatgcgcagggtgcagggctggtcgggcttgaagcgggtggtgccgcagtcgcaggtgaagttgcgcttctggaagatctcgaccagctcgtgctcgccgtggcactggacggagcacgagtagcagacgccggcggggctgaaggcgtcggtgggatcggcgggcggggggttgcaggtcagacaggcgtagatgttctggcgcagagagccgagaggtctggtacagttcttaatgctctatatgacacaagaatagagggcgttagcgactgcgggagtgtcttgcgatagtttcgggggggcatacgtagggcagagcctcgcgggcgtcggcttccagctgcatctgatctctgataaagtcggctgcagtctgggagtcttcagacttctgcgagatgctgtcgcggcgggaggatatggtaacgacattatcgttgctctgaatggtatccttgttgtcgtcgttggtcgcatcgtggacggtgggagctggtggagggtccatcttcggtcgcgtttggcagcgtttgcgcccgtatcaatgcaaacgaggcgcgagtggacaagattaaataaggaccaaaagacaggacaagaaataaggagggcagatatgcagtgagaggcaacacgaggataaaaaccaggaaggacgacctcgacggtatgtcgaagtgttggttagagatgtcgagctcgcggtcgcaatgctcgatgctgtgtctaagtgctagaccgatgatgtaacaccaactgctcaggggacgtgtctactgtaaggcccactggagcgacgggatatctgcgcctgtctgttcgcgcatgccctccagtctccactaaaaagttgcagggcgtgctgaaagacaagacccatcgacctaaggctaaaaggtggccaggacagggcaagcgccactttacgcgcctacgcgactgcaacgcgttctcgacgcgactccctttaagtgcaagagcaatttggcgggaaacgggtctcagttgctagattcgacacgacgcactccaccaagactccccctctcccagaccatccttggttgacattccgattgacattctcgcccagcacttcgcatcacaggaatctactcatccattggaactgcacttgttcaccttgtgttttgcgtgtaaaaagggagtttgaccttcaccatggattcctctccgttgcgaagcaacatggactccgccaaccgcggtgcttcccagcgctcctcccgcaagcgagcccgcaccggcggcgatgcctcctcttccgtcgccgcctccagccccatgccgtcctcgcccccggtcgggttcaacatggcccacggcgccgacgatgacgacgacatcgaggaagagctcgagatccaggacgatctcgacgagcttgaggaggagctcgaggacgatgtcgatctgttccgcgagggttacgagcgagattatcaggccaaagaggacgatgactacgagcgcatcggtctggacgatgagggtgaatttgaggatatggatctaggggccagacgccgcttggaagcccagttgaaccgcagagaccagactgtccgcagaggcctgcccactgcctggaatctgcccgacgaggatgaggacggcgacattgatctcaccgctcagcccaggagaagacgccacgtctacgatgaagaccctgacgatatcatggaccaagacatcatggatgaagagctgtctctggaggctttgcaggatgtcaaggcttcaagtctgaccgattgggtgtctcaacctgccgtccagcgcaccatcaagcgcgagttcaaggctttcctcacagaatacaccgacgagcacggcatctcagtgtacggaaaccgcatcaagacactcggtgagatcaatgccgagtctctcgaggtctcttacgaccacctctcctcctccaaggccatcctggcctacttcttggccaatgctccccaggagatcctggccctgtttgacgaagtcgctatggatgtcgttctccttcattacccggactacgagcgcatccattccgacattcatgttcgtatcttcgatctgcccgtacactacactctccgtcagctgagacagtcacatctcaactgcctggtcagagtgagcggcgttgtcacccgacgaactggcgtcttccctcagctgaagtacgttaagtttgactgcacgaagtgcggcgtgacactgggcccattccaacaagaatcaaatgtcgaggtcaaggtcaccttctgtcaaaactgccagtctcgtggtcctttcactatcaactcggagaagacggtgtaccgtaattaccagaagatcacacttcaagaatctcccggaaccgtgcctgccggtcgtctccctcgacaccgcgaggtcattctcctgtgggacttgatcgacaaggccaagcctggcgaggagatcgaagtcacaggcgtttacagaaacaattacgatgctcaactgaacaatcgtaacggtttccctgtcttcgctaccattcttgaggccaacaacgtcatcaaggctcacgaccagctggctggtttcagactgacagaggaggatgagcaagaaattcgaaagctctctcgtgatccccaaatcatcgacaagattgtcaactcgatggctccgagtatctatggacacactgatatcaagaccgccgttgccctgtctctctttggtggcgtagctaaaacggccaagggttctcatcaagtccgtggtgacatcaatgtcctgttgctcggtgatcccggaacggccaaatcccaagttctcaagtacgttgagaagacggcacatcgtgctgtcttcgccactggccagggtgcttctgctgtcggtctcacggctagtgtccgtcgagaccctctgacgagtgagtggactttggaaggcggtgctttggtgctggcggataaaggcacttgtctcatcgatgagtttgataagatgaacgaccaagatcgaacatctatccacgaggccatggaacaacagacgatctctatctccaaagccggtattgtaacgaccctacaagctcgctgcggtatcattgccgcagctaaccccatcggaggaagatacaactcaacgatacctttctccgccaacgtcgagcttacggagcctatcttgtcgcgttttgatatcttgtgcgtggtcagagatactgttgacccagctgaggacgagcgcctcgcccgtttcatcgttgggtctcacagccgaagccacccttcaacacagggtggcatagagtctcaggatctcgacatggaccaagacactgttcaagagacccagagtgttgctccgagagaaggagaagtcccacaacagcttctccgcaaatacatcctctatgcccgtgagcactgctcgccgaaacttctccacatggacgaggataaagtcgccagactcttcgcggacatgcgcagagagtcactcgctacaggtgcctatcctatcacggtccgtcatttagaagccatcattcgaatttcagaggcattttgccgcatgcgattatcggagtactgcaatgcgcaggacattgatcgtgccatcgccgtgacggttgatagtttcgtcggcagccaaaaggtcagctgcaagaaggctcttgctcgtgcctttgccaagtatacccttgctcgacccggcggttcgacgtcgagaagaggcggtacatcgcaatcacagagaagggctgcggctgcggctgcatagagttgatgtgttgaactttgtatgaatgatgaaaatgagacgtgatggatgtggtgatacaaatggaagtacgattaggaatgggctcaggtgtctggcgtgttgtgtacatgagatttgattggagagatcagcatgagcagagaatggcttggttttgattgatcatggcttttgatagtacaatacccaaaaaaaaaatccgaactacttctgattctcg

SEQ ID NO: 26837 - DNA, 1605 bp, Muscodor strobelii
  misc_feature: SGI cDNA ID NO. 569183
  misc_feature: Encodes the peptide sequence at SEQ ID NO 26838
atggaccctccaccagctcccaccgtccacgatgcgaccaacgacgacaacaaggataccattcagagcaacgataatgtcgttaccatatcctcccgccgcgacagcatctcgcagaagtctgaagactcccagactgcagccgactttatcagagatcagatgcagctggaagccgacgcccgcgaggctctgccctacagcattaagaactgtaccagacctctcggctctctgcgccagaacatctacgcctgtctgacctgcaaccccccgcccgccgatcccaccgacgccttcagccccgccggcgtctgctactcgtgctccgtccagtgccacggcgagcacgagctggtcgagatcttccagaagcgcaacttcacctgcgactgcggcaccacccgcttcaagcccgaccagccctgcaccctgcgcatccatcccgacacccagacccagggccacgtccactccgagctgcccgaccccgccaacaagtacaaccagaacttccgcaaccgcttctgctcctgctccatagactacagcccccacgagcagaagggcaccatgttccagtgcctcgggctcggcacccacctgactggcggctgtggcgaagactggtatcacccgggctgcttggtcggacaagggcccaagtggtacgagaagatgcccaagaagaaccccgccgccaatagtagtggcactctcgcccccatcgccgaagacgcgcctcaagagaacggcgagaccgagccaaccaatggtgtgcacgacgtagtggaagacgacgaggatgttcctctccccgacgggtttccagaggaagatgatttcgaccattttctgtgctataagtgtgtcgaggcttacccctggattaagagatacgcaggcacgccgggctttctaccagctatcttcctccaaaaggaagcaaatgcagaagaagaggtatcctcgatgacaaggaagcgcaaattggaagaagacggcaataccccagacgagcaagcggctaagcgcattaagaacgaccccgaggaccagacatcgtcgtccgatgcgccagtaccgagcgagaccccaatcaaaatcaagaacgaagatgagaaagaagaagtctcagcccagccaccagaatgcaagctagtatcactaccaccagcgccagacggtgtattctcactcttcgtcaagtcaaatttccgggataaattctgtcgctgcgcggcatgtttcccgaatttaaaactccatccccaacttctcgaacaagaagaagaatacgaacctccgctctctgactcagcctcagacaacgggtcaacacacggcagcgggtcgctatacgagcgcggcgaatcagcgttgaagaacgtcgatcgtgtgcgcgccattgagggtgttatggcgtataataatctaaaagaaaaacttacgccgttctttaaacagtttgctgagagcgggaaggcgattggggcggaggatattaaggagtattttgcgaagttgagaggtgatgatcaggcgatcaaagatgctggggaggctgcgaaggaggatcatcggaaggaacagagtggttattga

SEQ ID NO: 26838 - protein, 534 aa, Muscodor strobelii
  misc_feature: SGI Peptide ID NO. 569183
  misc_feature (70)..(147): Pfam Id: PF02207 Pfam Desc: zinc finger in N-recognin (UBR box)
  misc_feature (33)..(534): NCBI GI: 256726262 Blast Desc: NECHADRAFT_3131 [Nectria haematococca mpVI 77-13-4]
  misc_feature (55)..(534): NCBI GI: 171694361 Blast Desc: protein product [Podospora anserina] gi|170947129|emb|CAP73934.1| protein product [Podospora anserina]
  misc_feature (33)..(532): NCBI GI: 145612139 Blast Desc: MGG_08121 [Magnaporthe grisea 70-15] gi|145019366|gb|EDK03594.1| MGG_08121 [Magnaporthe grisea 70-15]
  misc_feature (32)..(534): NCBI GI: 46111479 Blast Desc: FG02621.1 [Gibberella zeae PH-1]
  misc_feature (20)..(534): NCBI GI: 261355726 Blast Desc: mlo2 [Verticillium albo-atrum VaMs.102]
  misc_feature (45)..(534): NCBI GI: 154294956 Blast Desc: BC1G_13344 [Botryotinia fuckeliana B05.10] gi|150844473|gb|EDN19666.1| BC1G_13344 [Botryotinia fuckeliana B05.10]
  misc_feature (27)..(516): NCBI GI: 116197723 Blast Desc: CHGG_07017 [Chaetomium globosum CBS 148.51] gi|88178296|gb|EAQ85764.1| CHGG_07017 [Chaetomium globosum CBS 148.51]
  misc_feature (28)..(524): NCBI GI: 226291956 Blast Desc: conserved [Paracoccidioides brasiliensis Pb18]
  misc_feature (28)..(524): NCBI GI: 225680161 Blast Desc: conserved [Paracoccidioides brasiliensis Pb03]
  misc_feature (32)..(533): NCBI GI: 119191342 Blast Desc: CIMG_00048 [Coccidioides immitis RS]
MDPPPAPTVHDATNDDNKDTIQSNDNVVTISSRRDSISQKSEDSQTAADFIRDQMQLEADAREALPYSIKNCTRPLGSLRQNIYACLTCNPPPADPTDAFSPAGVCYSCSVQCHGEHELVEIFQKRNFTCDCGTTRFKPDQPCTLRIHPDTQTQGHVHSELPDPANKYNQNFRNRFCSCSIDYSPHEQKGTMFQCLGLGTHLTGGCGEDWYHPGCLVGQGPKWYEKMPKKNPAANSSGTLAPIAEDAPQENGETEPTNGVHDVVEDDEDVPLPDGFPEEDDFDHFLCYKCVEAYPWIKRYAGTPGFLPAIFLQKEANAEEEVSSMTRKRKLEEDGNTPDEQAAKRIKNDPEDQTSSSDAPVPSETPIKIKNEDEKEEVSAQPPECKLVSLPPAPDGVFSLFVKSNFRDKFCRCAACFPNLKLHPQLLEQEEEYEPPLSDSASDNGSTHGSGSLYERGESALKNVDRVRAIEGVMAYNNLKEKLTPFFKQFAESGKAIGAEDIKEYFAKLRGDDQAIKDAGEAAKEDHRKEQSGY

SEQ ID NO: 26839 - DNA, 2559 bp, Muscodor strobelii
  misc_feature: SGI EST ID NO. CUFF.63358.2
  misc_feature: Variant of the nucleotide sequence at SEQ ID NO 26837
tggtgaaggtcaaactccctttttacacgcaaaacacaaggtgaacaagtgcagttccaatggatgagtagattcctgtgatgcgaagtgctgggcgagaatgtcaatcggaatgtcaaccaaggatggtctgggagagggggagtcttggtggagtgcgtcgtgtcgaatctagcaactgagacccgtttcccgccaaattgctcttgcacttaaagggagtcgcgtcgagaacgcgttgcagtcgcgtaggcgcgtaaagtggcgcttgccctgtcctggccaccttttagccttaggtcgatgggtcttgtctttcagcacgccctgcaactttttagtggagactggagggcatgcgcgaacagacaggcgcagatatcccgtcgctccagtgggccttacagtagacacgtcccctgagcagttggtgttacatcatcggtctagcacttagacacagcatcgagcattgcgaccgcgagctcgacatctctaaccaacacttcgacataccgtcgaggtcgtccttcctggtttttatcctcgtgttgcctctcactgcatatctgccctccttatttcttgtcctgtcttttggtccttatttaatcttgtccactcgcgcctcgtttgcattgatacgggcgcaaacgctgccaaacgcgaccgaagatggaccctccaccagctcccaccgtccacgatgcgaccaacgacgacaacaaggataccattcagagcaacgataatgtcgttaccatatcctcccgccgcgacagcatctcgcagaagtctgaagactcccagactgcagccgactttatcagagatcagatgcagctggaagccgacgcccgcgaggctctgccctacagcattaagaactgtaccagacctctcggctctctgcgccagaacatctacgcctgtctgacctgcaaccccccgcccgccgatcccaccgacgccttcagccccgccggcgtctgctactcgtgctccgtccagtgccacggcgagcacgagctggtcgagatcttccagaagcgcaacttcacctgcgactgcggcaccacccgcttcaagcccgaccagccctgcaccctgcgcatccatcccgacacccagacccagggccacgtccactccgagctgcccgaccccgccaacaagtacaaccagaacttccgcaaccgcttctgctcctgctccatagactacagcccccacgagcagaagggcaccatgttccagtgcctcgggctcggcacccacctgactggcggctgtggcgaagactggtatcacccgggctgcttggtcggacaagggcccaagtggtacgagaagatgcccaagaagaaccccgccgccaatagtagtggcactctcgcccccatcgccgaagacgcgcctcaagagaacggcgagaccgagccaaccaatggtgtgcacgacgtagtggaagacgacgaggatgttcctctccccgacgggtttccagaggaagatgatttcgaccattttctgtgctataagtgtgtcgaggcttacccctggattaagagatacgcaggcacgccgggctttctaccagctatcttcctccaaaaggaagcaaatgcagaagaagaggtatcctcgatgacaaggaagcgcaaattggaagaagacggcaataccccagacgagcaagcggctaagcgcattaagaacgaccccgaggaccagacatcgtcgtccgatgcgccagtaccgagcgagaccccaatcaaaatcaagaacgaagatgagaaagaagaagtctcagcccagccaccagaatgcaagctagtatcactaccaccagcgccagacggtgtattctcactcttcgtcaagtcaaatttccgggataaattctgtcgctgcgcggcatgtttcccgaatttaaaactccatccccaacttctcgaacaagaagaagaatacgaacctccgctctctgactcagcctcagacaacgggtcaacacacggcagcgggtcgctatacgagcgcggcgaatcagcgttgaagaacgtcgatcgtgtgcgcgccattgagggtgttatggcgtataataatctaaaagaaaaacttacgccgttctttaaacagtttgctgagagcgggaaggcgattggggcggaggatattaaggagtattttgcgaagttgagaggtgatgatcaggcgatcaaagatgctggggaggctgcgaaggaggatcatcggaaggaacagagtggttattgagttgtcgtgggatttgggaggatggtttagtgaggtttggagttttcgtggtgttggtggtcttgctttttgacgggaaaaggggggttctatttacgttgaagcgtgagatacggattggccccttgggcatgtaaagtaggttgatgctggaaaaatggaatgaaatgcgatgcttcggcgcttgagatcattatgaggaattctttagcttctttttcgtcttcacgtactacaccactctttcttgagctgcacgacctgtgtcactcgtctccg

SEQ ID NO: 26840 - DNA, 1218 bp, Muscodor strobelii
  misc_feature: SGI cDNA ID NO. 569184
  misc_feature: Encodes the peptide sequence at SEQ ID NO 26841
atgtccgctctcacaactagaatgtctcaggccctgtacgaacaactcgagaaagacgaaattcgcgtcatcgacctcttgccgggcgaggccgaagatgatcttgtgtgccagctacgaacggtatcccttcagagtgatacagtatacgaagctgtttcatacgtatggggcgatccaacggttacgacttctatcagcgtgaacggactaaaattccaaatcaccatcaaccttgaggctgcactacgtgtctttaggctttcgtctacccgaactctttgggtggacgccatttgcatcaaccagtccgatcttagggagaaaagtattcaggtgcctcttatggtatcaatctatcctaaagcggaagaagtactcgtatggcttggcccatcatcaccatggatggcaagttggttacagtgggtagataaacacgcagaaactgcttcgatgggtgtctttcaaatgataccaaagcgatgggcaagtcttctctcaagaatgaaagaaagaatcacgcgcaagtcaccacctacagtagcacaattggaaactatgctggaagatttacgcgcatttaggggttcctcacagttctgggcactcaactactggaggcgagtatggacatttcaagaatttgtcttatctcgaaaggagccgctttgctttctcggtaccgagcggccgttccgagctgccgcgatgtcgtatcgtgcgactggactcatacagaatgttgttgcgataatacagaagatgaactcgcagaaagaggttattattcaaggcccgccaggttttgaagcacagtggcgggaaacaattgacccgataacactagaagacatcaggtttcataatgacaacgtgatcgacgctcgttcaagacaggagatttgtcctgttgactattctaaggatcccaacactctcgtgttcgaaattttgtgttatataatcaacattgagaaatatctacgcatattccttgtctttggcctacccgtcgacggcgtgacagacggtgatctcgttgttctacctccagaggtcaggcatcccatgattttgacaagagatgagacgagccattacaagatggtgggaactgcgattgtcgacggagtcatggactgcgaagaactatatgacgtggcttatgtcaaagagatcgcagaacaggctccgagagagtttttaatccgctga

SEQ ID NO: 26841 - protein, 405 aa, Muscodor strobelii
  misc_feature: SGI Peptide ID NO. 569184
  misc_feature (50)..(215): Pfam Id: PF06985 Pfam Desc: Heterokaryon incompatibility protein (HET)
  misc_feature (50)..(132): Pfam Id: PF06985 Pfam Desc: Heterokaryon incompatibility protein (HET)
  misc_feature (17)..(238): NCBI GI: 119472507 Blast Desc: HET domain protein [Neosartorya fischeri NRRL 181] gi|119406504|gb|EAW16455.1| HET domain protein [Neosartorya fischeri NRRL 181]
  misc_feature (20)..(238): NCBI GI: 115492697 Blast Desc: [Aspergillus terreus NIH2624] gi|114197836|gb|EAU39536.1| [Aspergillus terreus NIH2624]
  misc_feature (17)..(238): NCBI GI: 70992479 Blast Desc: HET domain protein [Aspergillus fumigatus Af293] gi|66848721|gb|EAL89050.1| HET domain protein [Aspergillus fumigatus Af293]
  misc_feature (17)..(238): NCBI GI: 159124659 Blast Desc: HET domain protein [Aspergillus fumigatus A1163]
  misc_feature (12)..(220): NCBI GI: 154292443 Blast Desc: BC1G_14540 [Botryotinia fuckeliana B05.10] gi|150846126|gb|EDN21319.1| BC1G_14540 [Botryotinia fuckeliana B05.10]
  misc_feature (9)..(230): NCBI GI: 154305655 Blast Desc: BC1G_07642 [Botryotinia fuckeliana B05.10] gi|150853161|gb|EDN28353.1| BC1G_07642 [Botryotinia fuckeliana B05.10]
  misc_feature (17)..(229): NCBI GI: 145245097 Blast Desc: An11g08520 [Aspergillus niger] gi|134079510|emb|CAK46042.1| protein product [Aspergillus niger]
  misc_feature (20)..(261): NCBI GI: 169607951 Blast Desc: SNOG_07040 [Phaeosphaeria nodorum SN15] gi|111064571|gb|EAT85691.1| SNOG_07040 [Phaeosphaeria nodorum SN15]
  misc_feature (13)..(237): NCBI GI: 115401102 Blast Desc: [Aspergillus terreus NIH2624] gi|114190080|gb|EAU31780.1| [Aspergillus terreus NIH2624]
  misc_feature (3)..(131): NCBI GI: 145234110 Blast Desc: An02g12950 [Aspergillus niger] gi|134057368|emb|CAK37923.1| protein product [Aspergillus niger]
MSALTTRMSQALYEQLEKDEIRVIDLLPGEAEDDLVCQLRTVSLQSDTVYEAVSYVWGDPTVTTSISVNGLKFQITINLEAALRVFRLSSTRTLWVDAICINQSDLREKSIQVPLMVSIYPKAEEVLVWLGPSSPWMASWLQWVDKHAETASMGVFQMIPKRWASLLSRMKERITRKSPPTVAQLETMLEDLRAFRGSSQFWALNYWRRVWTFQEFVLSRKEPLCFLGTERPFRAAAMSYRATGLIQNVVAIIQKMNSQKEVIIQGPPGFEAQWRETIDPITLEDIRFHNDNVIDARSRQEICPVDYSKDPNTLVFEILCYIINIEKYLRIFLVFGLPVDGVTDGDLVVLPPEVRHPMILTRDETSHYKMVGTAIVDGVMDCEELYDVAYVKEIAEQAPREFLIR

SEQ ID NO: 26842 - DNA, 1314 bp, Muscodor strobelii
  misc_feature: SGI cDNA ID NO. 569185
  misc_feature: Encodes the peptide sequence at SEQ ID NO 26843
atggccgcgtccaagcctgaaatagccttcatcggcctcggagccatgggcttcggaatggcaacaaacctcataaagcaaggttatagtgtgacgggtttcgatgtttggccaccaacattagagcggttccgtggtgctggcggggtcacagcgacgacgcccgctgagactgtccgcggccgggactatatcgtctgtatggttgccaccgccgctcaagcacaagccgtactgcttgaaggcgaaaatccagcgatagatgcgttatcgcaaggcgcatctttattactttgctctacagtgccatgtgcgtatgttcagagtctggaggcacagctgaaagaaagggatcgtggcgacgtcttgttagtcgactgccctgtatctggcggtaccagccgtgcagcagacggaacattgtccatcatggctggagcatcagaagccgctatcaaaaaagggcgattcctgctacaagagatgtctgaccctgcaaagctatacattgtgcctagcggcatcggaggtggcagtaatctgaagatggtgcatcaagtcctcgccgccgtcggcattctatcgacaagtgaagcaatgggcttcgcgcaacacttaggcctcgacctcgcatatacactagacagtatacaaggctcagatgcgagagcgtggatgttcggacatcgcgggccacggatactaacagagtttaagcctattgctagtgccgtaacaattattcttaaggactctggcatcatcacctccgaggccgcacggatggagttcccaacaccgatgacgagcgcggcggagcaggtatacctctcagctgttggaaggggctatggcgcagatgatgacagtagtataataaggctgtatacggagggtgcagctgcatcaacaaaggggacggataaagacgagaagaaactcgctctcgtcaaggcgttactcaagggcatatatctctgtgcaacggcagaagcactagccttttcgaaacgatgcgatcttgacctcgaccaagtttttgatctatgcatcaacgctgctggtggatcattagttttcgagacctttggacctcaaataatggacaagctacgtgggaaggacatatattatcaacgtcatggtctccgatctatagccgtgcaactccaggaggccgtctcggaggcccagcgactgaagatgccattatatctcggaacacaagccagcaatctgatacgactcgctcttcaaaagtcgcatggtaataacttgcttagcgcggagatcgttagagtttgggagtcttag

SEQ ID NO: 26843 - protein, 437 aa, Muscodor strobelii
  misc_feature: SGI Peptide ID NO. 569185
  misc_feature (5)..(172): Pfam Id: PF03446 Pfam Desc: NAD binding domain of 6-phosphogluconate dehydrogenase
  misc_feature (7)..(33): Pfam Id: PF03807 Pfam Desc: NADP oxidoreductase coenzyme F420-dependent
  misc_feature (5)..(163): Pfam Id: PF03446 Pfam Desc: NAD binding domain of 6-phosphogluconate dehydrogenase
  misc_feature (1)..(437): NCBI GI: 164429449 Blast Desc: NCU10110 [Neurospora crassa OR74A] gi|40882220|emb|CAF06045.1| related to 3-hydroxyisobutyrate dehydrogenase, mitochondrial precursor [Neurospora crassa] crassa
  misc_feature (1)..(435): NCBI GI: 145609646 Blast Desc: MGG_03097 [Magnaporthe grisea 70-15] gi|145017048|gb|EDK01411.1| MGG_03097 [Magnaporthe grisea 70-15]
  misc_feature (1)..(424): NCBI GI: 149210857 Blast Desc: MGCH7_ch7g901 [Magnaporthe grisea 70-15] gi|86196856|gb|EAQ71494.1| MGCH7_ch7g901 [Magnaporthe grisea 70-15]
  misc_feature (1)..(419): NCBI GI: 171690968 Blast Desc: protein product [Podospora anserina] gi|170945432|emb|CAP71544.1| protein product [Podospora anserina]
  misc_feature (1)..(437): NCBI GI: 116195712 Blast Desc: CHGG_04454 [Chaetomium globosum CBS 148.51] gi|88180367|gb|EAQ87835.1| CHGG_04454 [Chaetomium globosum CBS 148.51]
  misc_feature (1)..(435): NCBI GI: 256724281 Blast Desc: NECHADRAFT_53431 [Nectria haematococca mpVI 77-13-4]
  misc_feature (1)..(436): NCBI GI: 212536590 Blast Desc: oxidoreductase, [Penicillium marneffei ATCC 18224] gi|210070850|gb|EEA24940.1| oxidoreductase, [Penicillium marneffei ATCC 18224]
  misc_feature (5)..(436): NCBI GI: 238843028 Blast Desc: 3-hydroxyisobutyrate dehydrogenase [Microsporum canis CBS 113480]
  misc_feature (4)..(436): NCBI GI: 255954555 Blast Desc: Pc21g09940 [Penicillium chrysogenum Wisconsin 54-1255] gi|211589741|emb|CAP95891.1| Pc21g09940 [Penicillium chrysogenum Wisconsin 54-1255]
  misc_feature (3)..(414): NCBI GI: 169596044 Blast Desc: SNOG_00771 [Phaeosphaeria nodorum SN15] gi|111071146|gb|EAT92266.1| SNOG_00771 [Phaeosphaeria nodorum SN15]
  misc_feature (3)..(298): SWISSPROT Homolog: EC 1.1.1.31 3-hydroxyisobutyrate dehydrogenase
MAASKPEIAFIGLGAMGFGMATNLIKQGYSVTGFDVWPPTLERFRGAGGVTATTPAETVRGRDYIVCMVATAAQAQAVLLEGENPAIDALSQGASLLLCSTVPCAYVQSLEAQLKERDRGDVLLVDCPVSGGTSRAADGTLSIMAGASEAAIKKGRFLLQEMSDPAKLYIVPSGIGGGSNLKMVHQVLAAVGILSTSEAMGFAQHLGLDLAYTLDSIQGSDARAWMFGHRGPRILTEFKPIASAVTIILKDSGIITSEAARMEFPTPMTSAAEQVYLSAVGRGYGADDDSSIIRLYTEGAAASTKGTDKDEKKLALVKALLKGIYLCATAEALAFSKRCDLDLDQVFDLCINAAGGSLVFETFGPQIMDKLRGKDIYYQRHGLRSIAVQLQEAVSEAQRLKMPLYLGTQASNLIRLALQKSHGNNLLSAEIVRVWES

SEQ ID NO: 26844 - DNA, 602 bp, Muscodor strobelii
  misc_feature: SGI EST ID NO. CUFF.63239.0
  misc_feature: Variant of the nucleotide sequence at SEQ ID NO 26842
gattgaatgaaatcgctagtatgcatcggcaaattcatctgaaattccgggacgattatccccggtcaaagtagattcaggctgtttaaaccacgacaggcgagtatcgtgactgttcaaacagtgagtcaagatatcggcaagattaacagcctcggttcgcgttcgcattggatcttcccgtagttatgtaagtcagacacctgcgcctgtcgacttgatgaactgatgacgtatggtagtgatgtgctttagtataccacgtcaaatcagtcgtccggttttgaattcttcattcgcgtttcgagacataccgcgcagcttgagtagagtagcattcgtccgagttcgttctcactctcactctcacgaatcaagttcaagtcaacaactcacgaacaacgtctatctcaaaatggccgcgtccaagcctgaaatagccttcatcggcctcggagccatgggcttcggaatggcaacaaacctcataaagcaaggttatagtgtgacgggtttcgatgtttggccaccaacattagagcggttccgtggtgctggcggggtcacagcgacgacgcccgctgagactgtccgcggccggg

SEQ ID NO: 26845 - DNA, 873 bp, Muscodor strobelii
  misc_feature: SGI cDNA ID NO. 569186
  misc_feature: Encodes the peptide sequence at SEQ ID NO 26846
atggttcgccctccattgtctcaaaaccggtcaatggccatcctaaacgcagcccgcgacggcgggtacggcgtcccaggaatgtgctgctacaacatggaatcgataatcgccacagtccgcgcagcagaagccgcaaactcaccagccatggtcctactcttcccttgggccatcgaatacgccggcgaagctctcgtccgcgccgccgcgtctgcagcccacggcgcgaaagtccctgtctctttacatctcgaccactgtcaaaccccagagttagttagaagggcagctgatatcgaagatggattcgatagcatcatgtgcgacatgagccattacgagaaagaagagaatctcgccttgacgaaagaattagccgcatactgccacgagcgtgggatcgcagcagaggccgaaccgggccgtatcgaaggtggtgaagacggagtcgccgagacagcggatctagagtctatcctcaccacccccgaacaagcggaagaattcgtcgcaacgggtctagaaatgcttgctcccgccttcgggaacgtacacggcgagtatggaccgcggggtatccagctagagtatgaccgtcttgaggctatcaataaagcagtcggggaccgtgtcagactggtgctacatggtgcggacccgtttactgaggaaattttccaaagatgtatcaaggcgggtgttagtaagataaatatcaacaagggtatgaataagcactatgctgctgtgcagaaggagatggagggcaaaccgcttacgagcgtcattgaggccggcactgatgctatgcagaaggctattgagcagtatatgcattggcttggtagtgcgggtaagggtggattgtag

SEQ ID NO: 26846 - protein, 290 aa, Muscodor strobelii
  misc_feature: SGI Peptide ID NO. 569186
  misc_feature (7)..(288): Pfam Id: PF01116 Pfam Desc: Fructose-bisphosphate aldolase class-II
  misc_feature (14)..(241): Pfam Id: PF01116 Pfam Desc: Fructose-bisphosphate aldolase class-II
  misc_feature (1)..(287): NCBI GI: 116195710 Blast Desc: conserved [Chaetomium globosum CBS 148.51] gi|88180366|gb|EAQ87834.1| conserved [Chaetomium globosum CBS 148.51]
  misc_feature (1)..(287): NCBI GI: 85085307 Blast Desc: NCU04401 [Neurospora crassa OR74A] gi|28918570|gb|EAA28242.1| NCU04401 [Neurospora crassa OR74A] gi|40882221|emb|CAF06046.1| related to fructose-bisphosphate
  misc_feature (3)..(287): NCBI GI: 171690966 Blast Desc: protein product [Podospora anserina] gi|170945431|emb|CAP71543.1| protein product [Podospora anserina]
  misc_feature (7)..(287): NCBI GI: 39971259 Blast Desc: MGG_03096 [Magnaporthe grisea 70-15] gi|149210853|ref|XP_001522801.1| MGCH7_ch7g899 [Magnaporthe grisea 70-15] gi|86196854|gb|EAQ71492.1| MGCH7_ch7g899 grisea
  misc_feature (4)..(287): NCBI GI: 256724181 Blast Desc: NECHADRAFT_87406 [Nectria haematococca mpVI 77-13-4]
  misc_feature (1)..(287): NCBI GI: 242796199 Blast Desc: fructose-bisphosphate aldolase, [Talaromyces stipitatus ATCC 10500] gi|218719337|gb|EED18757.1| fructose-bisphosphate aldolase, [Talaromyces stipitatus ATCC
  misc_feature (1)..(287): NCBI GI: 212536592 Blast Desc: fructose-bisphosphate aldolase, [Penicillium marneffei ATCC 18224] gi|212536594|ref|XP_002148453.1| fructose-bisphosphate aldolase, [Penicillium marneffei ATCC ATCC
  misc_feature (4)..(287): NCBI GI: 121713432 Blast Desc: fructose-bisphosphate aldolase, [Aspergillus clavatus NRRL 1] gi|119402480|gb|EAW12901.1| fructose-bisphosphate aldolase, [Aspergillus clavatus NRRL 1]
  misc_feature (6)..(287): NCBI GI: 119479265 Blast Desc: fructose-bisphosphate aldolase, [Neosartorya fischeri NRRL 181] gi|119407815|gb|EAW17764.1| fructose-bisphosphate aldolase, [Neosartorya fischeri NRRL 181]
  misc_feature (6)..(287): NCBI GI: 169786067 Blast Desc: [Aspergillus oryzae RIB40] gi|238507001|ref|XP_002384702.1| fructose-bisphosphate aldolase, [Aspergillus flavus NRRL3357] gi|83776242|dbj|BAE66361.1| protein
  misc_feature (14)..(287): SWISSPROT Homolog: EC 4.1.2.13 Fructose-bisphosphate aldolase
MVRPPLSQNRSMAILNAARDGGYGVPGMCCYNMESIIATVRAAEAANSPAMVLLFPWAIEYAGEALVRAAASAAHGAKVPVSLHLDHCQTPELVRRAADIEDGFDSIMCDMSHYEKEENLALTKELAAYCHERGIAAEAEPGRIEGGEDGVAETADLESILTTPEQAEEFVATGLEMLAPAFGNVHGEYGPRGIQLEYDRLEAINKAVGDRVRLVLHGADPFTEEIFQRCIKAGVSKININKGMNKHYAAVQKEMEGKPLTSVIEAGTDAMQKAIEQYMHWLGSAGKGGL

SEQ ID NO: 26847 - DNA, 1303 bp, Muscodor strobelii
  misc_feature: SGI EST ID NO. CUFF.63248.0
  misc_feature: Variant of the nucleotide sequence at SEQ ID NO 26845
ctaaatctgacaccaatacgttaacgtactacccaaactaccccactaacgtggggtattatccgcgtgaatggggaagaccgtgttagtgacgacgatggggggatgatgttgcgctgtagtcggggatcaatccgaaaaatgaaatggttttacaaaactgttgcgattcctgtggtgcagctgtttatgcactgtgattgattttctagtacatttcttttcattgtaccttttagatcagccacaagctattctcgagacagtatattgtcgcatcgctgaagctcaacctgcgttaactcccacttacacatctcaactagccaaatccattgtaaacttttcggctacaagacaaccgcgaaaatggttcgccctccattgtctcaaaaccggtcaatggccatcctaaacgcagcccgcgacggcgggtacggcgtcccaggaatgtgctgctacaacatggaatcgataatcgccacagtccgcgcagcagaagccgcaaactcaccagccatggtcctactcttcccttgggccatcgaatacgccggcgaagctctcgtccgcgccgccgcgtctgcagcccacggcgcgaaagtccctgtctctttacatctcgaccactgtcaaaccccagagttagttagaagggcagctgatatcgaagatggattcgatagcatcatgtgcgacatgagccattacgagaaagaagagaatctcgccttgacgaaagaattagccgcatactgccacgagcgtgggatcgcagcagaggccgaaccgggccgtatcgaaggtggtgaagacggagtcgccgagacagcggatctagagtctatcctcaccacccccgaacaagcggaagaattcgtcgcaacgggtctagaaatgcttgctcccgccttcgggaacgtacacggcgagtatggaccgcggggtatccagctagagtatgaccgtcttgaggctatcaataaagcagtcggggaccgtgtcagactggtgctacatggtgcggacccgtttactgaggaaattttccaaagatgtatcaaggcgggtgttagtaagataaatatcaacaagggtatgaataagcactatgctgctgtgcagaaggagatggagggcaaaccgcttacgagcgtcattgaggccggcactgatgctatgcagaaggctattgagcagtatatgcattggcttggtagtgcgggtaagggtggattgtagtagatagagatatagaggtagagaagggaaacatgatatttgtattttaatccattgttta

SEQ ID NO: 26848 - DNA, 1770 bp, Muscodor strobelii
  misc_feature: SGI cDNA ID NO. 569187
  misc_feature: Encodes the peptide sequence at SEQ ID NO 26849
atgtcgaaagcgcatctattcaactctttagacggtctcgtcaacaagggcctccgtggtcttattgcctataacccctctttagcttttgatgagtcgaatagaatagtctacaacacagactacgacaaatcgacagtttctatcattagtggtgggggctcaggtcacgaacctgcttggtccgggtatgtaggcactaacatgttggcctgcgccgtcaacggtgacgttttcgcctctcccagcacaaagcagatcgtagccggtattgaggcggttccttcagaaaagggctctatcctggtcatcaccaactacactggtgactgtttacatttcggtctcgctgccgagaaggctaatgccaaaggctacaaaaccaaaatgattatctgtggtgacgatgtctctgttggcaagaccggcagcttggtcggacgcagaggtctggctggtcagcttggtgttctcaaagtcatgggcggtgcctcaggcgcaggtggctctctcgaccaagtttacgatctcggtgtagctgtctcccagcagattgtctcaatagccgtcacattagaccattgtcacgtccccggtcgcgcagagcacgctgttctgaagaccgatgagctagaaattggcactggcccccacaatgagcctggatacaagaagatatctccaaagccgtcgccggaagagctagtgaagactattctcacatatttactcgacgaatctgacccaatacgcggctacgtcaacttcaaggaaggcgacgaggttgctcttctcgtcagcaactttggtggcatgtctttcctcgaaatgggtgcccttgtcgacgagctccttgaacaactcgatgtcagctggaagatccaacctgcgcgtgttatctcaggtttccttgagacgtctctcaacgcgcctgctttctccgtttcctgcatcaacctaactgcagcagcaaagaactgctcatactcagtcgaggaaatcaagggcttcgtcgatactcggaccaacacccactgggagtcaatgagcggatcccaagctaagcggcgtccaagaaaagaacaattcgtcccggcaccaccccaagctcatcatacaatcgacgactccacggatttgaagattgatcctgctcaactggagcgcatgctccgcaaagcctgccatgacttgattgatgctgaaccttatttgactaagtgcgacacaatcatgggtgatggcgattgtggtgagactctgaagactgggggtacctgcctgctggaagcacttgacgcaggcgtggccaagaagggttctgtaggcgaagtgcttctcgaactcgaggagattgtcgaaggcaagatgggtggcactttgggcggtatacttggtatcttcttcgtatctctacggtctgccctgatcgacaaccgcgacattgcgaagaaagagggtattcccaaactatggggtgctgccgctctcggcgctcttaagagtcttacccgatatacaccagccaaggtcggtgatcggacagtcatggacacacttattccctttgccgaagctctctcagcaagcggtagcttcgatgaggccgttgccgcagcagttaagggcgccgaacgaacttcagaactgaaagccaaactgggtcgggccacatacgttggagttgacaaggatgcaacgaacggtcctcctgatccaggtgcttggggagctatgctcgtcatcaagggacttcaagctggtctctaa

SEQ ID NO: 26849 - protein, 589 aa, Muscodor strobelii
  misc_feature: SGI Peptide ID NO. 569187
  misc_feature (18)..(347): Pfam Id: PF02733 Pfam Desc: Dak1 domain
  misc_feature (411)..(587): Pfam Id: PF02734 Pfam Desc: DAK2 domain
  misc_feature (1)..(589): NCBI GI: 256725903 Blast Desc: NECHADRAFT_94691 [Nectria haematococca mpVI 77-13-4]
  misc_feature (1)..(589): NCBI GI: 171690964 Blast Desc: protein product [Podospora anserina] gi|170945430|emb|CAP71542.1| protein product [Podospora anserina]
  misc_feature (1)..(589): NCBI GI: 116195708 Blast Desc: CHGG_04452 [Chaetomium globosum CBS 148.51] gi|88180365|gb|EAQ87833.1| CHGG_04452 [Chaetomium globosum CBS 148.51]
  misc_feature (1)..(585): NCBI GI: 85085303 Blast Desc: NCU04400 [Neurospora crassa OR74A] gi|28918569|gb|EAA28241.1| conserved [Neurospora crassa OR74A] gi|40882222|emb|CAF06047.1| related to dihydroxyacetone kinase
  misc_feature (1)..(588): NCBI GI: 39971257 Blast Desc: MGG_03095 [Magnaporthe grisea 70-15] gi|145017050|gb|EDK01413.1| MGG_03095 [Magnaporthe grisea 70-15]
  misc_feature (1)..(463): NCBI GI: 261359072 Blast Desc: dihydroxyacetone kinase [Verticillium albo-atrum VaMs.102]
  misc_feature (1)..(588): NCBI GI: 149210851 Blast Desc: MGCH7_ch7g898 [Magnaporthe grisea 70-15] gi|86196853|gb|EAQ71491.1| MGCH7_ch7g898 [Magnaporthe grisea 70-15]
  misc_feature (5)..(586): NCBI GI: 46127329 Blast Desc: FG08042.1 [Gibberella zeae PH-1]
  misc_feature (1)..(589): NCBI GI: 189199966 Blast Desc: dihydroxyacetone kinase [Pyrenophora tritici-repentis Pt-1C-BFP] gi|187983419|gb|EDU48907.1| dihydroxyacetone kinase [Pyrenophora tritici-repentis Pt-1C-BFP]
  misc_feature (1)..(589): NCBI GI: 71003151 Blast Desc: UM00109.1 [Ustilago maydis 521] gi|46096261|gb|EAK81494.1| UM00109.1 [Ustilago maydis 521]
  misc_feature (1)..(585): SWISSPROT Homolog: EC 2.7.1.29 Glycerone kinase
MSKAHLFNSLDGLVNKGLRGLIAYNPSLAFDESNRIVYNTDYDKSTVSIISGGGSGHEPAWSGYVGTNMLACAVNGDVFASPSTKQIVAGIEAVPSEKGSILVITNYTGDCLHFGLAAEKANAKGYKTKMIICGDDVSVGKTGSLVGRRGLAGQLGVLKVMGGASGAGGSLDQVYDLGVAVSQQIVSIAVTLDHCHVPGRAEHAVLKTDELEIGTGPHNEPGYKKISPKPSPEELVKTILTYLLDESDPIRGYVNFKEGDEVALLVSNFGGMSFLEMGALVDELLEQLDVSWKIQPARVISGFLETSLNAPAFSVSCINLTAAAKNCSYSVEEIKGFVDTRTNTHWESMSGSQAKRRPRKEQFVPAPPQAHHTIDDSTDLKIDPAQLERMLRKACHDLIDAEPYLTKCDTIMGDGDCGETLKTGGTCLLEALDAGVAKKGSVGEVLLELEEIVEGKMGGTLGGILGIFFVSLRSALIDNRDIAKKEGIPKLWGAAALGALKSLTRYTPAKVGDRTVMDTLIPFAEALSASGSFDEAVAAAVKGAERTSELKAKLGRATYVGVDKDATNGPPDPGAWGAMLVIKGLQAGL

SEQ ID NO: 26850 - DNA, 2319 bp, Muscodor strobelii
  misc_feature: SGI EST ID NO. CUFF.63251.0
  misc_feature: Variant of the nucleotide sequence at SEQ ID NO 26848
tctcggttgaccgtagacactgtgccctcttaaagctacgcttccgggatgccatgaatgcaaggtgcaattttctggtttctgagtaatagaaagatccataattgaggttctcgtgagcctgaggatactgactaggctcttgtgttgcgtggttaatcctgctaattcgagatcattaaatacgaccaccttgcctccgcccgtgtggcatcgtcgatctctcccggaatataataatcgggtcgcactcataggtcagctcgctcaaaggtgaacattatcctataattgtcacatatatcatcgattttcatcttcttttgcatatcaccgtcgacacagctgcagggaactcttctcgggtcttctcaagaccaatcaacctctcttttctctttttctctgctcatatacacacatacccaagatgtcgaaagcgcatctattcaactctttagacggtctcgtcaacaagggcctccgtggtcttattgcctataacccctctttagcttttgatgagtcgaatagaatagtctacaacacagactacgacaaatcgacagtttctatcattagtggtgggggctcaggtcacgaacctgcttggtccgggtatgtaggcactaacatgttggcctgcgccgtcaacggtgacgttttcgcctctcccagcacaaagcagatcgtagccggtattgaggcggttccttcagaaaagggctctatcctggtcatcaccaactacactggtgactgtttacatttcggtctcgctgccgagaaggctaatgccaaaggctacaaaaccaaaatgattatctgtggtgacgatgtctctgttggcaagaccggcagcttggtcggacgcagaggtctggctggtcagcttggtgttctcaaagtcatgggcggtgcctcaggcgcaggtggctctctcgaccaagtttacgatctcggtgtagctgtctcccagcagattgtctcaatagccgtcacattagaccattgtcacgtccccggtcgcgcagagcacgctgttctgaagaccgatgagctagaaattggcactggcccccacaatgagcctggatacaagaagatatctccaaagccgtcgccggaagagctagtgaagactattctcacatatttactcgacgaatctgacccaatacgcggctacgtcaacttcaaggaaggcgacgaggttgctcttctcgtcagcaactttggtggcatgtctttcctcgaaatgggtgcccttgtcgacgagctccttgaacaactcgatgtcagctggaagatccaacctgcgcgtgttatctcaggtttccttgagacgtctctcaacgcgcctgctttctccgtttcctgcatcaacctaactgcagcagcaaagaactgctcatactcagtcgaggaaatcaagggcttcgtcgatactcggaccaacacccactgggagtcaatgagcggatcccaagctaagcggcgtccaagaaaagaacaattcgtcccggcaccaccccaagctcatcatacaatcgacgactccacggatttgaagattgatcctgctcaactggagcgcatgctccgcaaagcctgccatgacttgattgatgctgaaccttatttgactaagtgcgacacaatcatgggtgatggcgattgtggtgagactctgaagactgggggtacctgcctgctggaagcacttgacgcaggcgtggccaagaagggttctgtaggcgaagtgcttctcgaactcgaggagattgtcgaaggcaagatgggtggcactttgggcggtatacttggtatcttcttcgtatctctacggtctgccctgatcgacaaccgcgacattgcgaagaaagagggtattcccaaactatggggtgctgccgctctcggcgctcttaagagtcttacccgatatacaccagccaaggtcggtgatcggacagtcatggacacacttattccctttgccgaagctctctcagcaagcggtagcttcgatgaggccgttgccgcagcagttaagggcgccgaacgaacttcagaactgaaagccaaactgggtcgggccacatacgttggagttgacaaggatgcaacgaacggtcctcctgatccaggtgcttggggagctatgctcgtcatcaagggacttcaagctggtctctaaggaagattcggattaatggaaaagtaatgactactagaactaatcatgggcggattcttatatgtgtatagcgcggtgctgggttctgatgtgtttaacttcaattcaagaagcttacc

SEQ ID NO: 26851 - DNA, 471 bp, Muscodor strobelii
  misc_feature: SGI cDNA ID NO. 569188
  misc_feature: Elevated expression when VOC is produced
  misc_feature: Encodes the peptide sequence at SEQ ID NO 26852
atggctaccccaaaatggaggattgccatgggctgcgacgacgccggcgtcagctacaagaacaagatcaaggccgatttcgaggccgactcccgcgtcgaatcagtggaagatgtcggtagctacgacaccgacgacaagaccgcctatcctcaccgtgctgctgccgccgcccagctcgtagcagacggcaaagccgatcgcgccctcatcatctgcggtactggtctaggtgttgcgatcgcagccaacaaagtcaagggtatccgcgccgtcacagcacatgacagtttctcggtcgagcgtgcagtcctcagcaataacgcccaggttctgtgtatgggcgagcgtgtcatcggtcttgagcttgcaagacgcttggccaaggagtggctcgggtatgttttcgatgagaccagtgcaagtgctgccaaggtcgaggttattaaggagctggagaagaatatgtaa

SEQ ID NO: 26852 - protein, 156 aa, Muscodor strobelii
  misc_feature: SGI Peptide ID NO. 569188
  misc_feature (7)..(150): Pfam Id: PF02502 Pfam Desc: Ribose/Galactose Isomerase
  misc_feature (1)..(155): NCBI GI: 261359071 Blast Desc: ribose-5-phosphate isomerase B [Verticillium albo-atrum VaMs.102]
  misc_feature (1)..(155): NCBI GI: 116195706 Blast Desc: conserved [Chaetomium globosum CBS 148.51] gi|88180364|gb|EAQ87832.1| conserved [Chaetomium globosum CBS 148.51]
  misc_feature (4)..(153): NCBI GI: 256726301 Blast Desc: NECHADRAFT_82074 [Nectria haematococca mpVI 77-13-4]
  misc_feature (1)..(155): NCBI GI: 171690962 Blast Desc: protein product [Podospora anserina] gi|170945429|emb|CAP71541.1| protein product [Podospora anserina]
  misc_feature (4)..(153): NCBI GI: 164429451 Blast Desc: NCU10107 [Neurospora crassa OR74A] gi|40882223|emb|CAF06048.1| related to ribose-5-phosphate isomerase [Neurospora crassa] gi|157073484|gb|EDO65447.1| crassa
  misc_feature (1)..(153): NCBI GI: 71018039 Blast Desc: UM03103.1 [Ustilago maydis 521] gi|46098661|gb|EAK83894.1| UM03103.1 [Ustilago maydis 521]
  misc_feature (1)..(154): NCBI GI: 189210189 Blast Desc: ribose 5-phosphate isomerase [Pyrenophora tritici-repentis Pt-1C-BFP] gi|187977519|gb|EDU44145.1| ribose 5-phosphate isomerase [Pyrenophora tritici-repentis Pt-1C-BFP]
  misc_feature (9)..(155): NCBI GI: 169619132 Blast Desc: SNOG_12760 [Phaeosphaeria nodorum SN15] gi|160703751|gb|EAT80058.2| SNOG_12760 [Phaeosphaeria nodorum SN15]
  misc_feature (4)..(156): NCBI GI: 119178131 Blast Desc: CIMG_07932 [Coccidioides immitis RS]
  misc_feature (1)..(156): NCBI GI: 258577067 Blast Desc: ribose 5-phosphate isomerase [Uncinocarpus reesii 1704] gi|237902981|gb|EEP77382.1| ribose 5-phosphate isomerase [Uncinocarpus reesii 1704]
  misc_feature (7)..(154): SWISSPROT Homolog: EC 5.3.1.6 Ribose-5-phosphate isomerase
  misc_feature: Useful for introducing or modulating the production of volatile compounds
MATPKWRIAMGCDDAGVSYKNKIKADFEADSRVESVEDVGSYDTDDKTAYPHRAAAAAQLVADGKADRALIICGTGLGVAIAANKVKGIRAVTAHDSFSVERAVLSNNAQVLCMGERVIGLELARRLAKEWLGYVFDETSASAAKVEVIKELEKNM

SEQ ID NO: 26853 - DNA, 1304 bp, Muscodor strobelii
  misc_feature: SGI EST ID NO. CUFF.63355.0
  misc_feature: Variant of the nucleotide sequence at SEQ ID NO 26851
cacgcaggtactcgaagaatgtgcctgctcccccctgcgcagcgcctgccgacctcgtcgcgagccattgggaaggtattcgaggtgggctgtgaagcaggacgggaaaccacctgtagtctagcacgaacagctccatgccttcccagcgttccccaaatcgatgtgctggtctgcaaagtcggggcaaacaataagttttcgcgtcaaatgatccaaagatatatgtcaaccaacccatcaaacggtgaagaagacattggcaaattactattccgcggatactaacttcgcgtatccgaatcaaacttgcatcagctcagatcagttcatactgctactttgaagatcgatccatcccgccttgtgtacctccaaccaactgtcacacattcattgcggaatccggctctcttattcaagcttcctattctttgcgtctcaaaagcgaaatacctagttttgtaccaatagtcacaaaatggctaccccaaaatggaggattgccatgggctgcgacgacgccggcgtcagctacaagaacaagatcaaggccgatttcgaggccgactcccgcgtcgaatcagtggaagatgtcggtagctacgacaccgacgacaagaccgcctatcctcaccgtgctgctgccgccgcccagctcgtagcagacggcaaagccgatcgcgccctcatcatctgcggtactggtctaggtgttgcgatcgcagccaacaaagtcaagggtatccgcgccgtcacagcacatgacagtttctcggtcgagcgtgcagtcctcagcaataacgcccaggttctgtgtatgggcgagcgtgtcatcggtcttgagcttgcaagacgcttggccaaggagtggctcgggtatgttttcgatgagaccagtgcaagtgctgccaaggtcgaggttattaaggagctggagaagaatatgtaaattttattacggcgtagaggccatgacactcaaaggagcgctacacgaacttgactaatgaccgggctgcatcataccaacaatgtcgttgtccaacctgcatgtcttagacatgcttatatcagccttgcgttcccgtctcaacacatgtatgcaaagctcatcgacactttattactctcaaaactttaatgatacgcaattgcatccccacgcatccctcctctgccatcatcctgggacaacatacgctagtcaacgtgtaagtgaagtgggactgcgattcccagtatcccgcgatccagaaatcggaaagccgattcaattacggcggatccgccgagacgcaagt

SEQ ID NO: 26854 - DNA, 879 bp, Muscodor strobelii
  misc_feature: SGI cDNA ID NO. 569189
  misc_feature: Encodes the peptide sequence at SEQ ID NO 26855
atgtcttcaccccctccccgccgccgcctcgtaggcgtctcaacaaaaatgtacttcagcctctccagaaccctatcctacacacgcacactcctctcctcactctcacgcctctcgccctccaccctccaaactctcgcatcaatagacatattcataatccccgaccacatctccctctacccagtttcccaactcctaaaccccccatccccatccccatcccctcccctgcgcatccttttaggtgcccaagacgcgcacacttcagactacggcgcctacaccggcgaagtctcaccagccgtcctctcagaaatcgggtgtcggatattagaagtaggacacgcggaaagaagaagactattcggtgagaccgatgagagtacgtcgctgaaagcagaggctgcggcaagaaatgggatggtgccgcttatttgcgttggtgaacgcacgaaacctcctctttcctcccagccatcaccctccccctgtcaccctcagccatcgaagggagagaatggggaggaggaagatctagacatcaaccactccctcccatccatccagtctcaagtcgacgccgttctttccgcagtcccaccaaccgcagatgtgatactagcctacgaaccagtctgggcgattggtgcagccgcgccggcgagcgcttcgtacgtcgttggtgttacgaaagcgattcgacagtttgaatctgtgagaagtaggagtgggaatacgaggattttgtatggcgggagtgcgggaccggggttatttgataagttgaaggatggggttgatggtttgttccttggaagatttgctcatgatgttgagagttttgttaggactatttgtgaggttgctgttgcgtga

SEQ ID NO: 26855 - protein, 292 aa, Muscodor strobelii
  misc_feature: SGI Peptide ID NO. 569189
  misc_feature (9)..(286): Pfam Id: PF00121 Pfam Desc: Triosephosphate isomerase
  misc_feature (9)..(150): Pfam Id: PF00121 Pfam Desc: Triosephosphate isomerase
  misc_feature (189)..(286): Pfam Id: PF00121 Pfam Desc: Triosephosphate isomerase
  misc_feature (1)..(292): NCBI GI: 39971255 Blast Desc: MGG_03094 [Magnaporthe grisea 70-15] gi|149210849|ref|XP_001522799.1| MGCH7_ch7g897 [Magnaporthe grisea 70-15] gi|86196852|gb|EAQ71490.1| MGCH7_ch7g897 grisea
  misc_feature (1)..(292): NCBI GI: 125601842 Blast Desc: mitochondrial triosephosphate isomerase [Neotyphodium lolii]
  misc_feature (1)..(292): NCBI GI: 125601826 Blast Desc: mitochondrial triosephosphate isomerase [Epichloe typhina]
  misc_feature (6)..(290): NCBI GI: 256726755 Blast Desc: NECHADRAFT_105884 [Nectria haematococca mpVI 77-13-4]
  misc_feature (1)..(290): NCBI GI: 40882224 Blast Desc: related to triose-phosphate isomerase [Neurospora crassa]
  misc_feature (8)..(289): NCBI GI: 116195704 Blast Desc: CHGG_04450 [Chaetomium globosum CBS 148.51] gi|88180363|gb|EAQ87831.1| CHGG_04450 [Chaetomium globosum CBS 148.51]
  misc_feature (8)..(292): NCBI GI: 189210619 Blast Desc: triosephosphate isomerase 2 [Pyrenophora tritici-repentis Pt-1C-BFP] gi|187977734|gb|EDU44360.1| triosephosphate isomerase 2 [Pyrenophora tritici-repentis
  misc_feature (17)..(290): NCBI GI: 164429453 Blast Desc: NCU10106 [Neurospora crassa OR74A] gi|157073485|gb|EDO65448.1| NCU10106 [Neurospora crassa OR74A]
  misc_feature (1)..(292): NCBI GI: 261359073 Blast Desc: triosephosphate isomerase [Verticillium albo-atrum VaMs.102]
  misc_feature (8)..(292): NCBI GI: 169618994 Blast Desc: SNOG_12689 [Phaeosphaeria nodorum SN15] gi|111058867|gb|EAT79987.1| SNOG_12689 [Phaeosphaeria nodorum SN15]
  misc_feature (49)..(290): SWISSPROT Homolog: EC 5.3.1.1 Triose-phosphate isomerase
MSSPPPRRRLVGVSTKMYFSLSRTLSYTRTLLSSLSRLSPSTLQTLASIDIFIIPDHISLYPVSQLLNPPSPSPSPPLRILLGAQDAHTSDYGAYTGEVSPAVLSEIGCRILEVGHAERRRLFGETDESTSLKAEAAARNGMVPLICVGERTKPPLSSQPSPSPCHPQPSKGENGEEEDLDINHSLPSIQSQVDAVLSAVPPTADVILAYEPVWAIGAAAPASASYVVGVTKAIRQFESVRSRSGNTRILYGGSAGPGLFDKLKDGVDGLFLGRFAHDVESFVRTICEVAVA

SEQ ID NO: 26856 - DNA, 5181 bp, Muscodor strobelii
  misc_feature: SGI EST ID NO. CUFF.63447.0
  misc_feature: Variant of the nucleotide sequence at SEQ ID NO 26854
atgacggagccaccctcacatcaagactcaccactcacctaaagccacaatctagtatatcactcaatttagacagcctcacctcatagcaaaaataatccataccttctgaacaatcacaaatccaagatcaacacaaaacccaaacacacccaaaatgtcttcaccccctccccgccgccgcctcgtaggcgtctcaacaaaaatgtacttcagcctctccagaaccctatcctacacacgcacactcctctcctcactctcacgcctctcgccctccaccctccaaactctcgcatcaatagacatattcataatccccgaccacatctccctctacccagtttcccaactcctaaaccccccatccccatccccatcccctcccctgcgcatccttttaggtgcccaagacgcgcacacttcagactacggcgcctacaccggcgaagtctcaccagccgtcctctcagaaatcgggtgtcggatattagaagtaggacacgcggaaagaagaagactattcggtgagaccgatgagagtacgtcgctgaaagcagaggctgcggcaagaaatgggatggtgccgcttatttgcgttggtgaacgcacgaaacctcctctttcctcccagccatcaccctccccctgtcaccctcagccatcgaagggagagaatggggaggaggaagatctagacatcaaccactccctcccatccatccagtctcaagtcgacgccgttctttccgcagtcccaccaaccgcagatgtgatactagcctacgaaccagtctgggcgattggtgcagccgcgccggcgagcgcttcgtacgtcgttggtgttacgaaagcgattcgacagtttgaatctgtgagaagtaggagtgggaatacgaggattttgtatggcgggagtgcgggaccggggttatttgataagttgaaggatggggttgatggtttgttccttggaagatttgctcatgatgttgagagttttgttaggactatttgtgaggttgctgttgcgtgattgttggtaagggaagggaaggggaagggagatagatggatgaggtgcgaggtgtgaggaaatgctgtgctttgatatcgaggctctgggactaccatagtctgatttggatacaatacagcagaggcacggagtagagataggcctcgaattaggcttctagcatatcatcatatagatggacgagaatcaagcaagtctaaataaaccagacagtcgcataccagaaaaggcaaacatatcacaaataataatatgagggaatagaaggcaagtcggtcttgcaacgggtcttgtcaattccgcaccatactacatctgcgcactaaatgtcactatatacagctctcctcccatttccatctatagtagctggtagctaagtgtgtttacacactagccaccactccctatgtcctacttctctctctcgtaacagcaaatcgaaagggtaatatgttctttcgaaacaagagtggtatcgaatattttgtccagaaatcgctaagcaatgctgttcactgattatttgcagtgtatgaagtaactccgataaagattgatcgtgacatgtctcgtctatgcaatcgtgttcaagttttttatggtgctctatatgggtaggggtataagataatcacgtcgttcggttgtcgttgtcgcattccttggaggtctagcgggacgagcagcagtctcctagctgagaacccattcgctgcctctcttgacaaatttgtccagaagcatcccgagatcagccagcacgaaacggcagatataaaaaccgaaaaattcggcagcgtgtctggtacacagctcaaggccgacttgagtcttatcggcgtggcgcaatccagggtcatctacttggcgcgcaatttgatctgttatgttatgtcagtgggactgtttgaacgtatattgggaatcaataaaggtatgacaacttaccaactgtttgtgcagcgtcaaataatcgcgccaagcttcccgtgtaatgggcatatggaccatcgaactttaccgatgcaacatctctcttagcaggcttactggtaggatgagcgatcatcggcagacttggcatcgaacctccagggctggtgacttccttctcggcaatgttcccgaagctattagcggtattcccaccgctattggtcttgacgccgtaggtgttggccaagttgacagcagatcccttgcttctcagccttcgccagctgaaagcaccgccttttccactgacactgttgtttcgaggtacagatggcacgggctcagccgttttgtcggtgtgtataccctgtgttccgacttccgcgccaagtctacgcgacagagtgccttgtaccacttccagaatgttttcgaggctctgcatctcgataagaacggcatctgcatcggtactatcgacgcgcgcgagtttcaagagagccgcagtgagcagatcgcattgcgaaattttgtcttctaggttgcggagcttgacacccttgactttccaagcgtcgtgaggaacgaacagtcgattgctgaggtagccgcctcggggatgtgccagtgtctggtacaaagcacgcatcagccaaaacggacgaaacatggcgtccgatggacagggctccagcggtaatggcacgtcggggtcttgaggtagttgatgatatgatgaaaggggcgagtgagatactggatcgtggaaatcgtcgaacagctgaaacccacccactcctccccatttctctccgaacgttgtgtctatgggagtgggaagtgcgggcattgtttgttggcgtgagagagagatattagatatagtctgggtcaggggcgtattcggcgagagatctgcgtcatcagtatggggtatcgccaatcgtccatgtgccaatgaccttaaactcgttgatgagaaattttcacgtattccacctttcagtgacgacggtgaaccagtaagcatttcttcgtcgaaacctgctgctcggctgtccggtggacttgtcggtccccctatgtcggcagggctgataccccgtactggagaggacggcgcacgcatagagaatggcataggacgagttgaagtcgccgagagcgcctgtctctgctgggcaatgtaccctccagtaggcttgatctgagcagccgaagcagtcatgattggtggtggtggcatacttggcggcggccctagtttcgacgtttcgatcttgagctgcttcgcattttgccctgaaagtcgccggttccgtacgcctgatgttgacggcgggcgtgttggtggttgcggcaaggcattcgtcgggggaggcatggaaggcggagaagactttttatgcagattattcgacgacgtcttctcacttaacatggaaagcgtcgttgcggctgttgggggattcgagccgccagagctgtgccatgtgcgcgatgtcaagccgctagaatccgactccctcggaaggctggacttgtatcttgactgtttgcccatagcaaaatcctccataacatatcccctagtcatttcctcaagcatacgttcctcttcatctgagtcatttgcgtcgaagaaatcccccccatacgtctgggattctccgccaatggacaactgcctctggcgctcccgctcacgcgcgaattcaattgcagcttcccgctctgtctcgcgcactcgttctttggccagctcgactttgcgcatcgtgtgtgcgatcctgtcgtcgtcgttgtcgttgccaccgccgtaggtcaagctggaatccatcgggtcatacccctcatcgtatgctgcttcgacagctgcatctaaagcggcgtcaaactcggcctcggtgtcaccacttatctgacgaatatgtctccgtatgatcctcgaggacgatctcgaatgaacggaagaagccgtggaaccaccagactcatctatagggtccaaccaagacgctgattcgtggctgaggttccgtctgtgtgaccggaactcatttggtgcagctaagcgctccgacgagatggagaaatcctgccgtatgacagactcggggctgggtgctttcgcaggtgatatcggcctccgcggtgacagtggcgctggcacgaagccatcactcgacgtttggcgcggaattgtgagctgaccgccctcaaaattgcgccgcattggcgattttgaaggctttgagaatgatggccgagacgtagatcgttcacggtctgacggtcgtgagtagtcactgtaagtcgttgactcggaaggacgccggggtgggttggacgacacttgggagtttggcgattcatctcgctgcgactttgtgatggtagctgcatccgactgactgtcagctccagccagttcgatctgaacatcgtgataactgagactgtcgggccgcgcaggcagcgccttgttcgacacgttggcagggaccagtccgtccagctcgtctatgcggctcgtgtatgtccgtcgctgtcagattagtcttagtcagcacacacgagtataatcacaattagtcgggacgccgatgcttggcccaacttacaatagcctccaacttcttgcggtcctcctcaccactagtcctggccaagacatgctgcaagagttcgcaggcctcgacgtacgagtcacgcgcagctgtgtagttctggttattatccagctgcacagcggcgttggctttggaaagggctttggatagcatcgccttctgcgatggcttgctgttacggtccttggtcttggtagagtcaccactgcccttggctgtcgaccgctctctcgagtggcctttcctctcggactgaccatcgcggtcgccgtagcgcgtcacgggcgcggcggggaggagtgtcgcggcactgcgcatggctggcgaggctgttctggcggggttggagagatcgttccagaagtacgagttgacctcatctccattgggagtccggtttgcgaagacagagttgggtgtcgtgactctggggctgccgcgacccatggcacccgccgacgacgcctgcccgtatccgcgacgcgacagcgcctcgggatccgtgtcgagaggcgagagagagatgatgggaggcaggttcggcggcggcgcgggaggcggaggcggaga

SEQ ID NO: 26857 - DNA, 5112 bp, Muscodor strobelii
  misc_feature: SGI cDNA ID NO. 569190
  misc_feature: Encodes the peptide sequence at SEQ ID NO 26858
atgatgccccaatcgatgatttcgagtacgacgtcactcccgacatacgaagcacagcaacggcagggaaggaaacgagcaccatcgcaaccgggaaaatacacagctacggccctgacgacatcaccgacgacgacatcgaccttatcagcatttgtaggcgagggcagcaagaatacttataaccgtagtcgaaccacgccgaggggcgagtatccagggcacgagcaaaaccgaaacacagccggtgtcgtagatgctgcttccggtggcgatgggtccaaggggctgaggcataacaacaacttccactacaactcaaagggccggcaacagtcgatagcagaagccgtattggcagggacaggcagttcaccaattacgtcaactagagacgacgccggtaaccggacgtactataacggattttctacagacggcgaagcagacggagccaacgaagacgacgatttcgactcgagtcttgatggcgacttacacgatgtgagcgtcaatgattacaggagccggatagccgtcgaggacagacgacagcgaccacagccgatgggaatgatcagggaggatcgcagtgctcctcctggtggtgacggacattcatcggcgtcgttctcacaacgggcgaaaaagctggcatcgtcgccgccgagcagccggagcggtgtgggcaaccggcagtcgcgccaactgcaatctcagttccaattccaatttcagtcgcaatctcttgggtcgttggcgtccactaacaacggtagcatcgacaacggggtcgcagccgctaaccccagccgagtgcaggctaattctagcgacaaaccccagcagcagcgagccgggcacagctacaaccaatcctgctggaagcggcggacgaccgccgtcgcgcacgtcaccaccgtctgcgccgccgcgggtgtcatcactgctgcccccgcccgcagcggtggtgctaatggcgctacgttcgctatagatagcgctatacagtcgggttttatagggtcgtcaggggacagctcaggcaccacccgcgcccgcgcagggtcgaatactaatcacaatcacgcccacacaagaccattcgacgtgccgccgtcgacgctaccacccctgtcgggacctgccaccacatcgacccctacccctatacgctcggcaccacaccaccagcagaacagccaccaggaggacctcgacgcctacgcccacccaccacagcccataccacaacaacctcgctctcgctttgccccctccaactccaattcgaactcgaactcgaactcgaatttgaagtcgaagcacactactacggcgtcgatttcgaccgcgcaacaatcgcagtcgcagtcgcagctgcagatgcagttgtcgagtgccaatgcgattgtgcaggacccccccacccacgatcaattcgcgacctcctttctcgaccccttaaacagcccgcccacgcccttggacgccgccacctcgtcgccccctgctgcgaccggcctcgacgccgggccccgacgaccacgatcgcgtgcgagcagcatcggcacgacgagcgacggattccgcaacctcaaccggtggtcgtcgtcgacggcgtcctcccgcctgtctgcctgggactaccaccactaccagcagcagcaggcccagcagcagaagctcggtggtgccgctgcccgccgccgcatgagtgtcgactcgattggcctgctgtcacagagttcgcgcgccgactccatccccgagcctcagccccacctcgttcaataccctgcgcgagcttctccgcctccgcctcccgcgccgccgccgaacctgcctcccatcatctctctctcgcctctcgacacggatcccgaggcgctgtcgcgtcgcggatacgggcaggcgtcgtcggcgggtgccatgggtcgcggcagccccagagtcacgacacccaactctgtcttcgcaaaccggactcccaatggagatgaggtcaactcgtacttctggaacgatctctccaaccccgccagaacagcctcgccagccatgcgcagtgccgcgacactcctccccgccgcgcccgtgacgcgctacggcgaccgcgatggtcagtccgagaggaaaggccactcgagagagcggtcgacagccaagggcagtggtgactctaccaagaccaaggaccgtaacagcaagccatcgcagaaggcgatgctatccaaagccctttccaaagccaacgccgctgtgcagctggataataaccagaactacacagctgcgcgtgactcgtacgtcgaggcctgcgaactcttgcagcatgtcttggccaggactagtggtgaggaggaccgcaagaagttggaggctattcgacggacatacacgagccgcatagacgagctggacggactggtccctgccaacgtgtcgaacaaggcgctgcctgcgcggcccgacagtctcagttatcacgatgttcagatcgaactggctggagctgacagtcagtcggatgcagctaccatcacaaagtcgcagcgagatgaatcgccaaactcccaagtgtcgtccaacccaccccggcgtccttccgagtcaacgacttacagtgactactcacgaccgtcagaccgtgaacgatctacgtctcggccatcattctcaaagccttcaaaatcgccaatgcggcgcaattttgagggcggtcagctcacaattccgcgccaaacgtcgagtgatggcttcgtgccagcgccactgtcaccgcggaggccgatatcacctgcgaaagcacccagccccgagtctgtcatacggcaggatttctccatctcgtcggagcgcttagctgcaccaaatgagttccggtcacacagacggaacctcagccacgaatcagcgtcttggttggaccctatagatgagtctggtggttccacggcttcttccgttcattcgagatcgtcctcgaggatcatacggagacatattcgtcagataagtggtgacaccgaggccgagtttgacgccgctttagatgcagctgtcgaagcagcatacgatgaggggtatgacccgatggattccagcttgacctacggcggtggcaacgacaacgacgacgacaggatcgcacacacgatgcgcaaagtcgagctggccaaagaacgagtgcgcgagacagagcgggaagctgcaattgaattcgcgcgtgagcgggagcgccagaggcagttgtccattggcggagaatcccagacgtatgggggggatttcttcgacgcaaatgactcagatgaagaggaacgtatgcttgaggaaatgactaggggatatgttatggaggattttgctatgggcaaacagtcaagatacaagtccagccttccgagggagtcggattctagcggcttgacatcgcgcacatggcacagctctggcggctcgaatcccccaacagccgcaacgacgctttccatgttaagtgagaagacgtcgtcgaataatctgcataaaaagtcttctccgccttccatgcctcccccgacgaatgccttgccgcaaccaccaacacgcccgccgtcaacatcaggcgtacggaaccggcgactttcagggcaaaatgcgaagcagctcaagatcgaaacgtcgaaactagggccgccgccaagtatgccaccaccaccaatcatgactgcttcggctgctcagatcaagcctactggagggtacattgcccagcagagacaggcgctctcggcgacttcaactcgtcctatgccattctctatgcgtgcgccgtcctctccagtacggggtatcagccctgccgacatagggggaccgacaagtccaccggacagccgagcagcaggtttcgacgaagaaatgcttactggttcaccgtcgtcactgaaaggtggaatacgtgaaaatttctcatcaacgagtttaaggtcattggcacatggacgattggcgataccccatactgatgacgcagatctctcgccgaatacgcccctgacccagactatatctaatatctctctctcacgccaacaaacaatgcccgcacttcccactcccatagacacaacgttcggagagaaatggggaggagtgggtgggtttcagctgttcgacgatttccacgatccagtatctcactcgcccctttcatcatatcatcaactacctcaagaccccgacgtgccattaccgctggagccctgtccatcggacgccatgtttcgtccgttttggctgatgcgtgctttgtaccagacactggcacatccccgaggcggctacctcagcaatcgactgttcgttcctcacgacgcttggaaagtcaagggtgtcaagctccgcaacctagaagacaaaatttcgcaatgcgatctgctcactgcggctctcttgaaactcgcgcgcgtcgatagtaccgatgcagatgccgttcttatcgagatgcagagcctcgaaaacattctggaagtggtacaaggcactctgtcgcgtagacttggcgcggaagtcggaacacagggtatacacaccgacaaaacggctgagcccgtgccatctgtacctcgaaacaacagtgtcagtggaaaaggcggtgctttcagctggcgaaggctgagaagcaagggatctgctgtcaacttggccaacacctacggcgtcaagaccaatagcggtgggaataccgctaatagcttcgggaacattgccgagaaggaagtcaccagccctggaggttcgatgccaagtctgccgatgatcgctcatcctaccagtaagcctgctaagagagatgttgcatcggtaaagttcgatggtccatatgcccattacacgggaagcttggcgcgattatttgacgctgcacaaacagttgatcaaattgcgcgccaagtagatgaccctggattgcgccacgccgataagactcaagtcggccttgagctgtgtaccagacacgctgccgaatttttcggtttttatatctgccgtttcgtgctggctgatctcgggatgcttctggacaaatttgtcaagagaggcagcgaatgggttctcagctag

SEQ ID NO: 26858 - protein, 1703 aa, Muscodor strobelii
  misc_feature: SGI Peptide ID NO. 569190
  misc_feature (743)..(811): Pfam Id: PF04212 Pfam Desc: MIT (microtubule interacting and transport) domain
  misc_feature (533)..(1703): NCBI GI: 256726243 Blast Desc: NECHADRAFT_104843 [Nectria haematococca mpVI 77-13-4]
  misc_feature (612)..(1703): NCBI GI: 46111563 Blast Desc: FG02663.1 [Gibberella zeae PH-1]
  misc_feature (514)..(1702): NCBI GI: 171677758 Blast Desc: protein product [Podospora anserina] gi|170936947|emb|CAP61606.1| protein product [Podospora anserina]
  misc_feature (713)..(1702): NCBI GI: 154310104 Blast Desc: BC1G_06972 [Botryotinia fuckeliana B05.10] gi|150851533|gb|EDN26726.1| BC1G_06972 [Botryotinia fuckeliana B05.10]
  misc_feature (743)..(1702): NCBI GI: 156043189 Blast Desc: SS1G_10597 [Sclerotinia sclerotiorum 1980] gi|154694985|gb|EDN94723.1| SS1G_10597 [Sclerotinia sclerotiorum 1980]
  misc_feature (937)..(1702): NCBI GI: 116201379 Blast Desc: CHGG_08574 [Chaetomium globosum CBS 148.51] gi|88177092|gb|EAQ84560.1| CHGG_08574 [Chaetomium globosum CBS 148.51]
  misc_feature (941)..(1702): NCBI GI: 85089812 Blast Desc: NCU05926 [Neurospora crassa OR74A] gi|28919446|gb|EAA28885.1| [Neurospora crassa OR74A]
  misc_feature (734)..(1702): NCBI GI: 259480039 Blast Desc: TPA: conserved [Aspergillus nidulans FGSC A4]
  misc_feature (699)..(1702): NCBI GI: 121698026 Blast Desc: conserved [Aspergillus clavatus NRRL 1] gi|119395832|gb|EAW06264.1| conserved [Aspergillus clavatus NRRL 1]
  misc_feature (740)..(1702): NCBI GI: 159129182 Blast Desc: conserved [Aspergillus fumigatus A1163]
MMPQSMISSTTSLPTYEAQQRQGRKRAPSQPGKYTATALTTSPTTTSTLSAFVGEGSKNTYNRSRTTPRGEYPGHEQNRNTAGVVDAASGGDGSKGLRHNNNFHYNSKGRQQSIAEAVLAGTGSSPITSTRDDAGNRTYYNGFSTDGEADGANEDDDFDSSLDGDLHDVSVNDYRSRIAVEDRRQRPQPMGMIREDRSAPPGGDGHSSASFSQRAKKLASSPPSSRSGVGNRQSRQLQSQFQFQFQSQSLGSLASTNNGSIDNGVAAANPSRVQANSSDKPQQQRAGHSYNQSCWKRRTTAVAHVTTVCAAAGVITAAPARSGGANGATFAIDSAIQSGFIGSSGDSSGTTRARAGSNTNHNHAHTRPFDVPPSTLPPLSGPATTSTPTPIRSAPHHQQNSHQEDLDAYAHPPQPIPQQPRSRFAPSNSNSNSNSNSNLKSKHTTTASISTAQQSQSQSQLQMQLSSANAIVQDPPTHDQFATSFLDPLNSPPTPLDAATSSPPAATGLDAGPRRPRSRASSIGTTSDGFRNLNRWSSSTASSRLSAWDYHHYQQQQAQQQKLGGAAARRRMSVDSIGLLSQSSRADSIPEPQPHLVQYPARASPPPPPAPPPNLPPIISLSPLDTDPEALSRRGYGQASSAGAMGRGSPRVTTPNSVFANRTPNGDEVNSYFWNDLSNPARTASPAMRSAATLLPAAPVTRYGDRDGQSERKGHSRERSTAKGSGDSTKTKDRNSKPSQKAMLSKALSKANAAVQLDNNQNYTAARDSYVEACELLQHVLARTSGEEDRKKLEAIRRTYTSRIDELDGLVPANVSNKALPARPDSLSYHDVQIELAGADSQSDAATITKSQRDESPNSQVSSNPPRRPSESTTYSDYSRPSDRERSTSRPSFSKPSKSPMRRNFEGGQLTIPRQTSSDGFVPAPLSPRRPISPAKAPSPESVIRQDFSISSERLAAPNEFRSHRRNLSHESASWLDPIDESGGSTASSVHSRSSSRIIRRHIRQISGDTEAEFDAALDAAVEAAYDEGYDPMDSSLTYGGGNDNDDDRIAHTMRKVELAKERVRETEREAAIEFARERERQRQLSIGGESQTYGGDFFDANDSDEEERMLEEMTRGYVMEDFAMGKQSRYKSSLPRESDSSGLTSRTWHSSGGSNPPTAATTLSMLSEKTSSNNLHKKSSPPSMPPPTNALPQPPTRPPSTSGVRNRRLSGQNAKQLKIETSKLGPPPSMPPPPIMTASAAQIKPTGGYIAQQRQALSATSTRPMPFSMRAPSSPVRGISPADIGGPTSPPDSRAAGFDEEMLTGSPSSLKGGIRENFSSTSLRSLAHGRLAIPHTDDADLSPNTPLTQTISNISLSRQQTMPALPTPIDTTFGEKWGGVGGFQLFDDFHDPVSHSPLSSYHQLPQDPDVPLPLEPCPSDAMFRPFWLMRALYQTLAHPRGGYLSNRLFVPHDAWKVKGVKLRNLEDKISQCDLLTAALLKLARVDSTDADAVLIEMQSLENILEVVQGTLSRRLGAEVGTQGIHTDKTAEPVPSVPRNNSVSGKGGAFSWRRLRSKGSAVNLANTYGVKTNSGGNTANSFGNIAEKEVTSPGGSMPSLPMIAHPTSKPAKRDVASVKFDGPYAHYTGSLARLFDAAQTVDQIARQVDDPGLRHADKTQVGLELCTRHAAEFFGFYICRFVLADLGMLLDKFVKRGSEWVLS

SEQ ID NO: 26859 - DNA, 5038 bp, Muscodor strobelii
  misc_feature: SGI EST ID NO. CUFF.63448.1
  misc_feature: Variant of the nucleotide sequence at SEQ ID NO 26857
tctccgcctccgcctcccgcgccgccgccgaacctgcctcccatcatctctctctcgcctctcgacacggatcccgaggcgctgtcgcgtcgcggatacgggcaggcgtcgtcggcgggtgccatgggtcgcggcagccccagagtcacgacacccaactctgtcttcgcaaaccggactcccaatggagatgaggtcaactcgtacttctggaacgatctctccaaccccgccagaacagcctcgccagccatgcgcagtgccgcgacactcctccccgccgcgcccgtgacgcgctacggcgaccgcgatggtcagtccgagaggaaaggccactcgagagagcggtcgacagccaagggcagtggtgactctaccaagaccaaggaccgtaacagcaagccatcgcagaaggcgatgctatccaaagccctttccaaagccaacgccgctgtgcagctggataataaccagaactacacagctgcgcgtgactcgtacgtcgaggcctgcgaactcttgcagcatgtcttggccaggactagtggtgaggaggaccgcaagaagttggaggctattcgacggacatacacgagccgcatagacgagctggacggactggtccctgccaacgtgtcgaacaaggcgctgcctgcgcggcccgacagtctcagttatcacgatgttcagatcgaactggctggagctgacagtcagtcggatgcagctaccatcacaaagtcgcagcgagatgaatcgccaaactcccaagtgtcgtccaacccaccccggcgtccttccgagtcaacgacttacagtgactactcacgaccgtcagaccgtgaacgatctacgtctcggccatcattctcaaagccttcaaaatcgccaatgcggcgcaattttgagggcggtcagctcacaattccgcgccaaacgtcgagtgatggcttcgtgccagcgccactgtcaccgcggaggccgatatcacctgcgaaagcacccagccccgagtctgtcatacggcaggatttctccatctcgtcggagcgcttagctgcaccaaatgagttccggtcacacagacggaacctcagccacgaatcagcgtcttggttggaccctatagatgagtctggtggttccacggcttcttccgttcattcgagatcgtcctcgaggatcatacggagacatattcgtcagataagtggtgacaccgaggccgagtttgacgccgctttagatgcagctgtcgaagcagcatacgatgaggggtatgacccgatggattccagcttgacctacggcggtggcaacgacaacgacgacgacaggatcgcacacacgatgcgcaaagtcgagctggccaaagaacgagtgcgcgagacagagcgggaagctgcaattgaattcgcgcgtgagcgggagcgccagaggcagttgtccattggcggagaatcccagacgtatgggggggatttcttcgacgcaaatgactcagatgaagaggaacgtatgcttgaggaaatgactaggggatatgttatggaggattttgctatgggcaaacagtcaagatacaagtccagccttccgagggagtcggattctagcggcttgacatcgcgcacatggcacagctctggcggctcgaatcccccaacagccgcaacgacgctttccatgttaagtgagaagacgtcgtcgaataatctgcataaaaagtcttctccgccttccatgcctcccccgacgaatgccttgccgcaaccaccaacacgcccgccgtcaacatcaggcgtacggaaccggcgactttcagggcaaaatgcgaagcagctcaagatcgaaacgtcgaaactagggccgccgccaagtatgccaccaccaccaatcatgactgcttcggctgctcagatcaagcctactggagggtacattgcccagcagagacaggcgctctcggcgacttcaactcgtcctatgccattctctatgcgtgcgccgtcctctccagtacggggtatcagccctgccgacatagggggaccgacaagtccaccggacagccgagcagcaggtttcgacgaagaaatgcttactggttcaccgtcgtcactgaaaggtggaatacgtgaaaatttctcatcaacgagtttaaggtcattggcacatggacgattggcgataccccatactgatgacgcagatctctcgccgaatacgcccctgacccagactatatctaatatctctctctcacgccaacaaacaatgcccgcacttcccactcccatagacacaacgttcggagagaaatggggaggagtgggtgggtttcagctgttcgacgatttccacgatccagtatctcactcgcccctttcatcatatcatcaactacctcaagaccccgacgtgccattaccgctggagccctgtccatcggacgccatgtttcgtccgttttggctgatgcgtgctttgtaccagacactggcacatccccgaggcggctacctcagcaatcgactgttcgttcctcacgacgcttggaaagtcaagggtgtcaagctccgcaacctagaagacaaaatttcgcaatgcgatctgctcactgcggctctcttgaaactcgcgcgcgtcgatagtaccgatgcagatgccgttcttatcgagatgcagagcctcgaaaacattctggaagtggtacaaggcactctgtcgcgtagacttggcgcggaagtcggaacacagggtatacacaccgacaaaacggctgagcccgtgccatctgtacctcgaaacaacagtgtcagtggaaaaggcggtgctttcagctggcgaaggctgagaagcaagggatctgctgtcaacttggccaacacctacggcgtcaagaccaatagcggtgggaataccgctaatagcttcgggaacattgccgagaaggaagtcaccagccctggaggttcgatgccaagtctgccgatgatcgctcatcctaccagtaagcctgctaagagagatgttgcatcggtaaagttcgatggtccatatgcccattacacgggaagcttggcgcgattatttgacgctgcacaaacagttgatcaaattgcgcgccaagtagatgaccctggattgcgccacgccgataagactcaagtcggccttgagctgtgtaccagacacgctgccgaatttttcggtttttatatctgccgtttcgtgctggctgatctcgggatgcttctggacaaatttgtcaagagaggcagcgaatgggttctcagctaggagactgctgctcgtcccgctagacctccaaggaatgcgacaacgacaaccgaacgacgtgattatcttatacccctacccatatagagcaccataaaaaacttgaacacgattgcatagacgagacatgtcacgatcaatctttatcggagttacttcatacactgcaaataatcagtgaacagcattgcttagcgatttctggacaaaatattcgataccactcttgtttcgaaagaacatattaccctttcgatttgctgttacgagagagagaagtaggacatagggagtggtggctagtgtgtaaacacacttagctaccagctactatagatggaaatgggaggagagctgtatatagtgacatttagtgcgcagatgtagtatggtgcggaattgacaagacccgttgcaagaccgacttgccttctattccctcatattattatttgtgatatgtttgccttttctggtatgcgactgtctggtttatttagacttgcttgattctcgtccatctatatgatgatatgctagaagcctaattcgaggcctatctctactccgtgcctctgctgtattgtatccaaatcagactatggtagtcccagagcctcgatatcaaagcacagcatttcctcacacctcgcacctcatccatctatctcccttccccttcccttcccttaccaacaatcacgcaacagcaacctcacaaatagtcctaacaaaactctcaacatcatgagcaaatcttccaaggaacaaaccatcaaccccatccttcaacttatcaaataaccccggtcccgcactcccgccatacaaaatcctcgtattcccactcctacttctcacagattcaaactgtcgaatcgctttcgtaacaccaacgacgtacgaagcgctcgccggcgcggctgcaccaatcgcccagactggttcgtaggctagtatcacatctgcggttggtgggactgcggaaagaacggcgtcgacttgagactggatggatgggagggagtggttgatgtctagatcttcctcctccccattctctcccttcgatggctgagggtgacagggggagggtgatggctgggaggaaagaggaggtttcgtgcgttcaccaacgcaaataagcggcaccatcccatttcttgccgcagcctctgctttcagcgacgtactctcatcggtctcaccgaatagtcttcttctttccgcgtgtcctacttctaatatccgacacccgatttctgagaggacggctggtgagacttcgccggtgtaggcgccgtagtctgaagtgtgcgcgtcttgggcacctaaaaggatgcgcaggggaggggatggggatggggatggggggtttaggagttgggaaactgggtagagggagatgtggtcggggattatgaatatgtctattgatgcgagagtttggagggtggagggcgagaggcgtgagagtgaggagaggagtgtgcgtgtgtaggatagggttctggagaggctgaagtacatttttgttgagacgcctacgaggcggcggcggggagggggtgaagacattttgggtgtgtttgggttttgtgttgatcttggatttgtgattgttcagaaggtatggattatttttgctatgaggtgaggctgtctaaattgagtgatatactagattgtggctttaggtgagtggtgagtcttgatgtgagggtggctccgtcat

SEQ ID NO: 26860 - DNA, 987 bp, Muscodor strobelii
  misc_feature: SGI cDNA ID NO. 569191
  misc_feature: Encodes the peptide sequence at SEQ ID NO 26861
atgactgaagaacgaaaatcgagggctagtataattgactacgagagtagacttgcctttggcgactcgtatacctttgtacaaggaactgcgggaacaacgaacttttcgtttatcggcagttacttaccaggcgaattcagcttcaaaaaagagactctcttgaacgacaagatcgtccagaactttacaggcaccgccgaaggtggtccgaattgggtcgaatatctcacaggatgcggtatagagcctggggagacgtcgccgagggattgtgatgtgcagctatgggacttcgcctttgcaggcgctgatgtttccatagagtttctggcacagcaccacaatacgacgacaccgcttgtgaatcaaacacagcaatatctgacgtggggggagccgataattgggaagaagatggataaggcaaaagcgctcgttgcgatctggatcggtatcaacgacatcaacgactcgtctaagtttacaaacgtttcttttccagacttctatgaagacattatatcagccatattcgaggagagtgtaactccgctcttcaaagccggttataagagcttcttattcatgaacttaccaccactcgaccgaacgcaagccaacgccgcgtcgttgacaccactcccgagtaaggcgatgatcaactggtgggatgaaagtcttgcgacgcatagccaagcctttgcaaagaagcacccgagcgcgaagacgatggtttacgacgtgaacacatttcttaaccacgtgatggacaacccagatgaatacaatatcacagacaccacgcatttctgtccagactacgcgaatcttgatgttctgtaccatccagaagcctatgattgtctaccgcttgacaaatacttctggtataactcaggtcatatgacctcgcatacgcacaagattatgacgtcggacctaaagcagtttctgaagaatcaatctacaacacataaggggtag

SEQ ID NO: 26861 - protein, 328 aa, Muscodor strobelii
  misc_feature: SGI Peptide ID NO. 569191
  misc_feature (18)..(323): NCBI GI: 71001456 Blast Desc: lysophospholipase A [Aspergillus fumigatus Af293] gi|66853047|gb|EAL93371.1| lysophospholipase A, [Aspergillus fumigatus Af293] gi|159129481|gb|EDP54595.1| lysophospholipase A,
  misc_feature (18)..(320): NCBI GI: 119481047 Blast Desc: NFIA_086100 [Neosartorya fischeri NRRL 181] gi|119408706|gb|EAW18655.1| conserved [Neosartorya fischeri NRRL 181]
  misc_feature (13)..(323): NCBI GI: 261359373 Blast Desc: conserved [Verticillium albo-atrum VaMs.102]
  misc_feature (18)..(319): NCBI GI: 115384636 Blast Desc: conserved [Aspergillus terreus NIH2624] gi|114196557|gb|EAU38257.1| conserved [Aspergillus terreus NIH2624]
  misc_feature (15)..(322): NCBI GI: 189209988 Blast Desc: conserved [Pyrenophora tritici-repentis Pt-1C-BFP] gi|187977419|gb|EDU44045.1| conserved [Pyrenophora tritici-repentis Pt-1C-BFP]
  misc_feature (18)..(321): NCBI GI: 259479899 Blast Desc: TPA: lysophospholipase A, (AFU_orthologue; AFUA_2G10760) [Aspergillus nidulans FGSC A4]
  misc_feature (18)..(320): NCBI GI: 67539520 Blast Desc: AN5930.2 [Aspergillus nidulans FGSC A4] gi|40738603|gb|EAA57793.1| AN5930.2 [Aspergillus nidulans FGSC A4]
  misc_feature (67)..(323): NCBI GI: 145231849 Blast Desc: An02g02540 [Aspergillus niger] gi|134056302|emb|CAK37535.1| protein product [Aspergillus niger]
  misc_feature (2)..(323): NCBI GI: 156044756 Blast Desc: SS1G_10482 [Sclerotinia sclerotiorum 1980] gi|154694870|gb|EDN94608.1| SS1G_10482 [Sclerotinia sclerotiorum 1980]
  misc_feature (114)..(320): NCBI GI: 169783418 Blast Desc: [Aspergillus oryzae RIB40] gi|83774915|dbj|BAE65038.1| protein product [Aspergillus oryzae]
MTEERKSRASIIDYESRLAFGDSYTFVQGTAGTTNFSFIGSYLPGEFSFKKETLLNDKIVQNFTGTAEGGPNWVEYLTGCGIEPGETSPRDCDVQLWDFAFAGADVSIEFLAQHHNTTTPLVNQTQQYLTWGEPIIGKKMDKAKALVAIWIGINDINDSSKFTNVSFPDFYEDIISAIFEESVTPLFKAGYKSFLFMNLPPLDRTQANAASLTPLPSKAMINWWDESLATHSQAFAKKHPSAKTMVYDVNTFLNHVMDNPDEYNITDTTHFCPDYANLDVLYHPEAYDCLPLDKYFWYNSGHMTSHTHKIMTSDLKQFLKNQSTTHKG

SEQ ID NO: 26862 - DNA, 1749 bp, Muscodor strobelii
  misc_feature: SGI cDNA ID NO. 569192
  misc_feature: Encodes the peptide sequence at SEQ ID NO 26863
atgtcttcagaaacaggtcgtggcgatgaagagttcaatcgcgtcgtgaagaccacattgaaaacgcagtatgaagactggccaaatgaagcaggcttcgagggattgaccgaaaaacgaggaccggtagacctgaaagtaacaggatcaataccttcttgggctacaggctccctatatcgtactggccccgggcaatataatgttgagaatacacccaaaggccttttcaaaacaacgcactggtttgacggattcgcccatactcacaagtttactattatcgccactggcaaccctaaaacaccaacacgggtggtatactcgtctcgttatcagtctcacgattatgtagaagccattcggaagacaggcaaaataccaggtttgagctttggtcagcgccaagatccttgtattggcatattcgcaaagttcatgtccgtatggaactacaagaatcccaacccgactccctcatccgacaatgttgcggttgcggtctttgaggacatgcctggacttccacctcctccaaactactcaggacatagaccaccgatggccataactacagatgactccattatccgtcaatttgatggagacacactcgagccggtcggtagggcagaacaagacgtgcttcatcctgatttgaagggtcctctgagtagcgctcacgctcagagagacccggagaccggagatgtcttcaactacaacctcgacccaggcatgtacgcaacgtaccgcgtcttcaaaaccagtgaatcgactgggaaaacggagattatcgccaccatcgctcaaagcgatgttgcccctgcttacatccactcattcttcatgtcagagtctttcgtcatcctcgtcgtcccttcaacacacttggcatgcaagggcctcgccgtgccttggaagggcaacatcgttaacgccctcgagcccttcaatacgtctaaactgtggaaatggttcgtcgtggaccgtcgacatggccgcggtatcgtagccaccttcagtagtccagcagggttcttcttccataccatcaatgcctttgacgagcgcgatcagcacactggaaatatcaaggtttcctgcgatgtcatagaataccccacgttgagcaaaatccgtgcgttcgagatagaaacgctcttgcaagaaaaggacggagacgaatcgtactggaaggatgaggagcgcatccgcgaatgtctacctcgactcgcgagatatacgttccaggttccccagaaccagtcgggcacaactaagaacattaagttcgagaaaaatatcgtgcttcaagcacctaatgtgggtgagctgccgactatcaacccggcttaccgcacgagaaaataccgttatgcgtacggttgctcgagccacggatacagcgcattgcatgaaggtcttgtcaaaacggatgtcgaggcgcaccgagcaatattctggaatgctcccaaaggtcacacccctagtgaggcgatcttcatacctcgaccgaaacatcatcatcacagcaatgaagatggaaacgcaaaaggatacccaactgacgaagacgaagatgatggtgtccttctcactgtcgttctcgatggctacaagaagacaagctacttgctttgcatagatccgaagactatgaaagaactaggtcgagccgagtgtaactgggctattggccatggctttcacggcttacatatcccaagtacaggaccgcgaatgtaa

SEQ ID NO: 26863 - protein, 582 aa, Muscodor strobelii
  misc_feature: SGI Peptide ID NO. 569192
  misc_feature (16)..(577): Pfam Id: PF03055 Pfam Desc: Retinal pigment epithelial membrane protein
  misc_feature (444)..(577): Pfam Id: PF03055 Pfam Desc: Retinal pigment epithelial membrane protein
  misc_feature (9)..(578): NCBI GI: 171677320 Blast Desc: protein product [Podospora anserina] gi|170936728|emb|CAP61386.1| protein product [Podospora anserina]
  misc_feature (23)..(577): NCBI GI: 164422344 Blast Desc: NCU11424 [Neurospora crassa OR74A] gi|157069539|gb|EDO64867.1| [Neurospora crassa OR74A]
  misc_feature (10)..(577): NCBI GI: 121495644 Blast Desc: torulene oxygenase [Gibberella fujikuroi]
  misc_feature (10)..(576): NCBI GI: 46111487 Blast Desc: FG02625.1 [Gibberella zeae PH-1]
  misc_feature (13)..(578): NCBI GI: 116207620 Blast Desc: CHGG_03103 [Chaetomium globosum CBS 148.51] gi|88183700|gb|EAQ91168.1| CHGG_03103 [Chaetomium globosum CBS 148.51]
  misc_feature (15)..(577): NCBI GI: 121495642 Blast Desc: torulene oxygenase [Gibberella fujikuroi]
  misc_feature (10)..(576): NCBI GI: 256726255 Blast Desc: NECHADRAFT_94642 [Nectria haematococca mpVI 77-13-4]
  misc_feature (24)..(574): NCBI GI: 125662819 Blast Desc: carotenoid cleavage dioxygenase 1 [Hypocrea jecorina]
  misc_feature (24)..(575): NCBI GI: 261359064 Blast Desc: carotenoid cleavage dioxygenase [Verticillium albo-atrum VaMs.102]
  misc_feature (23)..(579): NCBI GI: 226283957 Blast Desc: carotenoid cleavage dioxygenase [Paracoccidioides brasiliensis Pb01]
  misc_feature (38)..(576): SWISSPROT Homolog: EC 1.14.99.36 Beta-carotene 15,15'-monooxygenase
MSSETGRGDEEFNRVVKTTLKTQYEDWPNEAGFEGLTEKRGPVDLKVTGSIPSWATGSLYRTGPGQYNVENTPKGLFKTTHWFDGFAHTHKFTIIATGNPKTPTRVVYSSRYQSHDYVEAIRKTGKIPGLSFGQRQDPCIGIFAKFMSVWNYKNPNPTPSSDNVAVAVFEDMPGLPPPPNYSGHRPPMAITTDDSIIRQFDGDTLEPVGRAEQDVLHPDLKGPLSSAHAQRDPETGDVFNYNLDPGMYATYRVFKTSESTGKTEIIATIAQSDVAPAYIHSFFMSESFVILVVPSTHLACKGLAVPWKGNIVNALEPFNTSKLWKWFVVDRRHGRGIVATFSSPAGFFFHTINAFDERDQHTGNIKVSCDVIEYPTLSKIRAFEIETLLQEKDGDESYWKDEERIRECLPRLARYTFQVPQNQSGTTKNIKFEKNIVLQAPNVGELPTINPAYRTRKYRYAYGCSSHGYSALHEGLVKTDVEAHRAIFWNAPKGHTPSEAIFIPRPKHHHHSNEDGNAKGYPTDEDEDDGVLLTVVLDGYKKTSYLLCIDPKTMKELGRAECNWAIGHGFHGLHIPSTGPRM

SEQ ID NO: 26864 - DNA, 1011 bp, Muscodor strobelii
  misc_feature: SGI cDNA ID NO. 569193
  misc_feature: Encodes the peptide sequence at SEQ ID NO 26865
atgcgcttcttctcgtcatatgcttcggcagacaaaggcttgagaaattcaatttccgccagaaggcaatgcttgtgtctttcatcaaacaacacgaacgtgcgcttgcttgcgaagtcgaccatctcacgtaccctggcccgttccttttctgaccgaggctggctcggtgccagcttctttttcaagaggggagaaggcgatcgaggtggtgtttccaaattctttcccacgatcgctggtcaactggttcagtgtgaatcagccctcgcgacgtatataaaagatgccatggaggctgataaggccatttgcgacagagctatgcgggagcagtgcgaaaggctcgttttcgaaccgctttcgaaattgccttcgcgggaccgaaaaaccgacatctttgtcattgtcgtcgatgcattagacgagtgcgatagggaagaggatgttcagctgcttgttcatctactatctcgtgctaatgatctgaagtctgtccaactacgaatattctttactagtaggcccgacttacccattcgcctgggcttcaatcgaatacaaggcacatatgaagacctgattcttcatgacatcaagcagcccgtgattgcgcatgacctacgtgtctacttccagcacgagcttgccaagatcaggcaggactacaacgattccgtgcctcaacatcgacaattagcgccaacctggcctgagctaccagcagtccaaatccttatcgacatggctattcctctctttatcttcgctgccactacatgccgattcttggccgaccgtcggacaggcactccacggtctaagctggaacgaatattggcgcatccaatgacgagcgaggattacaaacttgatgcaacatacttacccgttctcgagcagctcatactgaacttgccggataaacggaaaaatgaaatgttaacactattcaaacgccttatcggttcgattgtcttgcttgcaagccccttgccaacgttgccctag

SEQ ID NO: 26865 - protein, 336 aa, Muscodor strobelii
  misc_feature: SGI Peptide ID NO. 569193
  misc_feature (38)..(332): NCBI GI: 154310178 Blast Desc: BC1G_07009 [Botryotinia fuckeliana B05.10] gi|150851570|gb|EDN26763.1| BC1G_07009 [Botryotinia fuckeliana B05.10]
  misc_feature (38)..(335): NCBI GI: 154936828 Blast Desc: NWD2 [Podospora anserina]
  misc_feature (38)..(335): NCBI GI: 171676738 Blast Desc: protein product [Podospora anserina] gi|170936436|emb|CAP61093.1| protein product [Podospora anserina]
  misc_feature (38)..(334): NCBI GI: 171678525 Blast Desc: protein product [Podospora anserina] gi|170937332|emb|CAP61990.1| protein product [Podospora anserina]
  misc_feature (38)..(335): NCBI GI: 116199375 Blast Desc: CHGG_07843 [Chaetomium globosum CBS 148.51] gi|88179122|gb|EAQ86590.1| CHGG_07843 [Chaetomium globosum CBS 148.51]
  misc_feature (38)..(332): NCBI GI: 46130696 Blast Desc: FG08952.1 [Gibberella zeae PH-1]
  misc_feature (38)..(332): NCBI GI: 116191741 Blast Desc: CHGG_05588 [Chaetomium globosum CBS 148.51] gi|88181501|gb|EAQ88969.1| CHGG_05588 [Chaetomium globosum CBS 148.51]
  misc_feature (38)..(335): NCBI GI: 256723335 Blast Desc: NECHADRAFT_51778 [Nectria haematococca mpVI 77-13-4]
  misc_feature (38)..(332): NCBI GI: 116182430 Blast Desc: CHGG_01843 [Chaetomium globosum CBS 148.51] gi|88186140|gb|EAQ93608.1| CHGG_01843 [Chaetomium globosum CBS 148.51]
  misc_feature (38)..(332): NCBI GI: 256722587 Blast Desc: NECHADRAFT_72141 [Nectria haematococca mpVI 77-13-4]
MRFFSSYASADKGLRNSISARRQCLCLSSNNTNVRLLAKSTISRTLARSFSDRGWLGASFFFKRGEGDRGGVSKFFPTIAGQLVQCESALATYIKDAMEADKAICDRAMREQCERLVFEPLSKLPSRDRKTDIFVIVVDALDECDREEDVQLLVHLLSRANDLKSVQLRIFFTSRPDLPIRLGFNRIQGTYEDLILHDIKQPVIAHDLRVYFQHELAKIRQDYNDSVPQHRQLAPTWPELPAVQILIDMAIPLFIFAATTCRFLADRRTGTPRSKLERILAHPMTSEDYKLDATYLPVLEQLILNLPDKRKNEMLTLFKRLIGSIVLLASPLPTLP

SEQ ID NO: 26866 - DNA, 2045 bp, Muscodor strobelii
  misc_feature: SGI EST ID NO. CUFF.63289.0
  misc_feature: Variant of the nucleotide sequence at SEQ ID NO 26864
gaggtgaaatacagcaaaaagcgatcggaattcagcagggggggttgagcaatcacgaccgcgagctgatatcagatcccacgagtcttgcaatcctcgtcattagggacggtctaggcgcggcgaagaaggagcagacaaaatgggggcgcgtcgcctatgcagatttcatttggttagtacaagagaccacgacggcagcccatgcgcttcttctcgtcatatgcttcggcagacaaaggcttgagaaattcaatttccgccagaaggcaatgcttgtgtctttcatcaaacaacacgaacgtgcgcttgcttgcgaagtcgaccatctcacgtaccctggcccgttccttttctgaccgaggctggctcggtgccagcttctttttcaagaggggagaaggcgatcgaggtggtgtttccaaattctttcccacgatcgctggtcaactggttcagtgtgaatcagccctcgcgacgtatataaaagatgccatggaggctgataaggccatttgcgacagagctatgcgggagcagtgcgaaaggctcgttttcgaaccgctttcgaaattgccttcgcgggaccgaaaaaccgacatctttgtcattgtcgtcgatgcattagacgagtgcgatagggaagaggatgttcagctgcttgttcatctactatctcgtgctaatgatctgaagtctgtccaactacgaatattctttactagtaggcccgacttacccattcgcctgggcttcaatcgaatacaaggcacatatgaagacctgattcttcatgacatcaagcagcccgtgattgcgcatgacctacgtgtctacttccagcacgagcttgccaagatcaggcaggactacaacgattccgtgcctcaacatcgacaattagcgccaacctggcctgagctaccagcagtccaaatccttatcgacatggctattcctctctttatcttcgctgccactacatgccgattcttggccgaccgtcggacaggcactccacggtctaagctggaacgaatattggcgcatccaatgacgagcgaggattacaaacttgatgcaacatacttacccgttctcgagcagctcatactgaacttgccggataaacggaaaaatgaaatgttaacactattcaaacgccttatcggttcgattgtcttgcttgcaagccccttgccaacgttgccctaggacagctactcggcatctccctggatgacatcgatagccaacttgattttctccactcggtcctgagtgttccttcttcaccagctgttcccgtaaggctgctgcacttgtcatttcgcgactttctcgtcgatccatcaaagcgtggcacgaacctgttctgggtagatggggaagaagtccacaggcaagtggcggccgactgccttcgagtgatgaacacggccctccggaaagatatctgcgatgtgcaatggccaggcacgtcatcctcgtctatcgatcataatatgatcaatgaaaagattaggccagaagttcagtacgcctgtcagtactgggcatatcaatccagaaggccggggagcgattattcgataatggtcaggttcattgcttcctgaggcggcacttcctccactgcttggaggtattaagcattattggcagggcttcccaaagctttcgggacattcacacattgcaatcactacttcaggatgaaaactgcaccgagttgtcatattttcttaatgatgctttacgctttgcccgcacgaatgtttcaagtatagaggctgcggcgctccaagtgtactgctcggcacttgcctttgcgccagagaaaagtactatccgcaatacttttcatggtgacatcccaaagtggatacgtctcggcccgaaggtgaatgcggactggaataatcgtctacagacgctcgagggtcacagcggcattatctactcggtggcgttctcgcccgacggccagtctcttatcaccaacgccggtactatttccttacatgacctaaaccagcaacaac

SEQ ID NO: 26867 - DNA, 1446 bp, Muscodor strobelii
  misc_feature: SGI cDNA ID NO. 569194
  misc_feature: Encodes the peptide sequence at SEQ ID NO 26868
gaggatgacctgatccacatggccagggaaaggtcggggggcagcgagatcgttcatgcgaagtatgtcattggctgcgatggcgctcgtagttgggttaggcgagcgttgggtatcgagctgcaaggcgatgctaccgatttcatatggggagtcatggacattattccgattacggattttccagatatacggatgagatgcgccatccactcggccgagaacggcagtttgatggtcattccgcgagaaaacaggcttgtacgactttacattcaactcaaagaggtgctcccggacgcctccgggagagtggaccgatcgaagattgctcccgaactcatcttcgctgcggcgaagaagatcttggccccctacaagattaattacgagtactgcgactggtggacagcataccagatcggacagagagtcgggaaaagcttcgacgctcacagccgtgttttcctcgccggcgatgcggtccacactcactcgcccaaggccggccagggcatgaacgtgtcgatgcaggattgctacaatctgggttggaaggtcggcctcgttgtccgtggcatcgcaaagccgaacatcttgtgtacgtaccagatggagcgccgtcgcgtcgcactagacttgatcgagtttgatcgccgtttcagtcgtctattttccgggcgaccggccaaggatctcatggatatcgaaggagtcagcatgggagagttcaaagctgtcttcgagaagggcaacattttcgcgtccgggctatcggtgaactacggaccaagcaatattaccgtgaagccttgcgatgcgtccgcctggggtgacgacggcgatgacgtcgctgtggacatggcgagcatctccgctgaagacttcgacaagaagcaggcactggcggccggtctccccgttggcatgcgctttgacagcttcagggtgctcaaccaggccagcgcccagccatttgagttccagcagaggctgaaggccgatggccgcttccgcgtcgtacttttcgcaggtgatatcctcgaccccgaccagaaagcgcgcgtgaacgcgttgtgtgacgacttagagaagcccgagagcttttaccaggcgatgacggcgggcagggtgagggtaagggacaacgtcgtcgagatcctcacaatccattcgtccaagcgtaaggaggtcgaaatcctacgggacttccccgagaccctgcgcccgtttgatcttcataccggcttgaactacgacatgatctatgtcgatgatgagagctaccacgaaggatatggcgatgcgtatcgcaagtacggcgttgataagcgacgcggatgcgttgttgctgtccggccagatcagcatgtcgcatgggtcggagacctggaggatgtgtctgagctgcaggggtattttgagggatgtcttaatctggtctga

SEQ ID NO: 26868 - protein, 481 aa, Muscodor strobelii
  misc_feature: SGI Peptide ID NO. 569194
  misc_feature (1)..(218): Pfam Id: PF01494 Pfam Desc: FAD binding domain
  misc_feature (254)..(447): Pfam Id: PF07976 Pfam Desc: Phenol hydroxylase, C-terminal dimerisation domain
  misc_feature (10)..(218): Pfam Id: PF01494 Pfam Desc: FAD binding domain
  misc_feature (1)..(480): NCBI GI: 85104998 Blast Desc: NCU11294 [Neurospora crassa OR74A] gi|28923431|gb|EAA32615.1| NCU11294 [Neurospora crassa OR74A] gi|40882278|emb|CAF06102.1| phenol 2-monooxygenase [Neurospora
  misc_feature (11)..(478): NCBI GI: 171683651 Blast Desc: protein product [Podospora anserina] gi|170941785|emb|CAP67439.1| protein product [Podospora anserina]
  misc_feature (2)..(478): NCBI GI: 46114714 Blast Desc: FG03199.1 [Gibberella zeae PH-1]
  misc_feature (4)..(480): NCBI GI: 256724396 Blast Desc: [Nectria haematococca mpVI 77-13-4]
  misc_feature (2)..(478): NCBI GI: 189194177 Blast Desc: phenol 2-monooxygenase [Pyrenophora tritici-repentis Pt-1C-BFP] gi|187978991|gb|EDU45617.1| phenol 2-monooxygenase [Pyrenophora tritici-repentis Pt-1C-BFP]
  misc_feature (2)..(474): NCBI GI: 145602957 Blast Desc: MGG_04639 [Magnaporthe grisea 70-15] gi|145011303|gb|EDJ95959.1| MGG_04639 [Magnaporthe grisea 70-15]
  misc_feature (2)..(480): NCBI GI: 119497919 Blast Desc: FAD binding domain protein [Neosartorya fischeri NRRL 181] gi|119413881|gb|EAW23820.1| FAD binding domain protein [Neosartorya fischeri NRRL 181]
  misc_feature (2)..(478): NCBI GI: 159128707 Blast Desc: FAD monooxygenase, [Aspergillus fumigatus A1163]
  misc_feature (2)..(478): NCBI GI: 70988883 Blast Desc: FAD monooxygenase [Aspergillus fumigatus Af293] gi|66846924|gb|EAL87255.1| FAD monooxygenase, [Aspergillus fumigatus Af293]
  misc_feature (10)..(478): NCBI GI: 256724174 Blast Desc: [Nectria haematococca mpVI 77-13-4]
  misc_feature (10)..(478): SWISSPROT Homolog: EC 1.14.13.7 Phenol 2-monooxygenase
EDDLIHMARERSGGSEIVHAKYVIGCDGARSWVRRALGIELQGDATDFIWGVMDIIPITDFPDIRMRCAIHSAENGSLMVIPRENRLVRLYIQLKEVLPDASGRVDRSKIAPELIFAAAKKILAPYKINYEYCDWWTAYQIGQRVGKSFDAHSRVFLAGDAVHTHSPKAGQGMNVSMQDCYNLGWKVGLVVRGIAKPNILCTYQMERRRVALDLIEFDRRFSRLFSGRPAKDLMDIEGVSMGEFKAVFEKGNIFASGLSVNYGPSNITVKPCDASAWGDDGDDVAVDMASISAEDFDKKQALAAGLPVGMRFDSFRVLNQASAQPFEFQQRLKADGRFRVVLFAGDILDPDQKARVNALCDDLEKPESFYQAMTAGRVRVRDNVVEILTIHSSKRKEVEILRDFPETLRPFDLHTGLNYDMIYVDDESYHEGYGDAYRKYGVDKRRGCVVAVRPDQHVAWVGDLEDVSELQGYFEGCLNLV

SEQ ID NO: 26869 - DNA, 1848 bp, Muscodor strobelii
  misc_feature: SGI EST ID NO. CUFF.63291.0
  misc_feature: Variant of the nucleotide sequence at SEQ ID NO 26867
tttcggagcaacctgacctaacacgacgaggaggatgacctgatccacatggccagggaaaggtcggggggcagcgagatcgttcatgcgaagtatgtcattggctgcgatggcgctcgtagttgggttaggcgagcgttgggtatcgagctgcaaggcgatgctaccgatttcatatggggagtcatggacattattccgattacggattttccagatatacggatgagatgcgccatccactcggccgagaacggcagtttgatggtcattccgcgagaaaacaggcttgtacgactttacattcaactcaaagaggtgctcccggacgcctccgggagagtggaccgatcgaagattgctcccgaactcatcttcgctgcggcgaagaagatcttggccccctacaagattaattacgagtactgcgactggtggacagcataccagatcggacagagagtcgggaaaagcttcgacgctcacagccgtgttttcctcgccggcgatgcggtccacactcactcgcccaaggccggccagggcatgaacgtgtcgatgcaggattgctacaatctgggttggaaggtcggcctcgttgtccgtggcatcgcaaagccgaacatcttgtgtacgtaccagatggagcgccgtcgcgtcgcactagacttgatcgagtttgatcgccgtttcagtcgtctattttccgggcgaccggccaaggatctcatggatatcgaaggagtcagcatgggagagttcaaagctgtcttcgagaagggcaacattttcgcgtccgggctatcggtgaactacggaccaagcaatattaccgtgaagccttgcgatgcgtccgcctggggtgacgacggcgatgacgtcgctgtggacatggcgagcatctccgctgaagacttcgacaagaagcaggcactggcggccggtctccccgttggcatgcgctttgacagcttcagggtgctcaaccaggccagcgcccagccatttgagttccagcagaggctgaaggccgatggccgcttccgcgtcgtacttttcgcaggtgatatcctcgaccccgaccagaaagcgcgcgtgaacgcgttgtgtgacgacttagagaagcccgagagcttttaccaggcgatgacggcgggcagggtgagggtaagggacaacgtcgtcgagatcctcacaatccattcgtccaagcgtaaggaggtcgaaatcctacgggacttccccgagaccctgcgcccgtttgatcttcataccggcttgaactacgacatgatctatgtcgatgatgagagctaccacgaaggatatggcgatgcgtatcgcaagtacggcgttgataagcgacgcggatgcgttgttgctgtccggccagatcagcatgtcgcatgggtcggagacctggaggatgtgtctgagctgcaggggtattttgagggatgtcttaatctggtctgattccgcatgtctggcaagtagacttgtaaatgtagatactgtatgctttagccctttaagccggcttctggccccttcgctctagctagagttaagcagtagccgcatgcacacctcgacaagtcataacgtaggcactcatatactgtaacccgagtatatctcgcagcaaaatagtcacgaaactgctcgctccttacatagacacttcccgaggtattccattttcttatgtttcacgcctttataatgaatctagatgccttatccaaacaaaaccctgatggtatatacccatccagatatctacagccaaaacatcccgcaaatataagtcccaaaatgtattagtgaattattgagccaaatggc

SEQ ID NO: 26870 - DNA, 633 bp, Muscodor strobelii
  misc_feature: SGI cDNA ID NO. 569195
  misc_feature: Elevated expression when VOC is produced
  misc_feature: Encodes the peptide sequence at SEQ ID NO 26871
atgagcagacaataccggtcttccaacaaccgaggtcatcaatggccaaacccgttgcccattgacgagctccagtaccacaacaatcgctatgccgagtctgcccagtacgatgcaacgactggaaacagggatcaggcatggtatcaatatcatcagtctagtagtaccatattgactgaagtcaaccgtaacgactccaacgatttcgccgttggcgaactactgccgcccgaggcggtgcgcggacagtctgctcatcagtccgctcaagaatatacagagatgagagatgttgtgatgcaagacagtggaatggagcacgctgtgtttgaagatcaagtgcataggggtggcggaaaccagatcgtaggagccagacttgcgccaggagtccaggtagacaaggagaagttgttcagaagcactgaacacaacacctttcgtcgaaaccgtcttgcggcacaaagtgcaggccatcgccagggtgccagccatcagatcgtcggcctgtcagtcggctatgacgccgattatggtccaatcgggggccgcttcgaacacaacatcaatgagggacccggccaccagatcataggtttctcatttgaaggattgggtggttctgtatag

SEQ ID NO: 26871 - protein, 210 aa, Muscodor strobelii
  misc_feature: SGI Peptide ID NO. 569195
  misc_feature: Useful for introducing or modulating the production of volatile compounds
MSRQYRSSNNRGHQWPNPLPIDELQYHNNRYAESAQYDATTGNRDQAWYQYHQSSSTILTEVNRNDSNDFAVGELLPPEAVRGQSAHQSAQEYTEMRDVVMQDSGMEHAVFEDQVHRGGGNQIVGARLAPGVQVDKEKLFRSTEHNTFRRNRLAAQSAGHRQGASHQIVGLSVGYDADYGPIGGRFEHNINEGPGHQIIGFSFEGLGGSV

SEQ ID NO: 26872 - DNA, 1152 bp, Muscodor strobelii
  misc_feature: SGI EST ID NO. CUFF.63300.0
  misc_feature: Variant of the nucleotide sequence at SEQ ID NO 26870
gcagcatgcagcaattgctcgttatctcaacttcggcgcgtaatatcacggacttccaatagatggcgagagtcacccatgcggtatgatatgtcacgacccaatcagaatggttgagggcttagacggaaccgccactgacaacatacctagattcgtggactgcctacctaggtaatatatacttgaggctccgtcggacaccctgcccgcgtttcttgccctttctccatgtggccaacacgaaatcgataccagaccgagggtttcgaccagtctagcaaagtggccttgcataaaggccaacattcttttttggtgttagtacacacccaaatcattatatctcatcatgagcagacaataccggtcttccaacaaccgaggtcatcaatggccaaacccgttgcccattgacgagctccagtaccacaacaatcgctatgccgagtctgcccagtacgatgcaacgactggaaacagggatcaggcatggtatcaatatcatcagtctagtagtaccatattgactgaagtcaaccgtaacgactccaacgatttcgccgttggcgaactactgccgcccgaggcggtgcgcggacagtctgctcatcagtccgctcaagaatatacagagatgagagatgttgtgatgcaagacagtggaatggagcacgctgtgtttgaagatcaagtgcataggggtggcggaaaccagatcgtaggagccagacttgcgccaggagtccaggtagacaaggagaagttgttcagaagcactgaacacaacacctttcgtcgaaaccgtcttgcggcacaaagtgcaggccatcgccagggtgccagccatcagatcgtcggcctgtcagtcggctatgacgccgattatggtccaatcgggggccgcttcgaacacaacatcaatgagggacccggccaccagatcataggtttctcatttgaaggattgggtggttctgtatagaagaggggggacggtgtccgtagataggttgattctattacgataggctactcaggacgccattttatgagatcaacgtcagatcatacattgcttattgagcgaaactcattcacattcctgcattttcccctggaactagtattgtgttcaaagcgtatatacta

SEQ ID NO: 26873 - DNA, 1296 bp, Muscodor strobelii
  misc_feature: SGI cDNA ID NO. 569196
  misc_feature: Elevated expression when VOC is produced
  misc_feature: Encodes the peptide sequence at SEQ ID NO 26874
atgtggggcggggccaggagaaggagatgcggcaactatagcatggcggaacgaatgcgccggaggcgggaggcttgcgaccggagagtggaggataacgtaccacgtcccttgtatcggcattgggtcgacgacgcagccacaaaaaccccggcccctccgaaaagacgtttctggcaacggaaacagaggcagccgataccaccaacggatcctccaaagcaagagcttcgcattgacgacgaggcgttgagaaggagacggcggctttcgctcggccctggcgatgatatggtccctctcggatccgagagcctgacaggccgtgcaaatcagagacctgcgccgagcggcgacggcaacaaagcttcaagggccgaatgctacttactaacgctcccagtggagattaggataatgatctgggaatacgcagttggtaatcggacgctgcacatcttctacggcaagcctgctgcgtcggcgtgggtacgccattccctcgtttcaaagccatcaactcaaaacatggggtgcgctgaatgcgtttaccgaccgactccgaacggctgggagaactcgttccccggtcaggaaacctgcccagactgcggcatcatttgggactcgtttgccgagtgtagtgggagggtgacgtggaccaacttaccagcgccggactgggacgtggtccctcaatggagcgcgagaggaaaatgtcatatgggggatgtagacactagcgagtggcaacctttggcgctgctccgcacatgtagaaaaatctatactgaagctgtcgacgttttgtacagcacaaatacatttcgtttcgccgacccgaatgagcgtggcccaggcattaggaaaccgcataaacagcccaaactaatagaggatttctcgtcgacagtcctgccccaacgcttagagcggatcgctcgcgtctctacgggcatcgatattacccgtttcggcgccctcgacgatgtgctggcgaggaacctaccgaacctcagatatctcgagctccgggcaaaagtagtattggatccggaatggctcgatttagatccaaacccagctccacagccaatcaacgggacggctctcaaggagatggtggcaagagtgagaggtagggtagaaggggccaaagtcgtgctcagggctgatctagatgagagagtccctcctagcatgcctgtcggcaccgagctcactgagggtctagaaatcgtcgtcacgcctgagaaagcgtgggaaagatgtgggatgatttttgaaagattttaa

SEQ ID NO: 26874 - protein, 431 aa, Muscodor strobelii
  misc_feature: SGI Peptide ID NO. 569196
  misc_feature (255)..(345): NCBI GI: 255932155 Blast Desc: Pc12g08010 [Penicillium chrysogenum Wisconsin 54-1255] gi|211582253|emb|CAP80428.1| Pc12g08010 [Penicillium chrysogenum Wisconsin 54-1255]
  misc_feature (253)..(344): NCBI GI: 261205448 Blast Desc: [Ajellomyces dermatitidis SLH14081] gi|239592520|gb|EEQ75101.1| [Ajellomyces dermatitidis SLH14081]
  misc_feature (253)..(344): NCBI GI: 239611327 Blast Desc: [Ajellomyces dermatitidis ER-3]
  misc_feature (253)..(326): NCBI GI: 212530941 Blast Desc: PMAA_062090 [Penicillium marneffei ATCC 18224] gi|212530945|ref|XP_002145629.1| PMAA_062090 [Penicillium marneffei ATCC 18224] gi|210070991|gb|EEA25080.1| PMAA_062090
  misc_feature (253)..(326): NCBI GI: 212530943 Blast Desc: PMAA_062090 [Penicillium marneffei ATCC 18224] gi|210070992|gb|EEA25081.1| PMAA_062090 [Penicillium marneffei ATCC 18224]
  misc_feature (253)..(313): NCBI GI: 169615290 Blast Desc: SNOG_10802 [Phaeosphaeria nodorum SN15] gi|111061076|gb|EAT82196.1| SNOG_10802 [Phaeosphaeria nodorum SN15]
  misc_feature: Useful for introducing or modulating the production of volatile compounds
MWGGARRRRCGNYSMAERMRRRREACDRRVEDNVPRPLYRHWVDDAATKTPAPPKRRFWQRKQRQPIPPTDPPKQELRIDDEALRRRRRLSLGPGDDMVPLGSESLTGRANQRPAPSGDGNKASRAECYLLTLPVEIRIMIWEYAVGNRTLHIFYGKPAASAWVRHSLVSKPSTQNMGCAECVYRPTPNGWENSFPGQETCPDCGIIWDSFAECSGRVTWTNLPAPDWDVVPQWSARGKCHMGDVDTSEWQPLALLRTCRKIYTEAVDVLYSTNTFRFADPNERGPGIRKPHKQPKLIEDFSSTVLPQRLERIARVSTGIDITRFGALDDVLARNLPNLRYLELRAKVVLDPEWLDLDPNPAPQPINGTALKEMVARVRGRVEGAKVVLRADLDERVPPSMPVGTELTEGLEIVVTPEKAWERCGMIFERF

SEQ ID NO: 26875 - DNA, 1560 bp, Muscodor strobelii
  misc_feature: SGI EST ID NO. CUFF.63325.0
  misc_feature: Variant of the nucleotide sequence at SEQ ID NO 26873
acgattacattctatcgtatcgtttccatctcgtccgcacgccttttgcttcaatcatcccgtgcaccactgtctgaccagcgtttgatcccacaaggataatagaagatgccaagcatgtggggcggggccaggagaaggagatgcggcaactatagcatggcggaacgaatgcgccggaggcgggaggcttgcgaccggagagtggaggataacgtaccacgtcccttgtatcggcattgggtcgacgacgcagccacaaaaaccccggcccctccgaaaagacgtttctggcaacggaaacagaggcagccgataccaccaacggatcctccaaagcaagagcttcgcattgacgacgaggcgttgagaaggagacggcggctttcgctcggccctggcgatgatatggtccctctcggatccgagagcctgacaggccgtgcaaatcagagacctgcgccgagcggcgacggcaacaaagcttcaagggccgaatgctacttactaacgctcccagtggagattaggataatgatctgggaatacgcagttggtaatcggacgctgcacatcttctacggcaagcctgctgcgtcggcgtgggtacgccattccctcgtttcaaagccatcaactcaaaacatggggtgcgctgaatgcgtttaccgaccgactccgaacggctgggagaactcgttccccggtcaggaaacctgcccagactgcggcatcatttgggactcgtttgccgagtgtagtgggagggtgacgtggaccaacttaccagcgccggactgggacgtggtccctcaatggagcgcgagaggaaaatgtcatatgggggatgtagacactagcgagtggcaacctttggcgctgctccgcacatgtagaaaaatctatactgaagctgtcgacgttttgtacagcacaaatacatttcgtttcgccgacccgaatgagcgtggcccaggcattaggaaaccgcataaacagcccaaactaatagaggatttctcgtcgacagtcctgccccaacgcttagagcggatcgctcgcgtctctacgggcatcgatattacccgtttcggcgccctcgacgatgtgctggcgaggaacctaccgaacctcagatatctcgagctccgggcaaaagtagtattggatccggaatggctcgatttagatccaaacccagctccacagccaatcaacgggacggctctcaaggagatggtggcaagagtgagaggtagggtagaaggggccaaagtcgtgctcagggctgatctagatgagagagtccctcctagcatgcctgtcggcaccgagctcactgagggtctagaaatcgtcgtcacgcctgagaaagcgtgggaaagatgtgggatgatttttgaaagattttaatatcccatgatgctgctccactcgatgctccgtgtgatatgcgatagtggcataatgaaagtttggtacgcatctagaggcattttcgaaaggtccgtttttctgtattatatcttatgtattcaatcttaataaatattccctcgc

SEQ ID NO: 26876 - DNA, 903 bp, Muscodor strobelii
  misc_feature: SGI cDNA ID NO. 569197
  misc_feature: Encodes the peptide sequence at SEQ ID NO 26877
atggcgaccaaccataaggtcagtggaccctatgtcccagcaacgtactggctcgcctcctctcggaacttcagaacttcagcacgtctccatcttcaacatttgcttttccagaatactctaggttatctcctgcaaagtcaggtcgaacagacgattcaaacaagagcccaagacgtcttcaaagtcgccgaccttgcatgtggcaatggtgcctggctgattgacttggatcaagagcttgtcagaaaggacgtcgttgcaaggcttgatggcttcgacatcaatgacatcctcttccccgctgccccttttcttccaccgtcagttttcctgaataagctcgatatcctcgccaggcctattccagagagattaatcggtgaatacgacgtggtccatgttcgggctttcacgagcatcattgttaatggagataccacacctctcctatctactgttcttgcaatgcttaagccaggcggttggctacagtgggaagagatgagccccaatccgctcgtggagcttgctgcaccgggccttgaggcttctgcgtgcgagaccctgaaacagtgtctacaagcaagagcagagccatcgggcctccggtatgatttccttgctgagctagacaagcatatggttgagcacggatttgaaaatgttcacatgtttacgatggcgaatcgtaaacaagactataaagcctggacagatgactatctgatgatctgggacgaaactacctcttatttcccatccaatgtcaccaagcctgaggcgccaatcacaagggaattctgggctgaaactctggctaaggctataagtgagaccgagaaaggagtcgtgttgtacgcaggtgtgattcccacagttgtgggacagaaaccggtctaa

SEQ ID NO: 26877 - protein, 300 aa, Muscodor strobelii
  misc_feature: SGI Peptide ID NO. 569197
  misc_feature (64)..(164): Pfam Id: PF08242 Pfam Desc: Methyltransferase domain
  misc_feature (11)..(300): NCBI GI: 145252776 Blast Desc: An16g05930 [Aspergillus niger] gi|134083455|emb|CAK46933.1| protein product [Aspergillus niger]
  misc_feature (1)..(299): NCBI GI: 242827242 Blast Desc: conserved [Talaromyces stipitatus ATCC 10500] gi|218712048|gb|EED11476.1| conserved [Talaromyces stipitatus ATCC 10500]
  misc_feature (14)..(300): NCBI GI: 67527035 Blast Desc: AN3975.2 [Aspergillus nidulans FGSC A4] gi|40740256|gb|EAA59446.1| AN3975.2 [Aspergillus nidulans FGSC A4] gi|259481445|tpe|CBF74969.1| TPA: conserved [Aspergillus FGSC
  misc_feature (1)..(299): NCBI GI: 242811553 Blast Desc: conserved [Talaromyces stipitatus ATCC 10500] gi|218714112|gb|EED13535.1| conserved [Talaromyces stipitatus ATCC 10500]
  misc_feature (22)..(276): NCBI GI: 70998775 Blast Desc: conserved [Aspergillus fumigatus Af293] gi|66851746|gb|EAL92071.1| conserved [Aspergillus fumigatus Af293] gi|159127128|gb|EDP52243.1| conserved [Aspergillus A1163]
  misc_feature (3)..(298): NCBI GI: 121712234 Blast Desc: conserved [Aspergillus clavatus NRRL 1] gi|119401884|gb|EAW12306.1| conserved [Aspergillus clavatus NRRL 1]
  misc_feature (21)..(299): NCBI GI: 119489916 Blast Desc: NFIA_061810 [Neosartorya fischeri NRRL 181] gi|119411077|gb|EAW21020.1| conserved [Neosartorya fischeri NRRL 181]
  misc_feature (21)..(299): NCBI GI: 70998749 Blast Desc: methyltransferase [Aspergillus fumigatus Af293] gi|66851733|gb|EAL92058.1| methyltransferase, [Aspergillus fumigatus Af293]
  misc_feature (22)..(299): NCBI GI: 119489946 Blast Desc: NFIA_061940 [Neosartorya fischeri NRRL 181] gi|119411090|gb|EAW21033.1| conserved [Neosartorya fischeri NRRL 181]
  misc_feature (19)..(248): NCBI GI: 145240315 Blast Desc: An08g06890 [Aspergillus niger] gi|134077320|emb|CAK45659.1| protein product [Aspergillus niger]
MATNHKVSGPYVPATYWLASSRNFRTSARLHLQHLLFQNTLGYLLQSQVEQTIQTRAQDVFKVADLACGNGAWLIDLDQELVRKDVVARLDGFDINDILFPAAPFLPPSVFLNKLDILARPIPERLIGEYDVVHVRAFTSIIVNGDTTPLLSTVLAMLKPGGWLQWEEMSPNPLVELAAPGLEASACETLKQCLQARAEPSGLRYDFLAELDKHMVEHGFENVHMFTMANRKQDYKAWTDDYLMIWDETTSYFPSNVTKPEAPITREFWAETLAKAISETEKGVVLYAGVIPTVVGQKPV

SEQ ID NO: 26878 - DNA, 217 bp, Muscodor strobelii
  misc_feature: SGI EST ID NO. CUFF.63327.0
  misc_feature: Variant of the nucleotide sequence at SEQ ID NO 26876
agataccacacctctcctatctactgttcttgcaatgcttaagccaggcggttggctacagtgggaagagatgagccccaatccgctcgtggagcttgctgcaccgggccttgaggcttctgcgtgcgagaccctgaaacagtgtctacaagcaagagcagagccatcgggcctccggtatgatttccttgctgagctagacaagcatatggttgag

SEQ ID NO: 26879 - DNA, 1350 bp, Muscodor strobelii
  misc_feature: SGI cDNA ID NO. 569198
  misc_feature: Reduced expression when VOC is produced
  misc_feature: Encodes the peptide sequence at SEQ ID NO 26880
atggttttcacaaagaagattgatcgcgcctttcaatgggctggcgagaagatggggaatgaagccaaaaccacacattctgatgatttcaagttgttggaaacagagatggctctgcgacatgacggcatggaccgccttcacaagtcaatgaacacctatgtcaaatcactttctcgacgggccgaggcgtacgaggataaggaaaaaggcttaccagtgagctatctcggtcgtacgatgataacacatggcgaggacttcgatcaagactctgaatttggcaattgcttgattgctatgggtcgagcaaatgagcgcatatcaggtatgcaggagagctacgtggctcatgccacatcgtactggctcgagggcttagaacggtctcttgctatgatgaaagaatatcaggccgcccgcaagaagctcgagaaccgccgtctcacatacgacgcaagtactgcaaaggtccagaaagcgaaacgcgaagacttcagacttgaagacgagctccgagcctcgaaagcgaaatacgaagagtcggaggaagacgtgtatcgacgcatgatggacatcaaggaggctgaagccgactccgttcgagatctcaccaacttcctcgatagcgagctcgactactacgaacgctgcgctgatgaactccgaagagtcaaacagcagtgggcagccgaccaaactcagatgaaccccaggggccagatctcagattacggtgtcgtgagacgcccaacaaaccgagccagaagcaacacgctacgctcccaaggcgaacgcgaggaccgcaacgatcgatgggcgcgacagaatgcctatgagcgcgaaccgagcccagaagcaccacgcctaccaattcgatcaagccgctccccggctggttcagtatcgcccgatgttccgcgcccgaacatgaaccgcgcctctacgtacggtggcggtatcaacgtgtcttcgaggcagccgtcgtatcgcgagcccccacctccaccaccagagaatacgctgcgcaagataagcaccggtccatcctacaatgtcggttccttgcgcaacaatctgcgccccattagcagaatccagacgaactctagcctgagccccgatgtcttccacgatgattatgatacagcgacgagcagcgggagcccagactacgatcgaagtgagagcccagctacgagctatggtagtttaagccggacgactagtagcacggcactccgcggtagtacaaacgtagcgaccaaaaaggcaccgccaccacctccacccagccgatctaagaagccaccgccgccggttcccgccaagcgcgaccttacatactaa

SEQ ID NO: 26880 - protein, 449 aa, Muscodor strobelii
  misc_feature: SGI Peptide ID NO. 569198
  misc_feature (3)..(231): Pfam Id: PF03114 Pfam Desc: BAR domain
  misc_feature (1)..(447): NCBI GI: 18376207 Blast Desc: conserved [Neurospora crassa]
  misc_feature (1)..(449): NCBI GI: 171693445 Blast Desc: protein product [Podospora anserina] gi|170946671|emb|CAP73474.1| protein product [Podospora anserina]
  misc_feature (1)..(449): NCBI GI: 116198639 Blast Desc: CHGG_07475 [Chaetomium globosum CBS 148.51] gi|88178754|gb|EAQ86222.1| CHGG_07475 [Chaetomium globosum CBS 148.51]
  misc_feature (1)..(412): NCBI GI: 39941246 Blast Desc: MGG_05534 [Magnaporthe grisea 70-15] gi|145022208|gb|EDK06228.1| MGG_05534 [Magnaporthe grisea 70-15]
  misc_feature (1)..(415): NCBI GI: 261360486 Blast Desc: BAR domain-containing protein [Verticillium albo-atrum VaMs.102]
  misc_feature (18)..(447): NCBI GI: 164426201 Blast Desc: NCU01068 [Neurospora crassa OR74A] gi|157071238|gb|EAA32444.2| conserved [Neurospora crassa OR74A]
  misc_feature (1)..(414): NCBI GI: 46110491 Blast Desc: FG02127.1 [Gibberella zeae PH-1]
  misc_feature (1)..(414): NCBI GI: 226498628 Blast Desc: LOC100273337 [Zea mays] gi|194701646|gb|ACF84907.1| [Zea mays] gi|194703530|gb|ACF85849.1| [Zea mays]
  misc_feature (1)..(414): NCBI GI: 256728618 Blast Desc: NECHADRAFT_64332 [Nectria haematococca mpVI 77-13-4]
  misc_feature (1)..(404): NCBI GI: 156051252 Blast Desc: SS1G_07033 [Sclerotinia sclerotiorum 1980] gi|154704811|gb|EDO04550.1| SS1G_07033 [Sclerotinia sclerotiorum 1980]
  misc_feature: Useful for introducing or modulating the production of volatile compounds
MVFTKKIDRAFQWAGEKMGNEAKTTHSDDFKLLETEMALRHDGMDRLHKSMNTYVKSLSRRAEAYEDKEKGLPVSYLGRTMITHGEDFDQDSEFGNCLIAMGRANERISGMQESYVAHATSYWLEGLERSLAMMKEYQAARKKLENRRLTYDASTAKVQKAKREDFRLEDELRASKAKYEESEEDVYRRMMDIKEAEADSVRDLTNFLDSELDYYERCADELRRVKQQWAADQTQMNPRGQISDYGVVRRPTNRARSNTLRSQGEREDRNDRWARQNAYEREPSPEAPRLPIRSSRSPAGSVSPDVPRPNMNRASTYGGGINVSSRQPSYREPPPPPPENTLRKISTGPSYNVGSLRNNLRPISRIQTNSSLSPDVFHDDYDTATSSGSPDYDRSESPATSYGSLSRTTSSTALRGSTNVATKKAPPPPPPSRSKKPPPPVPAKRDLTY

SEQ ID NO: 26881 - DNA, 2990 bp, Muscodor strobelii
  misc_feature: SGI EST ID NO. CUFF.63673.0
  misc_feature: Variant of the nucleotide sequence at SEQ ID NO 26879
cccatctcttttgcatctcgtctcgttgcaattgtactgcttccttttcaatcttctgtctatacctataattggtgctttgaccgactgcttagaaacagtcttctgaacactctcactacagctacctaattgcaattctctctgcttctgtttttcaccttttgttaccacctctctgagaccctttgagtctggagtcttgctacgagcctataatcatctattgcatgatcaacattcaccccagagcttgatcgtcccgtcttctcgctactcctggattccaatccgattctgatccgcgtgccggccgtgtgtgatttatatacctcctccacgccttctagttcgtctttggacaagatattcctacttgttgtcgagtacagaatttctctcattgttccattctgtcttgcctgtataacagcatcagatccggatcaatattccgctttcttgctcctcccggacccagagaaaactaccaagcatcttgacaacccgctggtcctttttgatcaacgttgccgcatcccccctcacacgataaacgctgcaagctccgtatcgctagagacaagcggccgatcgagaacgtcgaagcactccagaatccccaccaccaaccgccacgactagcatcagaatcctgattagctgcatctgcaatctgcaagctgcagaccaattgatgaatctagcggactagacgcctaatctgcgattgaaaacaagggtcagggtcccaggaacaaggtcccctccgtgcgccaagacacccccaagacacgccaccccaacaacggctaaaccctggagtctacctcctataatcgcaacttttaataaacactctccctcttgctcttcccgctgccgtggacatactggtttttgtccaatttctactaattttcgccaattgacactcgatatcaaacaaatccactatcgccggtcattatggttttcacaaagaagattgatcgcgcctttcaatgggctggcgagaagatggggaatgaagccaaaaccacacattctgatgatttcaagttgttggaaacagagatggctctgcgacatgacggcatggaccgccttcacaagtcaatgaacacctatgtcaaatcactttctcgacgggccgaggcgtacgaggataaggaaaaaggcttaccagtgagctatctcggtcgtacgatgataacacatggcgaggacttcgatcaagactctgaatttggcaattgcttgattgctatgggtcgagcaaatgagcgcatatcaggtatgcaggagagctacgtggctcatgccacatcgtactggctcgagggcttagaacggtctcttgctatgatgaaagaatatcaggccgcccgcaagaagctcgagaaccgccgtctcacatacgacgcaagtactgcaaaggtccagaaagcgaaacgcgaagacttcagacttgaagacgagctccgagcctcgaaagcgaaatacgaagagtcggaggaagacgtgtatcgacgcatgatggacatcaaggaggctgaagccgactccgttcgagatctcaccaacttcctcgatagcgagctcgactactacgaacgctgcgctgatgaactccgaagagtcaaacagcagtgggcagccgaccaaactcagatgaaccccaggggccagatctcagattacggtgtcgtgagacgcccaacaaaccgagccagaagcaacacgctacgctcccaaggcgaacgcgaggaccgcaacgatcgatgggcgcgacagaatgcctatgagcgcgaaccgagcccagaagcaccacgcctaccaattcgatcaagccgctccccggctggttcagtatcgcccgatgttccgcgcccgaacatgaaccgcgcctctacgtacggtggcggtatcaacgtgtcttcgaggcagccgtcgtatcgcgagcccccacctccaccaccagagaatacgctgcgcaagataagcaccggtccatcctacaatgtcggttccttgcgcaacaatctgcgccccattagcagaatccagacgaactctagcctgagccccgatgtcttccacgatgattatgatacagcgacgagcagcgggagcccagactacgatcgaagtgagagcccagctacgagctatggtagtttaagccggacgactagtagcacggcactccgcggtagtacaaacgtagcgaccaaaaaggcaccgccaccacctccacccagccgatctaagaagccaccgccgccggttcccgccaagcgcgaccttacatactaagaccctgctttattagagatggcatattactgttagcctcttgttagattagatgactttgtcccgcactgagtctggggacgtcttcattctttgcgatcgcttctgggcgatattctgtcaagtcagagcgcctctaattgttcttattactgcgtaatgcacttgtagttggtatggggatgtgggcatctggtagcccttcatccggcgtttcggtgtttagaaataagacaagggccctaaagcttgttttgccgctacacagcgacgggcgacaactgagctggctctacacatagttcaatacacatttcttagcgttctacattcttcttgcctatgtctttgagcactttctcgttgcatgacgtgaacatgtcgaattgagggttgtggagctgctgtgttcaatgcattaacttggtactcttgagtcttgtttcaccatggtttctttacactgggcaagaaacatggacacaattgtaacgtgacatgcatttcgcgtataattgtgcatgagttcccaggattggtgttcactgcattaattcattcgttgtggccatttctaagcagcagtaagctctacattcctccatatactggactgttaaatgcctcccgaaccctcatcatgccataagagcaatatgctttaactcgct

SEQ ID NO: 26882 - DNA, 1146 bp, Muscodor strobelii
  misc_feature: SGI cDNA ID NO. 569199
  misc_feature: Encodes the peptide sequence at SEQ ID NO 26883
atggcaaacctcacatcggatcccgcaatggatctcccaataatcgatctcgacatcttcctctcctcacccaactccgaagccgcgatatcagaatcagaaaaggccgcccgggcactcataacatacggcgcactcatcctacacgatagccgggtcgccgaatcagacaacattgcattcctcgacttgctcgaggactacttcgcacagcccgacgccgtcctaaagaaagacgagcgaccagaactcggatatcaagtcggcgtgacactcgagaacaccgagaagcccaaatgcgctgtcgacgagccgtgtctagacgttatacagcgcctcgcgcctgaggagagaccgttggacatctcggctcattcgccagatccgaaatgtagattcttttggcgaatgggcgagccggcgccgtatcagactgcgttccctggattaaacgcggacaatatcgtgcctgaggcgccggagatcagagatcgctggacgccgatcatgatgaagtggggtaatagtatgaagagcgctgtctccggactcgcagagatggcagccgtgggtatgggtttaccggcagagacgtttagcgatgcaggtcgatacggcccccatctcctagccccaacagcctccgaccttcaaaaacacggcacaaacaacacaatactagcaggtttccacacagacctaaacttcctaacaatccacggccgctcccggtatccaggcctacacatatgggcacgcaacaccgggcgtaaaatccccgtgaaaatacccccaggaaactacctactcgtccaagccggcaaacagctcgagcacataaccggtggccttgtaaaagccggcttccacgaagtggtcgtgaattcctcaacccaagccgtgatctctcagcgaaaagaacagtttcccgatcgccccttggtgcgaatcagcagcactttcttctggcatctggcgagtgattttgatctgaaacctatcccgcaattagaggagaaggcgaaagctgtgcgcgctgagcagtttaatctaggacgggatgaggggaaggaggttgtttacgaggctatgaaggttggggagcaggtgcagagcgagttaaagcatattgctcttatggcatga

SEQ ID NO: 26883 - protein, 381 aa, Muscodor strobelii
  misc_feature: SGI Peptide ID NO. 569199
  misc_feature (9)..(381): NCBI GI: 171685196 Blast Desc: protein product [Podospora anserina] gi|170942559|emb|CAP68210.1| protein product [Podospora anserina]
  misc_feature (10)..(381): NCBI GI: 164423935 Blast Desc: NCU07539 [Neurospora crassa OR74A] gi|157070295|gb|EAA29816.2| conserved [Neurospora crassa OR74A]
  misc_feature (10)..(381): NCBI GI: 145608170 Blast Desc: MGG_03324 [Magnaporthe grisea 70-15] gi|145015667|gb|EDK00157.1| MGG_03324 [Magnaporthe grisea 70-15]
  misc_feature (1)..(381): NCBI GI: 46140207 Blast Desc: FG11618.1 [Gibberella zeae PH-1]
  misc_feature (9)..(381): NCBI GI: 256721919 Blast Desc: [Nectria haematococca mpVI 77-13-4]
  misc_feature (4)..(381): NCBI GI: 116208700 Blast Desc: CHGG_03643 [Chaetomium globosum CBS 148.51] gi|88184240|gb|EAQ91708.1| CHGG_03643 [Chaetomium globosum CBS 148.51]
  misc_feature (4)..(381): NCBI GI: 70906382 Blast Desc: conserved [Coprinellus disseminatus]
  misc_feature (11)..(381): NCBI GI: 169844895 Blast Desc: CC1G_01848 [Coprinopsis cinerea okayama7#130] gi|116509908|gb|EAU92803.1| CC1G_01848 [Coprinopsis cinerea okayama7#130]
  misc_feature (12)..(381): NCBI GI: 170084339 Blast Desc: [Laccaria bicolor S238N-H82] gi|164650945|gb|EDR15185.1| [Laccaria bicolor S238N-H82]
  misc_feature (11)..(380): NCBI GI: 58261514 Blast Desc: [Cryptococcus neoformans var. neoformans JEC21] gi|57230249|gb|AAW46650.1| conserved [Cryptococcus neoformans var. neoformans JEC21]
MANLTSDPAMDLPIIDLDIFLSSPNSEAAISESEKAARALITYGALILHDSRVAESDNIAFLDLLEDYFAQPDAVLKKDERPELGYQVGVTLENTEKPKCAVDEPCLDVIQRLAPEERPLDISAHSPDPKCRFFWRMGEPAPYQTAFPGLNADNIVPEAPEIRDRWTPIMMKWGNSMKSAVSGLAEMAAVGMGLPAETFSDAGRYGPHLLAPTASDLQKHGTNNTILAGFHTDLNFLTIHGRSRYPGLHIWARNTGRKIPVKIPPGNYLLVQAGKQLEHITGGLVKAGFHEVVVNSSTQAVISQRKEQFPDRPLVRISSTFFWHLASDFDLKPIPQLEEKAKAVRAEQFNLGRDEGKEVVYEAMKVGEQVQSELKHIALMA

SEQ ID NO: 26884 - DNA, 4524 bp, Muscodor strobelii
  misc_feature: SGI EST ID NO. CUFF.63674.3
  misc_feature: Variant of the nucleotide sequence at SEQ ID NO 26882
cgtcggccgaagatcatgcgatagcatttgtcttaacttcaaacctcctgatcattgaataataacacttcgaagcttttaaaagaaaagaaaagaactaggcaaacggccttgcgtgcgatacttcctactcgattatataacataaatcgctattagcggtagattgtgacagcggagatataccaacccgagccaagtcgcatcatcaatcccgccaacgatggcaaacctcacatcggatcccgcaatggatctcccaataatcgatctcgacatcttcctctcctcacccaactccgaagccgcgatatcagaatcagaaaaggccgcccgggcactcataacatacggcgcactcatcctacacgatagccgggtcgccgaatcagacaacattgcattcctcgacttgctcgaggactacttcgcacagcccgacgccgtcctaaagaaagacgagcgaccagaactcggatatcaagtcggcgtgacactcgagaacaccgagaagcccaaatgcgctgtcgacgagccgtgtctagacgttatacagcgcctcgcgcctgaggagagaccgttggacatctcggctcattcgccagatccgaaatgtagattcttttggcgaatgggcgagccggcgccgtatcagactgcgttccctggattaaacgcggacaatatcgtgcctgaggcgccggagatcagagatcgctggacgccgatcatgatgaagtggggtaatagtatgaagagcgctgtctccggactcgcagagatggcagccgtgggtatgggtttaccggcagagacgtttagcgatgcaggtcgatacggcccccatctcctagccccaacagcctccgaccttcaaaaacacggcacaaacaacacaatactagcaggtttccacacagacctaaacttcctaacaatccacggccgctcccggtatccaggcctacacatatgggcacgcaacaccgggcgtaaaatccccgtgaaaatacccccaggaaactacctactcgtccaagccggcaaacagctcgagcacataaccggtggccttgtaaaagccggcttccacgaagtggtcgtgaattcctcaacccaagccgtgatctctcagcgaaaagaacagtttcccgatcgccccttggtgcgaatcagcagcactttcttctggcatctggcgagtgattttgatctgaaacctatcccgcaattagaggagaaggcgaaagctgtgcgcgctgagcagtttaatctaggacgggatgaggggaaggaggttgtttacgaggctatgaaggttggggagcaggtgcagagcgagttaaagcatattgctcttatggcatgatgagggttcgggaggcatttaacagtccagtatatggaggaatgtagagcttactgctgcttagaaatggccacaacgaatgaattaatgcagtgaacaccaatcctgggaactcatgcacaattatacgcgaaatgcatgtcacgttacaattgtgtccatgtttcttgcccagtgtaaagaaaccatggtgaaacaagactcaagagtaccaagttaatgcattgaacacagcagctccacaaccctcaattcgacatgttcacgtcatgcaacgagaaagtgctcaaagacataggcaagaagaatgtagaacgctaagaaatgtgtattgaactatgtgtagagccagctcagttgtcgcccgtcgctgtgtagcggcaaaacaagctttagggcccttgtcttatttctaaacaccgaaacgccggatgaagggctaccagatgcccacatccccataccaactacaagtgcattacgcagtaataagaacaattagaggcgctctgacttgacagaatatcgcccagaagcgatcgcaaagaatgaagacgtccccagactcagtgcgggacaaagtcatctaatctaacaagaggctaacagtaatatgccatctctaataaagcagggtcttagtatgtaaggtcgcgcttggcgggaaccggcggcggtggcttcttagatcggctgggtggaggtggtggcggtgcctttttggtcgctacgtttgtactaccgcggagtgccgtgctactagtcgtccggcttaaactaccatagctcgtagctgggctctcacttcgatcgtagtctgggctcccgctgctcgtcgctgtatcataatcatcgtggaagacatcggggctcaggctagagttcgtctggattctgctaatggggcgcagattgttgcgcaaggaaccgacattgtaggatggaccggtgcttatcttgcgcagcgtattctctggtggtggaggtgggggctcgcgatacgacggctgcctcgaagacacgttgataccgccaccgtacgtagaggcgcggttcatgttcgggcgcggaacatcgggcgatactgaaccagccggggagcggcttgatcgaattggtaggcgtggtgcttctgggctcggttcgcgctcataggcattctgtcgcgcccatcgatcgttgcggtcctcgcgttcgccttgggagcgtagcgtgttgcttctggctcggtttgttgggcgtctcacgacaccgtaatctgagatctggcccctggggttcatctgagtttggtcggctgcccactgctgtttgactcttcggagttcatcagcgcagcgttcgtagtagtcgagctcgctatcgaggaagttggtgagatctcgaacggagtcggcttcagcctccttgatgtccatcatgcgtcgatacacgtcttcctccgactcttcgtatttcgctttcgaggctcggagctcgtcttcaagtctgaagtcttcgcgtttcgctttctggacctttgcagtacttgcgtcgtatgtgagacggcggttctcgagcttcttgcgggcggcctaatgtctcaggggtcagctgggactgtcgttttagtacactgcggcggctaattactaacctgatattctttcatcatagcaagagaccgttctaagccctcgagccagtacgatgtggcatgagccacgtagctctcctgcatacctgatatgcgctcatttgctcgacccatagctggacatgtctcagtcagtattgtttcgtagtcaacttttaggaaaacagtctagacataccaatcaagcaattgccaaattcagagtcttgatcgaagtcctcgccatgtgttatcatcgtacgaccgagatagctcactggtaagcctttttccttatcctcgtacgcctcggcccgtcgagaaagtgatttgacataggtgttcattgacttgtgaaggcggtccatgcctgttgatgataagacccggttagtattgcttttaagcatttcgcatatcgcaagatgctcctcgttcactgaccgtcatgtcgcagagccatctctgtttccaacaacttgaaatcatcagaatgtgtggttttggcttcattccccatcttctcgccagcccattgaaaggcgcgatcaatcttctttgtgaaaaccataatgaccggcgatagtggatttgtttgatatcgagtgtcaattggcgaaaattagtagaaattggacaaaaaccagtatgtccacggcagcgggaagagcaagagggagagtgtttattaaaagttgcgattataggaggtagactccagggtttagccgttgttggggtggcgtgtcttgggggtgtcttggcgcacggaggggaccttgttcctgggaccctgacccttgttttcaatcgcagattaggcgtctagtccgctagattcatcaattggtctgcagcttgcagattgcagatgcagctaatcaggattctgatgctagtcgtggcggttggtggtggggattctggagtgcttcgacgttctcgatcggccgcttgtctctagcgatacggagcttgcagcgtttatcgtgtgaggggggatgcggcaacgttgatcaaaaaggaccagcgggttgtcaagatgcttggtagttttctctgggtccgggaggagcaagaaagcggaatattgatccggatctgatgctgttatacaggcaagacagaatggaacaatgagagaaattctgtactcgacaacaagtaggaatatcttgtccaaagacgaactagaaggcgtggaggaggtatataaatcacacacggccggcacgcggatcagaatcggattggaatccaggagtagcgagaagacgggacgatcaagctctggggtgaatgttgatcatgcaatagatgattataggctcgtagcaagactccagactcaaagggtctcagagaggtggtaacaaaaggtgaaaaacagaagcagagagaattgcaattaggtagctgtagtgagagtgttcagaagactgtttctaagcagtcggtcaaagcaccaattataggtatagacagaagattgaaaaggaagcagtacaattgcaacgagacgagatgcaaaagagatggg

SEQ ID NO: 26885 - DNA, 549 bp, Muscodor strobelii
  misc_feature: SGI cDNA ID NO. 569200
  misc_feature: Encodes the peptide sequence at SEQ ID NO 26886
atggccctggacccagaagacactcacgttctcacgacacttctcgaggacgctcgcgcgctctgccgcaagggtcccatggtcgagcccagcccgagtcaggatccaggcaacaagagcggccttcgggtccggcccgtgagcgcagggctctcgatcgaacagctcatatttcatggcttgaacgcatccgtcgctgggcggattttgtggagaatccagagcaggaagaagcgcaaaaccagcgtactcaagcccagccgcagagcccgcatgtgttggctccccagactgagggatcagcatatgcacctcgacctcatgagcacaagcgcactcgtaggaatgctagttcccgaggacattcagtttcggattaccagtctgaagaggctccagccgagcgtcaccggggtcacagacggtcaccatcatataatggagctcaagccagacatcgcgaaacgtctaggtctcggagaccgcaatcggaggaccaaatcgaagtattgcgccgacagtcaagtgaccgtacacggccgccgttga

SEQ ID NO: 26886 - protein, 182 aa, Muscodor strobelii
  misc_feature: SGI Peptide ID NO. 569200
MALDPEDTHVLTTLLEDARALCRKGPMVEPSPSQDPGNKSGLRVRPVSAGLSIEQLIFHGLNASVAGRILWRIQSRKKRKTSVLKPSRRARMCWLPRLRDQHMHLDLMSTSALVGMLVPEDIQFRITSLKRLQPSVTGVTDGHHHIMELKPDIAKRLGLGDRNRRTKSKYCADSQVTVHGRR

SEQ ID NO: 26887 - DNA, 589 bp, Muscodor strobelii
  misc_feature: SGI EST ID NO. CUFF.63368.0
  misc_feature: Variant of the nucleotide sequence at SEQ ID NO 26885
cggcccgtgagcgcagggctctcgatcgaacagctcatatttcatggcttgaacgcatccgtcgctgggcggattttgtggagaatccagagcaggaagaagcgcaaaaccagcgtactcaagcccagccgcagagcccgcatgtgttggctccccagactgagggatcagcatatgcacctcgacctcatgagcacaagcgcactcgtaggaatgctagttcccgaggacattcagtttcggattaccagtctgaagaggctccagccgagcgtcaccggggtcacagacggtcaccatcatataatggagctcaagccagacatcgcgaaacgtctaggtctcggagaccgcaatcggaggaccaaatcgaagtattgcgccgacagtcaagtgaccgtacacggccgccgttgagtcatatgcccctagggcatcaacatgcggagcgtcatcgctctcggaggcgaagcacttcagcatcgggtcgtcaacagcgtgagaggccttatgagaatgttcagtatcaaggccgaccgcagtccagccatcaaaccgagctgccccatcgcacacatgcttcccaatc

SEQ ID NO: 26888 - DNA, 2478 bp, Muscodor strobelii
  misc_feature: SGI cDNA ID NO. 569201
  misc_feature: Encodes the peptide sequence at SEQ ID NO 26889
atggcggcgagtaatagcgttacgaccttgataacttccggaaattcgagatccgaggccattacgttcgcccaattattcaaactgacctgcttcttcacagtctatcaacggccagagacgccgccgagaccctcgttcaatgttcccttccgtcgcgataccgatttcgtcgagcgcaagtctatacttgaccagatacgcttattatcctcattgccagcgtctcgcactgcactcgtgggattagggggcaccggcaagtcgcagctggccattgaacacacctacaggttgaaggatacatttcaacaagatgggcaagagatatgggtattctggattcatgccgaaacgagagcgcggatcgaagaaggcttcagatcgatcgctgatgccgttaagatctccggtcgagaccaggccaatgcagatatacctcagctcgtctacctctggcttcagaatgagcagaacggccggtggcatatggtcttagacagcgcagatgatatcaacgtgtggttcaacactgacatcgctagacatacagttgctgaggcgaagaagaaaccactatcgagatatttgccgcagagctcgaatggatcaactctcattacgacgagaaacagagacgtcgcttgtcggcttactggaagttatcaaaccgttgtcgaggtgccaccaatggatcaagagcacgcactcactcttttggctaaaaaaataagcgaatgtgctgatgccaatgctgcggtggagctcgtaggggcacttgagtacatgcctctcgctatcgtccaagcagcagcttatatagaaaggcaagccccccgcacgtctatcgcgaagtatctagaggatttcgagaaaagcgaacggcaaaaactgagcctactagactacgatggtggtgatctcagacgcgatgaaagcgcaaagaattcagtcatagtaacatggcagatctcattcgagcatatccgctcgtgtcgaccatctgcggcagatttactgtccttgatgagttttttcgaccgccagggcattctcgaatcattagttcgacctcccgcccagaacaagaacattaaatcagactcgcgaaatgaaagtgcgaaaaagggcaagaggcgcaacatgcgtcaatggctgacgcaccatgctcgtcatgtccgtcgtgtctgccgagctgagggaatggggtcaggctcgcgcgacaaacaagaggtcagacacgacagttgtaatgatatgattgaaggagaccgtgtatttgaagaagatatcgcaacgcttcgagactattgcctaatcaaaacagatgaagagggagacattttcgagatgcatgggcttgtgcagctagcgaccaggaagtggctgcaagcttatggaaacagcattgagttcatgggcgagttcatttcacgtatggccgaggctttccccacgggcagatttgagaactggagcatttgccaaaagctctttccccatgccgaaaaagctttgacttacagtccagccgacaatcagacaaaattagattggtctagacttttgtacagaactagctggtatgccgaagaacaagggaaatatacgatatccgaaaccatggcaagaatatcacgagatatacgccaggagctgctaggacctgatcatactgatacgctgcacagcatgcatcatcttgcttcagtctatggcggacaaggggcatggaagaaagccgaggatctgtatgaacaagtgatagatacgcggaagattgtattaggatctagccatgaagacacgctcgtcagtatgcatgagctggcttcggtttactcgtgccaaggccaatggaaagaggccgaggagttgtataaacaagtgatggacacgagcaatacggtgttaggtcctgatcattatgacacgttgatgaccatgggtaaccttgcatcgacatatcgccaccaaggccgtttgaaagaagccgaagagctgcagctcaaagggttggataagagccaagcggtgcttgggcccagccatcctgatacactagtttgcatgagctctcttgcgttaacatacacgcgtcaaaatcgactcaaagacgccgaagacctggagaaacaagttattgaaaagaaaaatatagtactggggcctgaccatcccgaaacgctgactagcatgagcaatcttgctcagacatacgtgaagcaagaccgggtagaagactccgaaaacctgaatgtggaggtactaaacaagaggaagacaaccttggggcctaatcatcccaatacgttagtcagcatgcataatcttgcttgtacatggcgctctcaaggacgtctaactgaagctttatcacttatggaggactgcgtgcgagtttctattgttgttcttgggccagatcatccggatacggtcagcagccaatgttttttagacgagtggcgccagtag

SEQ ID NO: 26889 - protein, 825 aa, Muscodor strobelii
  misc_feature: SGI Peptide ID NO. 569201
  misc_feature (30)..(795): NCBI GI: 116191323 Blast Desc: CHGG_05379 [Chaetomium globosum CBS 148.51] gi|88181292|gb|EAQ88760.1| CHGG_05379 [Chaetomium globosum CBS 148.51]
  misc_feature (45)..(823): NCBI GI: 116205301 Blast Desc: CHGG_10534 [Chaetomium globosum CBS 148.51] gi|88176662|gb|EAQ84130.1| CHGG_10534 [Chaetomium globosum CBS 148.51]
  misc_feature (36)..(823): NCBI GI: 255942225 Blast Desc: Pc18g00340 [Penicillium chrysogenum Wisconsin 54-1255] gi|211586614|emb|CAP94258.1| Pc18g00340 [Penicillium chrysogenum Wisconsin 54-1255]
  misc_feature (34)..(816): NCBI GI: 242761252 Blast Desc: TPR domain protein [Talaromyces stipitatus ATCC 10500] gi|218723340|gb|EED22757.1| TPR domain protein [Talaromyces stipitatus ATCC 10500]
  misc_feature (45)..(823): NCBI GI: 116182196 Blast Desc: CHGG_01726 [Chaetomium globosum CBS 148.51] gi|88186023|gb|EAQ93491.1| CHGG_01726 [Chaetomium globosum CBS 148.51]
  misc_feature (138)..(816): NCBI GI: 46130714 Blast Desc: FG08960.1 [Gibberella zeae PH-1]
  misc_feature (35)..(685): NCBI GI: 116204683 Blast Desc: CHGG_10225 [Chaetomium globosum CBS 148.51] gi|88176353|gb|EAQ83821.1| CHGG_10225 [Chaetomium globosum CBS 148.51]
  misc_feature (47)..(820): NCBI GI: 242795697 Blast Desc: kinesin, [Talaromyces stipitatus ATCC 10500] gi|218719233|gb|EED18653.1| kinesin, [Talaromyces stipitatus ATCC 10500]
  misc_feature (35)..(823): NCBI GI: 116207884 Blast Desc: CHGG_03235 [Chaetomium globosum CBS 148.51] gi|88183832|gb|EAQ91300.1| CHGG_03235 [Chaetomium globosum CBS 148.51]
  misc_feature (122)..(728): NCBI GI: 171679341 Blast Desc: protein product [Podospora anserina] gi|170939296|emb|CAP64524.1| protein product [Podospora anserina]
MAASNSVTTLITSGNSRSEAITFAQLFKLTCFFTVYQRPETPPRPSFNVPFRRDTDFVERKSILDQIRLLSSLPASRTALVGLGGTGKSQLAIEHTYRLKDTFQQDGQEIWVFWIHAETRARIEEGFRSIADAVKISGRDQANADIPQLVYLWLQNEQNGRWHMVLDSADDINVWFNTDIARHTVAEAKKKPLSRYLPQSSNGSTLITTRNRDVACRLTGSYQTVVEVPPMDQEHALTLLAKKISECADANAAVELVGALEYMPLAIVQAAAYIERQAPRTSIAKYLEDFEKSERQKLSLLDYDGGDLRRDESAKNSVIVTWQISFEHIRSCRPSAADLLSLMSFFDRQGILESLVRPPAQNKNIKSDSRNESAKKGKRRNMRQWLTHHARHVRRVCRAEGMGSGSRDKQEVRHDSCNDMIEGDRVFEEDIATLRDYCLIKTDEEGDIFEMHGLVQLATRKWLQAYGNSIEFMGEFISRMAEAFPTGRFENWSICQKLFPHAEKALTYSPADNQTKLDWSRLLYRTSWYAEEQGKYTISETMARISRDIRQELLGPDHTDTLHSMHHLASVYGGQGAWKKAEDLYEQVIDTRKIVLGSSHEDTLVSMHELASVYSCQGQWKEAEELYKQVMDTSNTVLGPDHYDTLMTMGNLASTYRHQGRLKEAEELQLKGLDKSQAVLGPSHPDTLVCMSSLALTYTRQNRLKDAEDLEKQVIEKKNIVLGPDHPETLTSMSNLAQTYVKQDRVEDSENLNVEVLNKRKTTLGPNHPNTLVSMHNLACTWRSQGRLTEALSLMEDCVRVSIVVLGPDHPDTVSSQCFLDEWRQ

SEQ ID NO: 26890 - DNA, 882 bp, Muscodor strobelii
  misc_feature: SGI cDNA ID NO. 569202
  misc_feature: Elevated expression when VOC is produced
  misc_feature: Encodes the peptide sequence at SEQ ID NO 26891
atggcagaaacgtttggtgtcgttgccggtgctttgagcatagcggcacttttcaacaattgtgttagttgttttgaatacatacaatttggccgccattttgcacaagactatgaacgatgtcagctcaagctcgacgtcgctcgagcccgccttagtagatggggtgaggcagttgatgttgcacaaaatccacaatttgcgatcgacggaccccgcgataagtctattgatcttgtcaaggacattctagaagagatcggacagctcttcgagacgctttccagatcctcgcagcgatacaagcgctacgccacccaggacgatgtcgagtgtctcgcggtccatagaatgccgccactcagtcaaagactacatgcacgcctcaatacaatcgtcaacaagaggcaaaagggaacaagcttggcgaaaaaggcggcatgggcactgtatgaaggcaagaattttgataagttagtgaatgagattacaggattcgtcgatgatctggaaaagatatgtccaaaggaggagattgttcgcaaggagctgatcgaggtggagattgaagaaattgaagacgagccaactcttcaagcactgcagatagctgctactgaaaccgacagagatctagctcaaactgttaagaagaagaagttagagttgcatagggtgaggaacttcgcgaaggaggttcaaagtgaagagaacacaagagtacggattgggaatgaatgggctgctgaagttttaaaccctggactaagtctacccttgcctgtttccatggagaatggagcagacttggccagggcgaaaggcaatgccagggttcatattggggagagctttggagggcgtgggatctttgacgactga

SEQ ID NO: 26891 - protein, 293 aa, Muscodor strobelii
  misc_feature: SGI Peptide ID NO. 569202
  misc_feature (1)..(286): NCBI GI: 256733801 Blast Desc: NECHADRAFT_99486 [Nectria haematococca mpVI 77-13-4]
  misc_feature (1)..(286): NCBI GI: 256724752 Blast Desc: NECHADRAFT_48298 [Nectria haematococca mpVI 77-13-4]
  misc_feature (1)..(293): NCBI GI: 2739337 Blast Desc: small s protein [Podospora anserina]
  misc_feature (1)..(293): NCBI GI: 234864 Blast Desc: s gene 30 kDa polypeptide [Podospora anserina=fungus, Peptide, 289 aa]
  misc_feature (1)..(293): NCBI GI: 228211 Blast Desc: s gene 30 kDa polypeptide [Podospora anserina=fungus, Peptide, 289 aa]
  misc_feature (1)..(293): NCBI GI: 171676736 Blast Desc: protein product [Podospora anserina] gi|2677672|gb|AAB88771.1| big S [Podospora anserina] gi|170936435|emb|CAP61092.1| protein product [Podospora anserina]
  misc_feature (1)..(293): NCBI GI: 228212 Blast Desc: protein product [Podospora anserina] gi|2677672|gb|AAB88771.1| big S [Podospora anserina] gi|170936435|emb|CAP61092.1| protein product [Podospora anserina]
  misc_feature (1)..(293): NCBI GI: 46138171 Blast Desc: FG10600.1 [Gibberella zeae PH-1]
  misc_feature (1)..(291): NCBI GI: 256728996 Blast Desc: NECHADRAFT_79833 [Nectria haematococca mpVI 77-13-4]
  misc_feature (1)..(292): NCBI GI: 46127535 Blast Desc: FG08145.1 [Gibberella zeae PH-1]
  misc_feature: Useful for introducing or modulating the production of volatile compounds
MAETFGVVAGALSIAALFNNCVSCFEYIQFGRHFAQDYERCQLKLDVARARLSRWGEAVDVAQNPQFAIDGPRDKSIDLVKDILEEIGQLFETLSRSSQRYKRYATQDDVECLAVHRMPPLSQRLHARLNTIVNKRQKGTSLAKKAAWALYEGKNFDKLVNEITGFVDDLEKICPKEEIVRKELIEVEIEEIEDEPTLQALQIAATETDRDLAQTVKKKKLELHRVRNFAKEVQSEENTRVRIGNEWAAEVLNPGLSLPLPVSMENGADLARAKGNARVHIGESFGGRGIFDD

SEQ ID NO: 26892 - DNA, 1044 bp, Muscodor strobelii
  misc_feature: SGI EST ID NO. CUFF.63374.0
  misc_feature: Variant of the nucleotide sequence at SEQ ID NO 26890
cagaaacgtttggtgtcgttgccggtgctttgagcatagcggcacttttcaacaattgtgttagttgttttgaatacatacaatttggccgccattttgcacaagactatgaacgatgtcagctcaagctcgacgtcgctcgagcccgccttagtagatggggtgaggcagttgatgttgcacaaaatccacaatttgcgatcgacggaccccgcgataagtctattgatcttgtcaaggacattctagaagagatcggacagctcttcgagacgctttccagatcctcgcagcgatacaagcgctacgccacccaggacgatgtcgagtgtctcgcggtccatagaatgccgccactcagtcaaagactacatgcacgcctcaatacaatcgtcaacaagaggcaaaagggaacaagcttggcgaaaaaggcggcatgggcactgtatgaaggcaagaattttgataagttagtgaatgagattacaggattcgtcgatgatctggaaaagatatgtccaaaggaggagattgttcgcaaggagctgatcgaggtggagattgaagaaattgaagacgagccaactcttcaagcactgcagatagctgctactgaaaccgacagagatctagctcaaactgttaagaagaagaagttagagttgcatagggtgaggaacttcgcgaaggaggttcaaagtgaagagaacacaagagtacggattgggaatgaatgggctgctgaagttttaaaccctggactaagtctacccttgcctgtttccatggagaatggagcagacttggccagggcgaaaggcaatgccagggttcatattggggagagctttggagggcgtgggatctttgacgactgagtggaaatgacatcttttaataggtatcgaatttgactcatcacttctatctttataagtcttctttggtcggctggatattctataatctggatacctacaataggaagtgttgattccaggttaaaatgaagctacctagttcctactatagcccatatggtaa

SEQ ID NO: 26893 - DNA, 1245 bp, Muscodor strobelii
  misc_feature: SGI cDNA ID NO. 569203
  misc_feature: Encodes the peptide sequence at SEQ ID NO 26894
atgaacatcccgaaggagaatcgaaaattcgatatcgtcgttgtgggcgcaaatggatacactggtgcattagcagcagaacatattgcatgccatcttccaaccggtctacgatgggcaattgctggtagatcaaatgccaagctgatagctttagcttcaaggctcaaagaaatcaataaggatcgcctccagcccgaagtggaaattgtctcgtttgacgatcataaatcgctcagatgcctagtcagacaagcaaaagtctgtattagtgtcgtttcatactctcatgttgggcctcaagttatcgaagcatgcatcgacgaagggacagattatgtcgatacatcgggtggtccggcgatgcagcttgagtgggttaacaaatatcacgagaaagccgtagcagctggtgtcatagtgataatagcatgcggtgttctaactgcagcttatgatatcgtcacctgggccgcaacgcgacacttggcggataagtactctttggagactggcgaagtcatcgtcgtaggcttagaaacacctgtcgaaatcagcggaggaacagtggacagcatcgcgtctgaatattccaaacgtggggccgaggaaatgaagcaatcgtccgaggaaccgtggtacttatctccaaagaagggagtacaaacctcaacatcagcaaactacttcggcatgcgacgggattcgcactttggtctacttgcaatatccggctttatgaaccagaatcgtagcgttgttcatcgaacatggggtctgctgaacgggcgtgtgaatggtttcgggccaaatttccagtacaacgagttttctcctgcttcctctgcattcaatggttttcttcaatgggttgttgggcacgtctttggtgtaatgacaagtacctcactcggcatcaggctcatacggagattgactcccgcagcgggcgaaggtcctgatgtggagataagccggatgttgaacacgaagcttgaggcgcatgcaattgcagatgtgcaatccgaagcgggccagcgacgctcgcgcgcagcatttgcttatcctgctggtccgtatatccttactggagtcttccttgctgaaggagctgctacgctgttatacgacagaaagattgagggaggtcatacaggtggcctacttacgcctgctgtacttggtcagggattagtagatagactacagaaggtcggtgccactattgaggtcggcgatgtctag

SEQ ID NO: 26894 - protein, 414 aa, Muscodor strobelii
  misc_feature: SGI Peptide ID NO. 569203
  misc_feature (12)..(410): Pfam Id: PF03435 Pfam Desc: Saccharopine dehydrogenase
  misc_feature (12)..(147): Pfam Id: PF03435 Pfam Desc: Saccharopine dehydrogenase
  misc_feature (1)..(411): NCBI GI: 212544400 Blast Desc: conserved [Penicillium marneffei ATCC 18224] gi|210065323|gb|EEA19417.1| conserved [Penicillium marneffei ATCC 18224]
  misc_feature (7)..(410): NCBI GI: 239607416 Blast Desc: saccharopine dehydrogenase [Ajellomyces dermatitidis ER-3]
  misc_feature (7)..(410): NCBI GI: 261200469 Blast Desc: saccharopine dehydrogenase [Ajellomyces dermatitidis SLH14081] gi|239593707|gb|EEQ76288.1| saccharopine dehydrogenase [Ajellomyces dermatitidis SLH14081]
  misc_feature (1)..(409): NCBI GI: 242774748 Blast Desc: conserved [Talaromyces stipitatus ATCC 10500] gi|218722122|gb|EED21540.1| conserved [Talaromyces stipitatus ATCC 10500]
  misc_feature (7)..(410): NCBI GI: 226289224 Blast Desc: conserved [Paracoccidioides brasiliensis Pb18]
  misc_feature (7)..(404): NCBI GI: 156033141 Blast Desc: SS1G_13646 [Sclerotinia sclerotiorum 1980] gi|154699049|gb|EDN98787.1| SS1G_13646 [Sclerotinia sclerotiorum 1980]
  misc_feature (7)..(410): NCBI GI: 226279955 Blast Desc: conserved [Paracoccidioides brasiliensis Pb01]
  misc_feature (8)..(411): NCBI GI: 225555920 Blast Desc: conserved [Ajellomyces capsulatus G186AR]
  misc_feature (8)..(411): NCBI GI: 240278587 Blast Desc: saccharopine dehydrogenase [Ajellomyces capsulatus H143]
  misc_feature (7)..(410): NCBI GI: 225682050 Blast Desc: conserved [Paracoccidioides brasiliensis Pb03]
MNIPKENRKFDIVVVGANGYTGALAAEHIACHLPTGLRWAIAGRSNAKLIALASRLKEINKDRLQPEVEIVSFDDHKSLRCLVRQAKVCISVVSYSHVGPQVIEACIDEGTDYVDTSGGPAMQLEWVNKYHEKAVAAGVIVIIACGVLTAAYDIVTWAATRHLADKYSLETGEVIVVGLETPVEISGGTVDSIASEYSKRGAEEMKQSSEEPWYLSPKKGVQTSTSANYFGMRRDSHFGLLAISGFMNQNRSVVHRTWGLLNGRVNGFGPNFQYNEFSPASSAFNGFLQWVVGHVFGVMTSTSLGIRLIRRLTPAAGEGPDVEISRMLNTKLEAHAIADVQSEAGQRRSRAAFAYPAGPYILTGVFLAEGAATLLYDRKIEGGHTGGLLTPAVLGQGLVDRLQKVGATIEVGDV

SEQ ID NO: 26895 - DNA, 829 bp, Muscodor strobelii
  misc_feature: SGI EST ID NO. CUFF.63380.0
  misc_feature: Variant of the nucleotide sequence at SEQ ID NO 26893
gcgacacttggcggataagtactctttggagactggcgaagtcatcgtcgtaggcttagaaacacctgtcgaaatcagcggaggaacagtggacagcatcgcgtctgaatattccaaacgtggggccgaggaaatgaagcaatcgtccgaggaaccgtggtacttatctccaaagaagggagtacaaacctcaacatcagcaaactacttcggcatgcgacgggattcgcactttggtctacttgcaatatccggctttatgaaccagaatcgtagcgttgttcatcgaacatggggtctgctgaacgggcgtgtgaatggtttcgggccaaatttccagtacaacgagttttctcctgcttcctctgcattcaatggttttcttcaatgggttgttgggcacgtctttggtgtaatgacaagtacctcactcggcatcaggctcatacggagattgactcccgcagcgggcgaaggtcctgatgtggagataagccggatgttgaacacgaagcttgaggcgcatgcaattgcagatgtgcaatccgaagcgggccagcgacgctcgcgcgcagcatttgcttatcctgctggtccgtatatccttactggagtcttccttgctgaaggagctgctacgctgttatacgacagaaagattgagggaggtcatacaggtggcctacttacgcctgctgtacttggtcagggattagtagatagactacagaaggtcggtgccactattgaggtcggcgatgtctaggttatcgtcttcgaataatgttggctccgagcactccgcgagttatgctctaatggttttcac

SEQ ID NO: 26896 - DNA, 864 bp, Muscodor strobelii
  misc_feature: SGI cDNA ID NO. 569204
  misc_feature: Encodes the peptide sequence at SEQ ID NO 26897
atgagcatttcagttataaaagtttccgagcaagaagcatgggatgttcgtcgggcatttctcctcggtgacgccaaaggtaccgattatcgcgttctgcttataagtcgtgcctcatttcccgcacactaccaaaatgctactcctgatgaggtccggagaatgttccatgaatcactgagtattaaaatacacaaaccggcgccatgggagtatatccttggagatgttgactttactcaagacacagaaacggcatggattgtggcgcgaggcgtaacaggtcacacaatccaacagaatataaaccacagatttcatattgttgcaacaaaccaatcacacccaatcgtgattcatggtactttaagagagctggaccgatgcaatgttatcgccaggtacatattggacgaaggtcgacaggtgaagaacgaatacccatatgattacaatacttcgacaagcaagaagcctaagccgaatcctgtccattacaagatttcaaaggaacgaaggtcctcacaacctgcgggcccaactactgtagccacttctagccaggtccttgccgggccatctgcttccagcatgtcttacggaacagccaactattcaaacgtccagtactcggccattgctacctccaaccaagcgtatgccagtcaagcttacccagcaacctcgtacgataactatgcaaatatccaatatccggccgctgctccttcatatccggctgttacaagccaacccccctcaacgacctcttccggaacggttagctatgcggactatcagaacccttaccggtggagtttccgacggaaccagtgggtactgagagacgactggctatcataa

SEQ ID NO: 26897 - protein, 287 aa, Muscodor strobelii
  misc_feature: SGI Peptide ID NO. 569204
MSISVIKVSEQEAWDVRRAFLLGDAKGTDYRVLLISRASFPAHYQNATPDEVRRMFHESLSIKIHKPAPWEYILGDVDFTQDTETAWIVARGVTGHTIQQNINHRFHIVATNQSHPIVIHGTLRELDRCNVIARYILDEGRQVKNEYPYDYNTSTSKKPKPNPVHYKISKERRSSQPAGPTTVATSSQVLAGPSASSMSYGTANYSNVQYSAIATSNQAYASQAYPATSYDNYANIQYPAAAPSYPAVTSQPPSTTSSGTVSYADYQNPYRWSFRRNQWVLRDDWLS

SEQ ID NO: 26898 - DNA, 1110 bp, Muscodor strobelii
  misc_feature: SGI cDNA ID NO. 569205
  misc_feature: Encodes the peptide sequence at SEQ ID NO 26899
atggctaccgaggatgcccgctatcgccagtccagccagtacaggctgtggtcgtactcgcccgccaaactgcgatcgctccgacagcagaccaacgccacggccaaggccaacatctcgcgccgcctgctcgggccggacaagcggctcgaggcgatgagcgacgacgacaagacggcggcgctgcccgacttcctgacgcccgacgacgagctcgagctgctcaacatcttcaccgtcgagctgctgcgcgcggcggagcactgcaagctgccgtcggacgtgcgggcgacggcggccgtcttcctgcgccgcttctacctctccaacagcctcatgacgtacccgcccatggccctcatcaagacctgcatcttcttcgcctgcaaggccgacggccactacatccgcctgctgaagttcgccgacatgctgcccaacaccaacgccgacgaggtcctcgccgccgagtacatcctgtgccagggcatccgcttcgccttcgacgtccgccaccccttccgctccctcgagggcgccgtcatggagctgcgcgcagccgccgacttcgacgaccgccgcatcggcaacgcccacgccaaggctcgagacatcctcaagttcagcaccctcgtcaccgacgtctacttccactacgcccccagccagatcatgctcgccgccctcttcatggccgacgagggcttggcccacaggattctgcgcgatgcctttgccgcacagccagagagccacaagaaccaggtcttggacctggtccacggctgccgcgctgagctgcagaaggaacaccccgagaggaggactacgtattgggagcctagcgcagtcgcggccagactgaagcccctcaagaagaagctgaggaagtgccgagaccctgacagagctgatctcgtcgctctacaaaagtccaggcgcgagcaggccgtcaaggaggctaaggctaaagttgccgctaagaacggcgacagcgatgtctttggcccccgcaatggcatcgtcaaggaggatgagagggaaactaagagacgaagagtcaccggccttgcgggtgctaatgatccttttggtcctcccttgggatga

SEQ ID NO: 26899 - protein, 369 aa, Muscodor strobelii
  misc_feature: SGI Peptide ID NO. 569205
  misc_feature (1)..(368): NCBI GI: 46110489 Blast Desc: FG02126.1 [Gibberella zeae PH-1]
  misc_feature (1)..(368): NCBI GI: 256728619 Blast Desc: [Nectria haematococca mpVI 77-13-4]
  misc_feature (1)..(368): NCBI GI: 145615366 Blast Desc: MGG_05536 [Magnaporthe grisea 70-15] gi|145022209|gb|EDK06229.1| MGG_05536 [Magnaporthe grisea 70-15]
  misc_feature (1)..(368): NCBI GI: 261360485 Blast Desc: cyclin CCL1 [Verticillium albo-atrum VaMs.102]
  misc_feature (1)..(368): NCBI GI: 171693443 Blast Desc: protein product [Podospora anserina] gi|170946670|emb|CAP73473.1| protein product [Podospora anserina]
  misc_feature (1)..(368): NCBI GI: 85104146 Blast Desc: NCU01067 [Neurospora crassa OR74A] gi|18376208|emb|CAD21324.1| related to cyclin CCL1 [Neurospora crassa] gi|28923227|gb|EAA32443.1| conserved [Neurospora crassa
  misc_feature (1)..(368): NCBI GI: 116198641 Blast Desc: CHGG_07476 [Chaetomium globosum CBS 148.51] gi|88178755|gb|EAQ86223.1| CHGG_07476 [Chaetomium globosum CBS 148.51]
  misc_feature (1)..(368): NCBI GI: 154292551 Blast Desc: BC1G_14799 [Botryotinia fuckeliana B05.10] gi|150845880|gb|EDN21073.1| BC1G_14799 [Botryotinia fuckeliana B05.10]
  misc_feature (1)..(317): NCBI GI: 156051770 Blast Desc: SS1G_07292 [Sclerotinia sclerotiorum 1980] gi|154705070|gb|EDO04809.1| SS1G_07292 [Sclerotinia sclerotiorum 1980]
  misc_feature (4)..(368): NCBI GI: 255949260 Blast Desc: Pc22g14760 [Penicillium chrysogenum Wisconsin 54-1255] gi|211592414|emb|CAP98764.1| Pc22g14760 [Penicillium chrysogenum Wisconsin 54-1255]
MATEDARYRQSSQYRLWSYSPAKLRSLRQQTNATAKANISRRLLGPDKRLEAMSDDDKTAALPDFLTPDDELELLNIFTVELLRAAEHCKLPSDVRATAAVFLRRFYLSNSLMTYPPMALIKTCIFFACKADGHYIRLLKFADMLPNTNADEVLAAEYILCQGIRFAFDVRHPFRSLEGAVMELRAAADFDDRRIGNAHAKARDILKFSTLVTDVYFHYAPSQIMLAALFMADEGLAHRILRDAFAAQPESHKNQVLDLVHGCRAELQKEHPERRTTYWEPSAVAARLKPLKKKLRKCRDPDRADLVALQKSRREQAVKEAKAKVAAKNGDSDVFGPRNGIVKEDERETKRRRVTGLAGANDPFGPPLG

SEQ ID NO: 26900 - DNA, 2087 bp, Muscodor strobelii
  misc_feature: SGI EST ID NO. CUFF.63426.0
  misc_feature: Variant of the nucleotide sequence at SEQ ID NO 26898
ttcggcagcatgcactgtattaccgcactgtacattatcgattgagaagctccccaacatcccccggacctctaatgacatataggtacactgtagcactaccattcaccatttgcaccttgcgtttgcgtgccaaatattgttgcgcatggatgaccattacattcaccagctgtaatgcattggtagaggctgcaagaagcttgcatcgtcgcgccctcgggcatttctgcgaaccgcttggtcctcgtcttccgaccccacgtcgacgctcttctcttttcccttgatcggtcttcggtgacgtgactttgccgcccatcaccccgtccactaagattctgagatctcaccatggctaccgaggatgcccgctatcgccagtccagccagtacaggctgtggtcgtactcgcccgccaaactgcgatcgctccgacagcagaccaacgccacggccaaggccaacatctcgcgccgcctgctcgggccggacaagcggctcgaggcgatgagcgacgacgacaagacggcggcgctgcccgacttcctgacgcccgacgacgagctcgagctgctcaacatcttcaccgtcgagctgctgcgcgcggcggagcactgcaagctgccgtcggacgtgcgggcgacggcggccgtcttcctgcgccgcttctacctctccaacagcctcatgacgtacccgcccatggccctcatcaagacctgcatcttcttcgcctgcaaggccgacggccactacatccgcctgctgaagttcgccgacatgctgcccaacaccaacgccgacgaggtcctcgccgccgagtacatcctgtgccagggcatccgcttcgccttcgacgtccgccaccccttccgctccctcgagggcgccgtcatggagctgcgcgcagccgccgacttcgacgaccgccgcatcggcaacgcccacgccaaggctcgagacatcctcaagttcagcaccctcgtcaccgacgtctacttccactacgcccccagccagatcatgctcgccgccctcttcatggccgacgagggcttggcccacaggattctgcgcgatgcctttgccgcacagccagagagccacaagaaccaggtcttggacctggtccacggctgccgcgctgagctgcagaaggaacaccccgagaggaggactacgtattgggagcctagcgcagtcgcggccagactgaagcccctcaagaagaagctgaggaagtgccgagaccctgacagagctgatctcgtcgctctacaaaagtccaggcgcgagcaggccgtcaaggaggctaaggctaaagttgccgctaagaacggcgacagcgatgtctttggcccccgcaatggcatcgtcaaggaggatgagagggaaactaagagacgaagagtcaccggccttgcgggtgctaatgatccttttggtcctcccttgggatgaggcactccgtcacaagactccacatactcaccattgagaatcatgcacttacaagctaaaagcaagagcatccgctagtgtcgtgcatcacgaaggcggcatgatgaggaggacctctgagtgtcgaaacttattcctgagcttgatgagatcttgaggtactctggaccacagacgaatacctgaacaagagttgctcaatttgagaaaccaagacgaaccaaaaagtttcaaactggccacaacgaccgatttggcactccataggcacggttggctgccatcacgaactgatggatgtggaaaagacttgttgccactttatattctacactagcgtaccgagtatagcaaccatagactgcttcaagacgctcaacgctaggaaacgagtcacagactacagaccagcgcacctttcgccggcttccaacatacattccaatcttcaagcgatccttggaaatgcagacccgtttgttcaccatgaacccgcgggttaccctcacgttacgagccagggaggatggccacatgtagtgaacaatacccggctagctaacccatagagcggtagagagttagttatcaaaaaatgtagaaacagtgaaatgattgcaaac

SEQ ID NO: 26901 - DNA, 1629 bp, Muscodor strobelii
  misc_feature: SGI cDNA ID NO. 569206
  misc_feature: Encodes the peptide sequence at SEQ ID NO 26902
atgtcagacatcgaagcagctcaggactcaaaaccagaacccatccacgatgaggatctcaaaacagagcacgaaacgcgacataacgggacattagaacgcggtctgaagtcccgacatgtgcaattcatggccctatcgggcgcaataggaacaggactgttcatcggctccggccaagttatttctctcgccgggcctttatccgctttcctcgcatacctcatcacagcttttaacgtatactgcgtcgtccactccctcggcgaaatggcgacatatctaccgcttcccggcgctgtaccgatttatgcagcgaggtatgtagatgaagcgttgggattcgcagtgagctggaattactggtggcagatcgccatcggtgtgccgatcgaagtcacggccgcggtcgtggtggttgattactggccgaatgacgtcccgcccgcggcgctgatcacggcgtttttgggggcgatggtggttattaattgtttccccgtaaggatatatggtgaagcggaatttgtgtttggtgcgattaaacttacgactatcgttgggctgatcctgttgatgttcattattacgctcggtgggacaccgaatggggatcgaatcggatttaggtattggcgcgatcctggaccgatgaatggatatctggagcctggagcactagggaggtttctggcgttctggaaggtctttattcaggctacgttttcgtatggtgggagcgaaatggtcgtcatcgcctcgggcgagactgaaaatccccgtcgtaacatcccgaaagcgattcggagagtgttctggaggatagcgctattctacgtgttggctattttcctcgtaacgctgtgcgtctcatcgaaagatagtcgtctgctgaacgcaatctcaacctctgcgccaggcgcagcatcttccccgttcgtcatcgcgattgaaaatggcgggatcgcgactctaccgtcgatcatcaacgcagtcattctgacgagcgcttggtcagcggggaactcatttttctacgcctcaacacgagttttgtactccgcggcactagacggaaaagcaccgcggttttttctctgggaaaagtttggtgtgccttatgcctgtgtcgctgcgaccacgcttctcagtctcctcgcgtacctgaatgtgaataattcaggcgagaatgtattcttctggttctctaatctgtcctcagtctctacgctgattgtttggtcgagcgtttgtattacttatctgcgcttttaccaagggctgagagtcaatggtattagtcgggatagtctgccgtataaagcgccgcttcagccctttttggcgtatttcgcgctggggttttgtgtgttggtggcgttcttcaatgggtttgatgctttcttccctgggaagtttagcgcgaaaacttttgtaccgccgtatatagatataccgatttttgcggcgctgtttttgggctataaggttgtgaaggggacgaagatcgttaagcttagtgagatggacttgtggagtgggaaggaggagattgatgcattggaaggtacgtggcctgaggtcaagccgaggaatttcgctgagaggatttggttttggatcgcatga

SEQ ID NO: 26902 - protein, 542 aa, Muscodor strobelii
  misc_feature: SGI Peptide ID NO. 569206
  misc_feature (40)..(508): Pfam Id: PF00324 Pfam Desc: Amino acid permease
  misc_feature (16)..(542): NCBI GI: 256730460 Blast Desc: NECHADRAFT_89579 [Nectria haematococca mpVI 77-13-4]
  misc_feature (14)..(542): NCBI GI: 39946704 Blast Desc: MGG_08548 [Magnaporthe grisea 70-15] gi|145012397|gb|EDJ97053.1| MGG_08548 [Magnaporthe grisea 70-15]
  misc_feature (1)..(542): NCBI GI: 238846104 Blast Desc: proline-specific permease [Microsporum canis CBS 113480]
  misc_feature (2)..(542): NCBI GI: 242789367 Blast Desc: amino acid transporter, [Talaromyces stipitatus ATCC 10500] gi|218717933|gb|EED17353.1| amino acid transporter, [Talaromyces stipitatus ATCC 10500]
  misc_feature (2)..(542): NCBI GI: 212534118 Blast Desc: proline-specific permease, [Penicillium marneffei ATCC 18224] gi|210069614|gb|EEA23704.1| proline-specific permease, [Penicillium marneffei ATCC 18224]
  misc_feature (2)..(542): NCBI GI: 169782534 Blast Desc: [Aspergillus oryzae RIB40] gi|83774473|dbj|BAE64596.1| protein product [Aspergillus oryzae]
  misc_feature (2)..(533): NCBI GI: 238492155 Blast Desc: histidine permease, [Aspergillus flavus NRRL3357] gi|220695808|gb|EED52150.1| histidine permease, [Aspergillus flavus NRRL3357]
  misc_feature (8)..(542): NCBI GI: 256733803 Blast Desc: NECHADRAFT_77320 [Nectria haematococca mpVI 77-13-4]
  misc_feature (8)..(542): NCBI GI: 258572328 Blast Desc: conserved [Uncinocarpus reesii 1704] gi|237905196|gb|EEP79597.1| conserved [Uncinocarpus reesii 1704]
  misc_feature (2)..(542): NCBI GI: 225557968 Blast Desc: proline-specific permease [Ajellomyces capsulatus G186AR]
MSDIEAAQDSKPEPIHDEDLKTEHETRHNGTLERGLKSRHVQFMALSGAIGTGLFIGSGQVISLAGPLSAFLAYLITAFNVYCVVHSLGEMATYLPLPGAVPIYAARYVDEALGFAVSWNYWWQIAIGVPIEVTAAVVVVDYWPNDVPPAALITAFLGAMVVINCFPVRIYGEAEFVFGAIKLTTIVGLILLMFIITLGGTPNGDRIGFRYWRDPGPMNGYLEPGALGRFLAFWKVFIQATFSYGGSEMVVIASGETENPRRNIPKAIRRVFWRIALFYVLAIFLVTLCVSSKDSRLLNAISTSAPGAASSPFVIAIENGGIATLPSIINAVILTSAWSAGNSFFYASTRVLYSAALDGKAPRFFLWEKFGVPYACVAATTLLSLLAYLNVNNSGENVFFWFSNLSSVSTLIVWSSVCITYLRFYQGLRVNGISRDSLPYKAPLQPFLAYFALGFCVLVAFFNGFDAFFPGKFSAKTFVPPYIDIPIFAALFLGYKVVKGTKIVKLSEMDLWSGKEEIDALEGTWPEVKPRNFAERIWFWIA

SEQ ID NO: 26903 - DNA, 577 bp, Muscodor strobelii
  misc_feature: SGI EST ID NO. CUFF.63408.0
  misc_feature: Variant of the nucleotide sequence at SEQ ID NO 26901
ttcgcagtgagctggaattactggtggcagatcgccatcggtgtgccgatcgaagtcacggccgcggtcgtggtggttgattactggccgaatgacgtcccgcccgcggcgctgatcacggcgtttttgggggcgatggtggttattaattgtttccccgtaaggatatatggtgaagcggaatttgtgtttggtgcgattaaacttacgactatcgttgggctgatcctgttgatgttcattattacgctcggtgggacaccgaatggggatcgaatcggatttaggtattggcgcgatcctggaccgatgaatggatatctggagcctggagcactagggaggtttctggcgttctggaaggtctttattcaggctacgttttcgtatggtgggagcgaaatggtcgtcatcgcctcgggcgagactgaaaatccccgtcgtaacatcccgaaagcgattcggagagtgttctggaggatagcgctattctacgtgttggctattttcctcgtaacgctgtgcgtctcatcgaaagatagtcgtctgctgaacgcaatctcaacctctgcgccag

SEQ ID NO: 26904 - DNA, 1152 bp, Muscodor strobelii
  misc_feature: SGI cDNA ID NO. 569207
  misc_feature: Encodes the peptide sequence at SEQ ID NO 26905
atgcagactaaaacattactgcttgtggctgcggctactattactcatgctcaaacccccagtttgactgatgctctggcatctcaagactctctttcaactcttgcctctcttttatcaaatagctccttatctggatcgctggacagtctatctgatgtgaccatattggctccgaacaatgatgcactgagcgctattttgaacaacacagatgcggctgaaaggttcggggcaccaggctatatcgacgcactgctatcgtatcatatactcaacggcaccttctacgcatcgaacattacaaatacttcagcctttgtaccaacgtacttggcaaacactacatacaccaacgtcactggaggccaggtcgtcgaggcagtacgggttaatgacaatgtgaccttcttcagtgcattgaagttgaactcgagcgtagtgactgctgacctcaacttcaccggaggcacagtccacatcatcaacagtattctgttcattccaggcaacgtcacggataccctctccgactcaaatctcaccgcagcagccggtgcgctcagccaagttagctcattgcctagtagccttgacgatacacaagatatcactattttcgcgcccaacaatgatgctttcaacgccattggtagtatcgcatcgaacttgaccacggatcaactcgctggcatcctgtcatatcacgttctcaatggcactgttgcatactccagtgatcttagtaacaccactgtgactgctgccgatggcaccaacctgaccatcactattatcgacggaatcgttttcgtaaatgatgccaaggttactgtgcctaacattctgcttgagaatggcgttgtccatgtaattgaccaggtcttgaaccccaacaacaccgacgcgaaccccaacccatctcagtcaagcgctactcccgcatactccggtgcgagcagcactacggaggttccattcaccagtggcgcagagacagccaccgctacattcccggctgctacttctgccacaggcggcggcagcggccagactagtagctcgtctgagggtgcgggtgtaccgatccagactggtgctgtcggtgctgctgccttgttcggcggtgccgctatcttactcaacttctag

SEQ ID NO: 26905 - protein, 383 aa, Muscodor strobelii
  misc_feature: SGI Peptide ID NO. 569207
  misc_feature (180)..(298): Pfam Id: PF02469 Pfam Desc: Fasciclin domain
  misc_feature (31)..(169): Pfam Id: PF02469 Pfam Desc: Fasciclin domain
  misc_feature (1)..(382): NCBI GI: 46110487 Blast Desc: FG02125.1 [Gibberella zeae PH-1]
  misc_feature (5)..(335): NCBI GI: 256728620 Blast Desc: NECHADRAFT_72611 [Nectria haematococca mpVI 77-13-4]
  misc_feature (43)..(382): NCBI GI: 242788417 Blast Desc: conserved [Talaromyces stipitatus ATCC 10500] gi|218721361|gb|EED20780.1| conserved [Talaromyces stipitatus ATCC 10500]
  misc_feature (43)..(382): NCBI GI: 212544047 Blast Desc: conserved [Penicillium marneffei ATCC 18224] gi|210067085|gb|EEA21178.1| conserved [Penicillium marneffei ATCC 18224]
  misc_feature (3)..(383): NCBI GI: 39941142 Blast Desc: conserved [Magnaporthe grisea 70-15] gi|145022141|gb|EDK06161.1| conserved [Magnaporthe grisea 70-15]
  misc_feature (1)..(379): NCBI GI: 169609703 Blast Desc: SNOG_07944 [Phaeosphaeria nodorum SN15] gi|111063100|gb|EAT84220.1| SNOG_07944 [Phaeosphaeria nodorum SN15]
  misc_feature (3)..(383): NCBI GI: 29027707 Blast Desc: membrane-associated or secreted protein [Magnaporthe grisea]
  misc_feature (1)..(382): NCBI GI: 261360483 Blast Desc: conserved [Verticillium albo-atrum VaMs.102]
  misc_feature (20)..(381): NCBI GI: 189211705 Blast Desc: beta-Ig-H3/Fasciclin [Pyrenophora tritici-repentis Pt-1C-BFP] gi|187979380|gb|EDU46006.1| beta-Ig-H3/Fasciclin [Pyrenophora tritici-repentis Pt-1C-BFP]
  misc_feature (1)..(347): NCBI GI: 171692633 Blast Desc: protein product [Podospora anserina] gi|170946265|emb|CAP73066.1| protein product [Podospora anserina]
MQTKTLLLVAAATITHAQTPSLTDALASQDSLSTLASLLSNSSLSGSLDSLSDVTILAPNNDALSAILNNTDAAERFGAPGYIDALLSYHILNGTFYASNITNTSAFVPTYLANTTYTNVTGGQVVEAVRVNDNVTFFSALKLNSSVVTADLNFTGGTVHIINSILFIPGNVTDTLSDSNLTAAAGALSQVSSLPSSLDDTQDITIFAPNNDAFNAIGSIASNLTTDQLAGILSYHVLNGTVAYSSDLSNTTVTAADGTNLTITIIDGIVFVNDAKVTVPNILLENGVVHVIDQVLNPNNTDANPNPSQSSATPAYSGASSTTEVPFTSGAETATATFPAATSATGGGSGQTSSSSEGAGVPIQTGAVGAAALFGGAAILLNF

SEQ ID NO: 26906 - DNA, 2791 bp, Muscodor strobelii
  misc_feature: SGI EST ID NO. CUFF.63412.0
  misc_feature: Variant of the nucleotide sequence at SEQ ID NO 26904
gcaccgcctctcttgactttaacacagcgtcagtaacacactgcagaacgcctgcatgtggcttttcttaccacccaataccagcctcaaagcggaagcactgcgtcgaagctagtgtttccaactgcgacacggctggacgaaaacatgccgcgtcgcatgggaatgtatgggaactcgatggtctcgcttaaagatcagccctgaatcgacttccccagaaccctccagggattgaatggggtcaatttcagtgctagccattttcgtcgttgatccttcgaagtctaggccttactgacgccatcgacttgtaacgatgctttctgaaaaacatagaatcactatgctctcatactccgtatgtagcgcctcgctccaattgaacactagaagaattgacaaaaatggaggagcttagaaacgaagctcgttctacggtcggataagtcggcggatgctgtcacgcaaacacacgcgccaattgctctagtcattgctacgtggtttcgtggacctctgctatgtagaaatgccatttctgattggactgtgagtccgggaaaacgtgactgggtagacggcatggcttggccactgatccaggtcgacatcatgacttcatcattgtgaggaggtaacaattggcaatcctcgcttcctctatcggggaaaatgtgcacccatttggcttgtatatgagcatgagcccccggtgccggtccagcgtcatgttttcttcttcacacataccatcgtgtcgtacatttgagcctcttcgtataagtcaggtctctctgtcaacatatcaaaatccgtcaagatgcagactaaaacattactgcttgtggctgcggctactattactcatgctcaaacccccagtttgactgatgctctggcatctcaagactctctttcaactcttgcctctcttttatcaaatagctccttatctggatcgctggacagtctatctgatgtgaccatattggctccgaacaatgatgcactgagcgctattttgaacaacacagatgcggctgaaaggttcggggcaccaggctatatcgacgcactgctatcgtatcatatactcaacggcaccttctacgcatcgaacattacaaatacttcagcctttgtaccaacgtacttggcaaacactacatacaccaacgtcactggaggccaggtcgtcgaggcagtacgggttaatgacaatgtgaccttcttcagtgcattgaagttgaactcgagcgtagtgactgctgacctcaacttcaccggaggcacagtccacatcatcaacagtattctgttcattccaggcaacgtcacggataccctctccgactcaaatctcaccgcagcagccggtgcgctcagccaagttagctcattgcctagtagccttgacgatacacaagatatcactattttcgcgcccaacaatgatgctttcaacgccattggtagtatcgcatcgaacttgaccacggatcaactcgctggcatcctgtcatatcacgttctcaatggcactgttgcatactccagtgatcttagtaacaccactgtgactgctgccgatggcaccaacctgaccatcactattatcgacggaatcgttttcgtaaatgatgccaaggttactgtgcctaacattctgcttgagaatggcgttgtccatgtaattgaccaggtcttgaaccccaacaacaccgacgcgaaccccaacccatctcagtcaagcgctactcccgcatactccggtgcgagcagcactacggaggttccattcaccagtggcgcagagacagccaccgctacattcccggctgctacttctgccacaggcggcggcagcggccagactagtagctcgtctgagggtgcgggtgtaccgatccagactggtgctgtcggtgctgctgccttgttcggcggtgccgctatcttactcaacttctagttccactgttgtttattccgttcaaaactttggggaggaactaatgtagctataaaaggcatgcgatcgagaatcctgttgcggatgtaatagcatgaagggggatgggattgcagctgtgggaggtggattcattggaaaggactcgacatctagcatatgctgctacttgtcactaatcaattattcaattcaatataattcaatcaaaatcatctcagatctaattgccatttctcatgcgatccaaaaccaaatcctctcagcgaaattcctcggcttgacctcaggccacgtaccttccaatgcatcaatctcctccttcccactccacaagtccatctcactaagcttaacgatcttcgtccccttcacaaccttatagcccaaaaacagcgccgcaaaaatcggtatatctatatacggcggtacaaaagttttcgcgctaaacttcccagggaagaaagcatcaaacccattgaagaacgccaccaacacacaaaaccccagcgcgaaatacgccaaaaagggctgaagcggcgctttatacggcagactatcccgactaataccattgactctcagcccttggtaaaagcgcagataagtaatacaaacgctcgaccaaacaatcagcgtagagactgaggacagattagagaaccagaagaatacattctcgcctgaattattcacattcaggtacgcgaggagactgagaagcgtggtcgcagcgacacaggcataaggcacaccaaacttttcccagagaaaaaaccgcggtgcttttccgtctagtgccgcggagtacaaaac

SEQ ID NO: 26907 - DNA, 678 bp, Muscodor strobelii
  misc_feature: SGI cDNA ID NO. 569208
  misc_feature: Elevated expression when VOC is produced
  misc_feature: Encodes the peptide sequence at SEQ ID NO 26908
atgactacctcacacgagaaattccgtgtcttcgtcttcagcaaaactgccgcatatagacatgattcaattccagctggtattgaaggcctcagaaagctcggcatatctacggacacattcacagtcgatgcctccgaagacgccgacttgatcaatgcagagtacctctcacaattcaaggtcctggtgttcctgtcgccaagcggagaattcttgacgagagatcaattgctcaatctaaaaacatatatcaacaatggcggcggatttgtaggcatccactgcgcatcatcagcaatgcgatctgagccttggtatggcgagcttgtcggcgcgtatttcaccaaccacccggaaccgcaacacagcgtcgtgaaggttgagaataaagatcatgtcattgtctcacattattcgagcgagttcgaatggtttgacgaatggtacaacttctcatggaacccgcgcgacaaagttaagatactgttgtccactgatgagtcgcactatgaaggcggggagatgggtagcgatcatccacttgcatggtgtcgagaatttgatggtgggcggactttttacaccgctttgggtcattttgatgaggcatatcaagatgagtcgttcatgaagcatgtacatagtggcatcctctgggcagctgggttgatatga

SEQ ID NO: 26908 - protein, 225 aa, Muscodor strobelii
  misc_feature: SGI Peptide ID NO. 569208
  misc_feature (8)..(224): NCBI GI: 116200432 Blast Desc: CHGG_10761 [Chaetomium globosum CBS 148.51] gi|88175475|gb|EAQ82943.1| CHGG_10761 [Chaetomium globosum CBS 148.51]
  misc_feature (2)..(222): NCBI GI: 256725032 Blast Desc: NECHADRAFT_34653 [Nectria haematococca mpVI 77-13-4]
  misc_feature (7)..(222): NCBI GI: 261360488 Blast Desc: glycosyl hydrolase [Verticillium albo-atrum VaMs.102]
  misc_feature (8)..(225): NCBI GI: 117164776 Blast Desc: secreted glycosyl hydrolase [Streptomyces ambofaciens ATCC 23877]
  misc_feature (9)..(225): NCBI GI: 239945478 Blast Desc: SrosN15_31110 [Streptomyces roseosporus NRRL 15998] gi|239991944|ref|ZP_04712608.1| SrosN1_31882 [Streptomyces roseosporus NRRL 11379]
  misc_feature (8)..(223): NCBI GI: 268317285 Blast Desc: Crp/FNR family transcriptional regulator [Rhodothermus marinus DSM 4252] gi|262334819|gb|ACY48616.1| Crp/FNR family transcriptional regulator [Rhodothermus marinus DSM 4252]
  misc_feature (1)..(223): NCBI GI: 256800055 Blast Desc: secreted glycosyl hydrolase [Streptomyces viridochromogenes DSM 40736]
  misc_feature (9)..(225): NCBI GI: 282870776 Blast Desc: protein of function DUF1080 [Streptomyces sp. ACT-1] gi|282575841|gb|EFB81264.1| protein of function DUF1080 [Streptomyces sp. ACT-1]
  misc_feature (9)..(225): NCBI GI: 182434906 Blast Desc: SGR_1113 [Streptomyces griseus subsp. griseus NBRC 13350] gi|178463422|dbj|BAG17942.1| conserved [Streptomyces griseus subsp. griseus NBRC 13350]
  misc_feature (6)..(224): NCBI GI: 238061086 Blast Desc: MCAG_02052 [Micromonospora sp. ATCC 39149] gi|237882897|gb|EEP71725.1| MCAG_02052 [Micromonospora sp. ATCC 39149]
  misc_feature: Useful for introducing or modulating the production of volatile compounds
MTTSHEKFRVFVFSKTAAYRHDSIPAGIEGLRKLGISTDTFTVDASEDADLINAEYLSQFKVLVFLSPSGEFLTRDQLLNLKTYINNGGGFVGIHCASSAMRSEPWYGELVGAYFTNHPEPQHSVVKVENKDHVIVSHYSSEFEWFDEWYNFSWNPRDKVKILLSTDESHYEGGEMGSDHPLAWCREFDGGRTFYTALGHFDEAYQDESFMKHVHSGILWAAGLI

SEQ ID NO: 26909 - DNA, 1230 bp, Muscodor strobelii
  misc_feature: SGI EST ID NO. CUFF.63414.0
  misc_feature: Variant of the nucleotide sequence at SEQ ID NO 26907
tgaccatagacacgatgactctatcattttctagctgacattaaataggtaatttccaccaattgtctcactcaattgagaacccttggtttcataggcaatgtacctgatttcacccctgccggaaagtttcccgcagatggcacgattaccccaagctgccccgcgtctaactgtgagtcaacatcaatagggagcaaacctgctacagcaagtagttactgcatcatgtcaaggcaacataaaagaaaaatgtcaacagtcagttggaactgtgagcgacccgctgcgcagagcatagataggcgggatttaagtctattcgcataaagtgaataaaatttctgtcaatcatgactacctcacacgagaaattccgtgtcttcgtcttcagcaaaactgccgcatatagacatgattcaattccagctggtattgaaggcctcagaaagctcggcatatctacggacacattcacagtcgatgcctccgaagacgccgacttgatcaatgcagagtacctctcacaattcaaggtcctggtgttcctgtcgccaagcggagaattcttgacgagagatcaattgctcaatctaaaaacatatatcaacaatggcggcggatttgtaggcatccactgcgcatcatcagcaatgcgatctgagccttggtatggcgagcttgtcggcgcgtatttcaccaaccacccggaaccgcaacacagcgtcgtgaaggttgagaataaagatcatgtcattgtctcacattattcgagcgagttcgaatggtttgacgaatggtacaacttctcatggaacccgcgcgacaaagttaagatactgttgtccactgatgagtcgcactatgaaggcggggagatgggtagcgatcatccacttgcatggtgtcgagaatttgatggtgggcggactttttacaccgctttgggtcattttgatgaggcatatcaagatgagtcgttcatgaagcatgtacatagtggcatcctctgggcagctgggttgatatgataaggatgagctagtcttgggctagttgcaagatgttttagagtcccatcttagtcgtgtgtgaagaatgcaagcctgaagaaacggagttgaaaatgaatattgccaaggttccaacacgaccttcattctcagggatgacaattatcagtgtggaatatctagcaaaataggccaaaatattttaaccggactggaa

SEQ ID NO: 26910 - DNA, 663 bp, Muscodor strobelii
  misc_feature: SGI cDNA ID NO. 569209
  misc_feature: Encodes the peptide sequence at SEQ ID NO 26911
atgcatacatcaataatcctcaagaccggccttgtattacttgcctctggccaggcggcgctcgcgcagaatctcactctcaccttctatcccgacgaagatagcacatgctccaacaatgactcaaaggctatcaccataaccacgggacaaattccccaagtgccgtcctgttatgaactcgcagacttactttctgggaactacactccacatgcgcagccccaaggatcccagggagttaattggacaatcacgaacgccgacagctatgatccgaaagcaaactactctcacataaactacgaagtgcttggcccgaacggagatagagaagacccgcagggcgatgcttccgaccagtataccaacacgcggcttaacatctacaatggggagaattgcttatcagagagtaaagacaacgatccagaaggcgacatcgagccctggtatagctggacatgctacagcaacgaagatgacaagtgccggactgcgaggtacaacattaagagtttctatcttattcccatagatgacgatgaggacggtaaatgcttggactttgcgcttgagggtgctgcatcgcgcaacgttggggttttaacgggtgtaatcggcggtgttatcacgatgttaactgcggctttcctactataa

SEQ ID NO: 26911 - protein, 220 aa, Muscodor strobelii
  misc_feature: SGI Peptide ID NO. 569209
  misc_feature (22)..(219): NCBI GI: 256730102 Blast Desc: NECHADRAFT_82763 [Nectria haematococca mpVI 77-13-4]
  misc_feature (24)..(220): NCBI GI: 256729038 Blast Desc: NECHADRAFT_79920 [Nectria haematococca mpVI 77-13-4]
  misc_feature (6)..(220): NCBI GI: 261359867 Blast Desc: [Verticillium albo-atrum VaMs.102]
  misc_feature (6)..(220): NCBI GI: 46138091 Blast Desc: FG10560.1 [Gibberella zeae PH-1]
MHTSIILKTGLVLLASGQAALAQNLTLTFYPDEDSTCSNNDSKAITITTGQIPQVPSCYELADLLSGNYTPHAQPQGSQGVNWTITNADSYDPKANYSHINYEVLGPNGDREDPQGDASDQYTNTRLNIYNGENCLSESKDNDPEGDIEPWYSWTCYSNEDDKCRTARYNIKSFYLIPIDDDEDGKCLDFALEGAASRNVGVLTGVIGGVITMLTAAFLL

SEQ ID NO: 26912 - DNA, 1542 bp, Muscodor strobelii
  misc_feature: SGI EST ID NO. CUFF.63420.0
  misc_feature: Variant of the nucleotide sequence at SEQ ID NO 26910
aatatcgatgtatgtactgtatcggattgatgtttcaatcaggtgtcgagtataggattcatgagtaacaaggtgacgcatgatggaaatgaaacgtgaaacgcccagagctctgctaccagttattgtggacgtccaattccatgccccaggaatggttccgcgccacgagttgttacatacctgtggcgcagtctagaatgccggtattgattagaaacactggatttaaatatcattcaccatcatgccgacgaattgtggcctcagtgacgcaacttctatcatgtaggacagtacgttgcggtgtatacggcgtatagctgtttggacgtccatctttctcttggcctcaagtcgaaggagtcgccaagacaacttgacatctcaatgacgttgttgttgacacagccaacgccagcggccgcctatgacatcgtatgaggcatgcttttcaatggaataaccaccaggtatccatgcgacctaactcggctggtaaatcgttgttatttgataggtccgtgtctcgttggaaggctggatgcagagcactttcagacattttcgaatgctaataataccagcatcccaaagcgggctgttggtgtagatctgccaaggccatgtcaacagatataaatccatgacgtccctgggttgcttcatcttttgagaggagctctgtatcgaaaatttcatgatcgcatgctcgcccaaaaacatatctttcagcttccgttctcgccctgtctcagtcattatcaatgcatacatcaataatcctcaagaccggccttgtattacttgcctctggccaggcggcgctcgcgcagaatctcactctcaccttctatcccgacgaagatagcacatgctccaacaatgactcaaaggctatcaccataaccacgggacaaattccccaagtgccgtcctgttatgaactcgcagacttactttctgggaactacactccacatgcgcagccccaaggatcccagggagttaattggacaatcacgaacgccgacagctatgatccgaaagcaaactactctcacataaactacgaagtgcttggcccgaacggagatagagaagacccgcagggcgatgcttccgaccagtataccaacacgcggcttaacatctacaatggggagaattgcttatcagagagtaaagacaacgatccagaaggcgacatcgagccctggtatagctggacatgctacagcaacgaagatgacaagtgccggactgcgaggtacaacattaagagtttctatcttattcccatagatgacgatgaggacggtaaatgcttggactttgcgcttgagggtgctgcatcgcgcaacgttggggttttaacgggtgtaatcggcggtgttatcacgatgttaactgcggctttcctactataaattggtttataacaacactttcgttgagccttaaacagtgatcgtgtcgttgaattttacagtttcttcaacaattgcttcatcatggtatgtgtgacaagcacgagcttcc

SEQ ID NO: 26913 - DNA, 1443 bp, Muscodor strobelii
  misc_feature: SGI cDNA ID NO. 569210
  misc_feature: Reduced expression when VOC is produced
  misc_feature: Encodes the peptide sequence at SEQ ID NO 26914
atgtccaattcgcctgcttcggtcgtgggaatggataccaccaacgccatggacaagaagcatgccgccgctgcagtcgctgcagccgcggccgcggcgtcaggcggctctccacttgagcatcaactcctgccgcatccccacattcaacccaacgcgctggaccgggcaaactcaccccacgggtcagagagctcctaccactcggcgcctcgtgcccctacgtcactcgatgccctgaacgggctcggcaatggtggtcgtccatacggacagctccctcttcccatgcccaactcaatgcccaactcgggtctccacccaatgccgggctcgaatatgggccccggtctcatggcaggtgtggactcgttgatggccggccacgcggtcccgatgccctaccacaagctgcccgaggcgacgacaactccaccggctgctatcaaggcctatccatgcagcacgtgtggcaagggtttcgcgcgacgtagtgatcttgcgcgacacgaacgcatccacagcggagtccgccctcacgcatgtgactggcccaactgtggcaagcagttcatccaacggtcagctctgaccgtacatcagcgtgtacataccaaggagaagccccatttgtgcgagcgctgtggcaagcccttcagtgatagttcctctttggctcggcataggcgtattcactccggtcagcgcccgtataagtgtccctatgccgactgccagaagacgttcactagaagaactaccttgacccggcatatgaaccaccacacaggaacgatcgaggaagcagctgccgccaccgctgcggcccttgcagcacaggcaaccaaggctgccgctactcgctccgtccgtagtgatgctggcgacgccacgctgggttcaactcacgcgtcgccgctcaacaccccatctcctggccagcgccacatgtccgcttctcccaacgctgatgtgggtgccaacgctatgcgtgccaatgacttcggatacctaagcaatggaaacctgccggttcacttgcgcactgatgtccacggtcagggttcagcatccacgccgcctttcaccactggaatgcgacctacctcccatcctaccaactaccagccgccacccacccttgaaccgaacgtggagtcgcaccaatccgctggaggtagcatcacgggtagcccacatatgggcagcgttggctggcagtcaccttcgcatcaatctcctggtcatatgccgtcgcctacgcacagcagcggtggcaacaactatgtctaccctgagcccgactctttcgcgggcaatgcgatgggccagatgtactacccttctgccaatcaaattcgcagatccaacagctcagagccagctccagcaacctttgacatcaagccacgtccggacgccatttggcagggtcaccagtag

SEQ ID NO: 26914 - protein, 480 aa, Muscodor strobelii
  misc_feature: SGI Peptide ID NO. 569210
  misc_feature (238)..(262): Pfam Id: PF00096 Pfam Desc: Zinc finger, C2H2 type
  misc_feature (152)..(174): Pfam Id: PF00096 Pfam Desc: Zinc finger, C2H2 type
  misc_feature (180)..(204): Pfam Id: PF00096 Pfam Desc: Zinc finger, C2H2 type
  misc_feature (210)..(232): Pfam Id: PF00096 Pfam Desc: Zinc finger, C2H2 type
  misc_feature (54)..(480): NCBI GI: 116202551 Blast Desc: CHGG_09160 [Chaetomium globosum CBS 148.51] gi|88177678|gb|EAQ85146.1| CHGG_09160 [Chaetomium globosum CBS 148.51]
  misc_feature (54)..(479): NCBI GI: 171681990 Blast Desc: protein product [Podospora anserina] gi|170940954|emb|CAP66604.1| protein product [Podospora anserina]
  misc_feature (55)..(476): NCBI GI: 154303880 Blast Desc: BC1G_08824 [Botryotinia fuckeliana B05.10] gi|150854408|gb|EDN29600.1| BC1G_08824 [Botryotinia fuckeliana B05.10]
  misc_feature (38)..(480): NCBI GI: 145608616 Blast Desc: MGG_06507 [Magnaporthe grisea 70-15] gi|145016066|gb|EDK00556.1| MGG_06507 [Magnaporthe grisea 70-15]
  misc_feature (4)..(461): NCBI GI: 46128479 Blast Desc: FG08617.1 [Gibberella zeae PH-1]
  misc_feature (145)..(466): NCBI GI: 261359535 Blast Desc: zinc finger protein [Verticillium albo-atrum VaMs.102]
  misc_feature (54)..(461): NCBI GI: 256734043 Blast Desc: NECHADRAFT_99633 [Nectria haematococca mpVI 77-13-4]
  misc_feature (150)..(461): NCBI GI: 164426660 Blast Desc: NCU10679 [Neurospora crassa OR74A] gi|157071425|gb|EAA27324.2| conserved [Neurospora crassa OR74A]
  misc_feature (139)..(461): NCBI GI: 189191010 Blast Desc: PTRG_01511 [Pyrenophora tritici-repentis Pt-1C-BFP] gi|187973450|gb|EDU40949.1| PTRG_01511 [Pyrenophora tritici-repentis Pt-1C-BFP]
  misc_feature (145)..(471): NCBI GI: 242769920 Blast Desc: C2H2 finger domain protein, [Talaromyces stipitatus ATCC 10500] gi|218725067|gb|EED24484.1| C2H2 finger domain protein, [Talaromyces stipitatus ATCC 10500]
  misc_feature: Useful for introducing or modulating the production of volatile compounds
MSNSPASVVGMDTTNAMDKKHAAAAVAAAAAAASGGSPLEHQLLPHPHIQPNALDRANSPHGSESSYHSAPRAPTSLDALNGLGNGGRPYGQLPLPMPNSMPNSGLHPMPGSNMGPGLMAGVDSLMAGHAVPMPYHKLPEATTTPPAAIKAYPCSTCGKGFARRSDLARHERIHSGVRPHACDWPNCGKQFIQRSALTVHQRVHTKEKPHLCERCGKPFSDSSSLARHRRIHSGQRPYKCPYADCQKTFTRRTTLTRHMNHHTGTIEEAAAATAAALAAQATKAAATRSVRSDAGDATLGSTHASPLNTPSPGQRHMSASPNADVGANAMRANDFGYLSNGNLPVHLRTDVHGQGSASTPPFTTGMRPTSHPTNYQPPPTLEPNVESHQSAGGSITGSPHMGSVGWQSPSHQSPGHMPSPTHSSGGNNYVYPEPDSFAGNAMGQMYYPSANQIRRSNSSEPAPATFDIKPRPDAIWQGHQ

SEQ ID NO: 26915 - DNA, 3574 bp, Muscodor strobelii
  misc_feature: SGI EST ID NO. CUFF.63460.1
  misc_feature: Variant of the nucleotide sequence at SEQ ID NO 26913
cactctgccactgcaccaaaccttctcatcgcgtaggttctcattcaagcctatcaagtactggaagataaatgtacgctagaaagtttgcctagcacgcaccgagccgcaaacgcattggccggactactaactgtgacagctggtcatttttcacaagcaccagacagagcgagacaggcgacagcgattagctacaggtactaggcccgctagcagcgatcccagttgcatgccccagcagtgaggcccagtggtgaggccccagtagtacctgccgtgcctgcctcacacccacactccaccgaaaccgtcccttcctattcgtaggctcatttcatcatctcattaactgcttccctttttttgtcgaaatcttcgtcaccacctcacggcgcgtcctcgacaattctcccattccctttcgtacaacacccacacggtctttaacccgcctcacctcatcacccaccagcatcctccgccctaatcactttcatccagcagtcataccaccgtcttctgccctgtcggcactgcaccacccacattctggttgtgcaaagacgtctacgtcgccatcctgttgagaattgtcgacacgcggcttggaccacgaagacattctgcatcgaccattttctttacctcttccatcatttccctacaaactctgtgactttcggacgactacagtcgctgtgcgatctgcgaagctccgggttccagaaatcaccatctcgaaccgcccagtaaggccctgaagttcagttccagcaacgaccaagcgcggcgctttcccgattttcgactccaaagcaagtcgtgactgcatcgggcgcagtgctatttgttccatatcgagaatcctagaggtcgggaaattttgtcccccgacaatactatatacaattctggggctcgatcttcggttagcacaaggaactcgacgattccgtcgattgatctcaaccggtctcagccagtcgaggagacttggtttgtgttctgaagaccacggtggagacggtcgtcatcatcctttcgtgttggtatcatgtccaattcgcctgcttcggtcgtgggaatggataccaccaacgccatggacaagaagcatgccgccgctgcagtcgctgcagccgcggccgcggcgtcaggcggctctccacttgagcatcaactcctgccgcatccccacattcaacccaacgcgctggaccgggcaaactcaccccacgggtcagagagctcctaccactcggcgcctcgtgcccctacgtcactcgatgccctgaacgggctcggcaatggtggtcgtccatacggacagctccctcttcccatgcccaactcaatgcccaactcgggtctccacccaatgccgggctcgaatatgggccccggtctcatggcaggtgtggactcgttgatggccggccacgcggtcccgatgccctaccacaagctgcccgaggcgacgacaactccaccggctgctatcaaggcctatccatgcagcacgtgtggcaagggtttcgcgcgacgtagtgatcttgcgcgacacgaacgcatccacagcggagtccgccctcacgcatgtgactggcccaactgtggcaagcagttcatccaacggtcagctctgaccgtacatcagcgtgtacataccaaggagaagccccatttgtgcgagcgctgtggcaagcccttcagtgatagttcctctttggctcggcataggcgtattcactccggtcagcgcccgtataagtgtccctatgccgactgccagaagacgttcactagaagaactaccttgacccggcatatgaaccaccacacaggaacgatcgaggaagcagctgccgccaccgctgcggcccttgcagcacaggcaaccaaggctgccgctactcgctccgtccgtagtgatgctggcgacgccacgctgggttcaactcacgcgtcgccgctcaacaccccatctcctggccagcgccacatgtccgcttctcccaacgctgatgtgggtgccaacgctatgcgtgccaatgacttcggatacctaagcaatggaaacctgccggttcacttgcgcactgatgtccacggtcagggttcagcatccacgccgcctttcaccactggaatgcgacctacctcccatcctaccaactaccagccgccacccacccttgaaccgaacgtggagtcgcaccaatccgctggaggtagcatcacgggtagcccacatatgggcagcgttggctggcagtcaccttcgcatcaatctcctggtcatatgccgtcgcctacgcacagcagcggtggcaacaactatgtctaccctgagcccgactctttcgcgggcaatgcgatgggccagatgtactacccttctgccaatcaaattcgcagatccaacagctcagagccagctccagcaacctttgacatcaagccacgtccggacgccatttggcagggtcaccagtaggaagggtcactcgcaaatcatgttcaaaacgttgattccacggcggccccccaggtaccgcatctcatgattaccccccctcagcatgcaacaccgatgtacggcatgaactcgcatcctactgagccttcgacgggtggccaatagaacgggcatcccgcaagcgctcagcacgtactcggttctagcagtggcgctccccagacaatggatgctggaccttctgcaatgcaggcaactatggccactgaccccttctttggggctccagtcgctggggatggagttcctgcactatcggagcagatatcacagctcgtactggaccctgcactgtttggtacctttcccacaaacttttcctcagtctagatttcctttgtctcggaacgtcagagcagccaatcattcgccaacatacgacacgagtatatgtaatcggcccatttcacaccggttcgcgattgatgttgacgcatctgattctctttcagctgtggcgtcaaatttggtggtctggaactggcgccgcgatggtcaacgatttgggccacaatagcgatacgatcttttctttctcttgcacatttctcaccatagactgatacggctctgttgccaggatttgcagcgtgtttctattttgcggtcaaataccgaagcggaaaggagttcaaagggaaagatcccaggaaactagcgacactctgatttgagatgatttctttgataaaaggcaggaaaaatggccaagagccttcaggacagcgggcgtagcggatttgatttcgatttcattgcatcagggtcatttcttaagtctaaaaatacaggtctcaggcgttgcaaggcgggcgactgccaataactcttctcctatacagcataatacagacaactattcacaaaccactcatcacttctttgtaatcaggctattgacaaaaacgacggtacccttttgcctataggtatgcaactcttgattgtcatgtcctaatgactattcagatagacgttcaacaagatcttgggttaacgagggaccatgacattagctcaataacagctaga

SEQ ID NO: 26916 - DNA, 1050 bp, Muscodor strobelii
  misc_feature: SGI cDNA ID NO. 569211
  misc_feature: Reduced expression when VOC is produced
  misc_feature: Encodes the peptide sequence at SEQ ID NO 26917
atgacgagcattcagcaactcctgttgtctgacgatgagttgcctgataacccaacgtcgaatggcaatggcccaattggtgcaaccccgaacagtattgggtcgaaacacttcatcatcgaatatgtgcacgatactatttgcccgttctgttacattggctggaggactttactcaaggcaatcgaggagtacaagtcaaaagacatagacgccgtgtttgaggtcacttgctcacctttcattcttgggcctacagctaggatcagtgcatatacgaagaaagactattatatccgtgaacgcggcctgcccgctgaccggatcgaactatggaatcgactggggagtaatgtcggtattgatttcaagtgggaaggcctcacgggcaactctcgaaactcccacaagatgctacgttttgctctggaatctacaccaacgacgcggagcagcacacagtgtacgaggtttgaccaagggcttggccctcccccaacttatcctccttcgtcacttcgcgctcccgaatacgctgttcagaccgagcagcctcgtggccccgacttacaaatgcgtttactcgaccgtctcacctatttgtaccatgaaaaggaaagagatatatctgacccgacgttcctcaaagaagaaacggcgttcgtgacaggttttagtcatgcagatatacaggcggtcctggacagcgaggagtgggacagagctatcgacaaattggacagtgatatacaacatcgtaaagcaattaagaacccagtctcaggacctatcatcgcagttccgacgatagttatcaatcaccgttgggtatacggtgggttccaagaagtgggcttccttgtacgccagtttgagatgctggcgcaaggacaagtgcctttgacagagtataccagatcacagatggtgcctgttgttggagtcaaagactccattcaccgacaaaacatggccgccatcccccaagccaaccacaacaccaatttcaatggcaactgctgcagtaacggaccctcgagactaccttaa

SEQ ID NO: 26917 - protein, 349 aa, Muscodor strobelii
  misc_feature: SGI Peptide ID NO. 569211
  misc_feature (37)..(297): NCBI GI: 119195171 Blast Desc: CIMG_01960 [Coccidioides immitis RS]
  misc_feature (38)..(294): NCBI GI: 156040748 Blast Desc: SS1G_11352 [Sclerotinia sclerotiorum 1980] gi|154695736|gb|EDN95474.1| SS1G_11352 [Sclerotinia sclerotiorum 1980]
  misc_feature (37)..(294): NCBI GI: 189211181 Blast Desc: PTRG_11590 [Pyrenophora tritici-repentis Pt-1C-BFP] gi|187978014|gb|EDU44640.1| PTRG_11590 [Pyrenophora tritici-repentis Pt-1C-BFP]
  misc_feature (38)..(294): NCBI GI: 154303838 Blast Desc: BC1G_08803 [Botryotinia fuckeliana B05.10] gi|150854387|gb|EDN29579.1| BC1G_08803 [Botryotinia fuckeliana B05.10]
  misc_feature (38)..(144): NCBI GI: 116202545 Blast Desc: [Chaetomium globosum CBS 148.51] gi|88177675|gb|EAQ85143.1| [Chaetomium globosum CBS 148.51]
  misc_feature (40)..(292): NCBI GI: 261359536 Blast Desc: [Verticillium albo-atrum VaMs.102]
  misc_feature (35)..(300): NCBI GI: 258566355 Blast Desc: conserved [Uncinocarpus reesii 1704] gi|237907623|gb|EEP82024.1| conserved [Uncinocarpus reesii 1704]
  misc_feature (37)..(236): NCBI GI: 115385811 Blast Desc: [Aspergillus terreus NIH2624] gi|114187899|gb|EAU29599.1| [Aspergillus terreus NIH2624]
  misc_feature (42)..(297): NCBI GI: 240105002 Blast Desc: DSBA-like thioredoxin domain containing protein [Coccidioides posadasii C735 delta SOWgp]
  misc_feature (32)..(296): NCBI GI: 238490011 Blast Desc: DSBA-like thioredoxin domain protein [Aspergillus flavus NRRL3357] gi|220698631|gb|EED54971.1| DSBA-like thioredoxin domain protein [Aspergillus flavus NRRL3357]
  misc_feature: Useful for introducing or modulating the production of volatile compounds
MTSIQQLLLSDDELPDNPTSNGNGPIGATPNSIGSKHFIIEYVHDTICPFCYIGWRTLLKAIEEYKSKDIDAVFEVTCSPFILGPTARISAYTKKDYYIRERGLPADRIELWNRLGSNVGIDFKWEGLTGNSRNSHKMLRFALESTPTTRSSTQCTRFDQGLGPPPTYPPSSLRAPEYAVQTEQPRGPDLQMRLLDRLTYLYHEKERDISDPTFLKEETAFVTGFSHADIQAVLDSEEWDRAIDKLDSDIQHRKAIKNPVSGPIIAVPTIVINHRWVYGGFQEVGFLVRQFEMLAQGQVPLTEYTRSQMVPVVGVKDSIHRQNMAAIPQANHNTNFNGNCCSNGPSRLP

SEQ ID NO: 26918 - DNA, 2971 bp, Muscodor strobelii
  misc_feature: SGI EST ID NO. CUFF.63438.0
  misc_feature: Variant of the nucleotide sequence at SEQ ID NO 26916
ggtgatccctggatgcatcccgatgcatgtcatccatgagtgcgtgtggaggtaccgcgatgctgggtacctccaaaaagttacactggatggtggcaaaatggacctgaggcacgcggcagggtcgcttggttaggccgaattgcaatctcggcaatctaacataatcctaccctctaccaactgcatggaatcgtgacctttcttgtcgcagacagctgaaaggcgattgctcggctgccctcatttccggatgtacgatgagggaggtggttgcggagcgcatgggctccacgcgcccgcagacgtcatcgctcgatcagacctggttgttggcctgctcactaccttatttacggccgctatgtctctggtgtcacgatgtctcgactcgccatttagccttctcgaaccattcttaccatcctcttcgctctcatctgtctccaagtactagaggaggcgcctttgctcttcgtctttagatattggaatttacacccgcaggtcgaaccttcgacggacacgacacgacttcgaaatcttgtctctaatacgaaggcaaatcatccaatctcacgcctggcacaacccattagctttgcagccttctcgacgagtctattactcgtacttgggcaattggaaaggtagcgctgcatatttttatgctgggccatgtgcacaatattgcttagtattgagatgggctgagctgacacaagggttcatctcactaggggtgcaacaactcgggtcacgattgtcgattgcggacgtcatcgtaccgatcgtcttgctctgacacgactccgccgcattttgtgttgagttatcgtgggagttgactgttatcctcggagaagaataccgtgtatcatctaccgtccccacttctccgaggatgcttttaataactgtcctcgaccgcccatacacaagcccaaagttctagcttcttggcctgcgtctcaaaatgggcttgtagcattaataattcaccaaaatctggtgtcacgggatgcatcaccccttgcatgatccaacctattgtctacatattgccaaggacgataggtcaatatgacgagcattcagcaactcctgttgtctgacgatgagttgcctgataacccaacgtcgaatggcaatggcccaattggtgcaaccccgaacagtattgggtcgaaacacttcatcatcgaatatgtgcacgatactatttgcccgttctgttacattggctggaggactttactcaaggcaatcgaggagtacaagtcaaaagacatagacgccgtgtttgaggtcacttgctcacctttcattcttgggcctacagctaggatcagtgcatatacgaagaaagactattatatccgtgaacgcggcctgcccgctgaccggatcgaactatggaatcgactggggagtaatgtcggtattgatttcaagtgggaaggcctcacgggcaactctcgaaactcccacaagatgctacgttttgctctggaatctacaccaacgacgcggagcagcacacagtgtacgaggtttgaccaagggcttggccctcccccaacttatcctccttcgtcacttcgcgctcccgaatacgctgttcagaccgagcagcctcgtggccccgacttacaaatgcgtttactcgaccgtctcacctatttgtaccatgaaaaggaaagagatatatctgacccgacgttcctcaaagaagaaacggcgttcgtgacaggttttagtcatgcagatatacaggcggtcctggacagcgaggagtgggacagagctatcgacaaattggacagtgatatacaacatcgtaaagcaattaagaacccagtctcaggacctatcatcgcagttccgacgatagttatcaatcaccgttgggtatacggtgggttccaagaagtgggcttccttgtacgccagtttgagatgctggcgcaaggacaagtgcctttgacagagtataccagatcacagatggtgcctgttgttggagtcaaagactccattcaccgacaaaacatggccgccatcccccaagccaaccacaacaccaatttcaatggcaactgctgcagtaacggaccctcgagactaccttaatctagtgagggacgtctattaatgtcgcctaatgaaaaaggccgatcctgattatctgatcattaccctactggagcaaaccaacaggccgagaggcgatgggaagccgaaattttcggcttcgatagaggcagatggagcctgccgacttgattactgatcattggacgaatgcatcatcggtgttgcggggaacacggaacgcgggacaagtgcggttggggctcggtgatgcgacgccctgagtccgacctatcaaagctgaaggattggatctcacgatcctgagggcgctgaccgattatcatggatcgaaattgatgttgaaattttgatttatagccggaattcgatgcggatatcgtgagggactggcacattacgaaggacttgcggtcaacggatcttagcacttgagaggaactgcaacttgcatcctggcagatccaccaaagtgcgtaaggaagtattggaataggagaagaggagaatagcacaggccgtcgcgacagaaaccgatcttcagatctttaacaatacaatgcgcacgcgcacgcgatgctctcaggcatccattccggtcgctgaggacgagcgtatcattgggaatatgggggagtctgttgtgaaaccagggcagatcttttaggatacacgcacgcatatgcttctaggcattcgtttcatgacagtcgcttccgagattaagttttaaagatcaataaataccaatacaaatttgaaatatccccattacttgcacttgagactatcgaagctgtcgaggtgtgtgcctgtgatgttcaccctgtggatcgacattgcgtgattgtagtgc

SEQ ID NO: 26919 - DNA, 813 bp, Muscodor strobelii
  misc_feature: SGI cDNA ID NO. 569212
  misc_feature: Encodes the peptide sequence at SEQ ID NO 26920
atggcgtcgctagcgaccgttgagtccttcgtcgagggagcaccgccaggagagctggcagatgtcataaacgacatcaagaccctgaccatcaacgaaccctcgctggtctcgaagctcggcccggccttcgagagatacaacgaagagcagttcgcaaccatcaagctccccggcagcagtcagccggtcatcatcagctcccatagctcgctcggagacggccggtacttcgatgtcgagagctcctctagctttgcattcgaccacgccacgcagaaagcaagtgcggtgcagagctacgccttagagggcgcacaggcagacttggtgaaatctacgctgaagagcttatcaacctacgtctccgagcactacccaagcgcatcttacggtgcataccccatcgagaacgattccaaggtggccgtcgtcatcgtggccaataaatacagccccaacaacttctggaacggccggtggcgatccctatacatcttcgacccctcctccagcagtctcgaaggcagcctgaaagtcgacgtgcactactacgaagacggaaacgtccgcatgttgaccaacaagcccgtgactggctcagtatcatccgccacgggtgcaggtatctgcaaggagattgcatcgattgagaagaaataccaggaggagttgaacagaggattcacgagtcttagtgagggcgcgtttaagggtctacgacgacagctcccggtgacgagacagaagattgagtgggataagctggctagttacaggattggtggtgatattggtggtgggaagagatga

SEQ ID NO: 26920 - protein, 270 aa, Muscodor strobelii
  misc_feature: SGI Peptide ID NO. 569212
  misc_feature (2)..(264): Pfam Id: PF01267 Pfam Desc: F-actin capping protein alpha subunit
  misc_feature (10)..(264): Pfam Id: PF01267 Pfam Desc: F-actin capping protein alpha subunit
  misc_feature (1)..(268): NCBI GI: 46128487 Blast Desc: FG08621.1 [Gibberella zeae PH-1] gi|119371574|sp|Q4I2D7.1|CAPZA_GIBZE RecName: Full=F-actin-capping protein subunit alpha
  misc_feature (1)..(268): NCBI GI: 261359540 Blast Desc: F-actin-capping protein subunit alpha [Verticillium albo-atrum VaMs.102]
  misc_feature (7)..(268): NCBI GI: 85085700 Blast Desc: NCU03911 [Neurospora crassa OR74A] gi|20137534|sp|Q9P5K9.2|CAPZA_NEUCR RecName: Full=F-actin-capping protein subunit alpha gi|16945430|emb|CAB91688.2| actin-capping
  misc_feature (2)..(268): NCBI GI: 154310817 Blast Desc: BC1G_06387 [Botryotinia fuckeliana B05.10] gi|150851186|gb|EDN26379.1| BC1G_06387 [Botryotinia fuckeliana B05.10]
  misc_feature (26)..(268): NCBI GI: 171681996 Blast Desc: protein product [Podospora anserina] gi|170940957|emb|CAP66607.1| protein product [Podospora anserina]
  misc_feature (2)..(268): NCBI GI: 156034194 Blast Desc: SS1G_13400 [Sclerotinia sclerotiorum 1980] gi|154698803|gb|EDN98541.1| SS1G_13400 [Sclerotinia sclerotiorum 1980]
  misc_feature (25)..(270): NCBI GI: 145608614 Blast Desc: MGG_12818 [Magnaporthe grisea 70-15] gi|145016062|gb|EDK00552.1| MGG_12818 [Magnaporthe grisea 70-15]
  misc_feature (1)..(270): NCBI GI: 189201253 Blast Desc: F-actin-capping protein subunit alpha [Pyrenophora tritici-repentis Pt-1C-BFP] gi|187984062|gb|EDU49550.1| F-actin-capping protein subunit alpha [Pyrenophora Pt-1C-BFP]
  misc_feature (1)..(269): NCBI GI: 169772799 Blast Desc: [Aspergillus oryzae RIB40] gi|238490708|ref|XP_002376591.1| F-actin capping protein alpha subunit, [Aspergillus flavus NRRL3357] RecName: protein subunit
  misc_feature (1)..(269): NCBI GI: 259487504 Blast Desc: TPA: F-actin-capping protein subunit alpha [Source:UniProtKB/Swiss-Prot;Acc:Q5BBF4] [Aspergillus nidulans FGSC A4]
MASLATVESFVEGAPPGELADVINDIKTLTINEPSLVSKLGPAFERYNEEQFATIKLPGSSQPVIISSHSSLGDGRYFDVESSSSFAFDHATQKASAVQSYALEGAQADLVKSTLKSLSTYVSEHYPSASYGAYPIENDSKVAVVIVANKYSPNNFWNGRWRSLYIFDPSSSSLEGSLKVDVHYYEDGNVRMLTNKPVTGSVSSATGAGICKEIASIEKKYQEELNRGFTSLSEGAFKGLRRQLPVTRQKIEWDKLASYRIGGDIGGGKR

SEQ ID NO: 26921 - DNA, 1397 bp, Muscodor strobelii
  misc_feature: SGI EST ID NO. CUFF.63451.1
  misc_feature: Variant of the nucleotide sequence at SEQ ID NO 26919
cgaccttctgcaatacccaatacctaataccacaaacaacacgccactcattggttcctagggcaagctgtatgccacactacgttcatttgattcgattacaccgaacttatttaggcacctgtgattgaggcccacagataaagcgactcgtgtcgaggcatcgaaatggcgtcgctagcgaccgttgagtccttcgtcgagggagcaccgccaggagaggtaaggaatagatagcttgcgccctcacctacataacctcgtattgctgcagaactgactttcggatagctggcagatgtcataaacgacatcaagaccctgaccatcaacgaaccctcgctggtctcgaagctcggcccggccttcgagagatacaacgaagagcagttcgcaaccatcaagctccccggcagcagtcagccggtcatcatcagctcccatagctcgctcggagacggccggtacttcgatgtcgagagctcctctagctttgcattcgaccacgccacgcagaaagcaagtgcggtgcagagctacgccttagagggcgcacaggcagacttggtgaaatctacgctgaagagcttatcaacctacgtctccgagcactacccaagcgcatcttacggtgcataccccatcgagaacgattccaaggtggccgtcgtcatcgtggccaataaatacagccccaacaacttctggaacggccggtggcgatccctatacatcttcgacccctcctccagcagtctcgaaggcagcctgaaagtcgacgtgcactactacgaagacggaaacgtccgcatgttgaccaacaagcccgtgactggctcagtatcatccgccacgggtgcaggtatctgcaaggagattgcatcgattgagaagaaataccaggaggagttgaacagaggattcacgagtcttagtgagggcgcgtttaagggtctacgacgacagctcccggtgacgagacagaagattgagtgggataagctggctagttacaggattggtggtgatattggtggtgggaagagatgagcgtgtgagggaaggggcagaaaggaaagatgtgtgtgagctgatgtatttcgttgctcggataccattgcggcgaatagaagatacgggatgaagatatcacagaaaactttctgtcaagaccgtgttgattaatgtctgagctttacgaagatttacatggatgaagccacactcgacgtgaaggggaattagtttctcatccggtggtgctgaacacctggaaaagtttcaattcccaggtagggccgtggacgaaatggacgacaccctttcaccatatgcgacctattattggcatttataagaatctaattcgaatagacatatgatacggttcccggctg

SEQ ID NO: 26922 - DNA, 405 bp, Muscodor strobelii
  misc_feature: SGI cDNA ID NO. 569213
  misc_feature: Reduced expression when VOC is produced
  misc_feature: Encodes the peptide sequence at SEQ ID NO 26923
atggccgacaaggagtatacctatcaagacgttgctgagcacaacactaagaaggacctgttcgtcgttatccacgataaggtctacgactgcgccaagtttgtcgacgagcaccctggtggcgaggaagtcctgttggatgtcggtggccaggatgcgaccgaggctttcgaggatgttggacacagtgacgaggcccgggaaaccctcgaccagctcctcgtcggaaccctgaagcgcaagcctggtgacccagagcccaaggctgtcgcttcggccgttgcccccgctgccaacacatcctcagcaggcatgggcacggccctgtacgccgccgtcttcgtcggtggtatcgccgcgtacctcggatacaactaccttcagcagcaatcgcagaagtcttga

SEQ ID NO: 26923 - protein, 134 aa, Muscodor strobelii
  misc_feature: SGI Peptide ID NO. 569213
  misc_feature (5)..(79): Pfam Id: PF00173 Pfam Desc: Cytochrome b5-like Heme/Steroid binding domain
  misc_feature (1)..(121): NCBI GI: 171681998 Blast Desc: protein product [Podospora anserina] gi|170940958|emb|CAP66608.1| protein product [Podospora anserina]
  misc_feature (5)..(130): NCBI GI: 20138039 Blast Desc: CYB5_NEUCR RecName: Full= cytochrome b5 gi|16945429|emb|CAB91687.2| cytochrome b5 [Neurospora crassa]
  misc_feature (1)..(121): NCBI GI: 116202541 Blast Desc: cytochrome b5, [Chaetomium globosum CBS 148.51] gi|88177673|gb|EAQ85141.1| cytochrome b5, [Chaetomium globosum CBS 148.51]
  misc_feature (1)..(133): NCBI GI: 169618611 Blast Desc: SNOG_12498 [Phaeosphaeria nodorum SN15] gi|160703651|gb|EAT80311.2| SNOG_12498 [Phaeosphaeria nodorum SN15]
  misc_feature (3)..(132): NCBI GI: 169770015 Blast Desc: [Aspergillus oryzae RIB40] gi|238487644|ref|XP_002375060.1| cytochrome b5, [Aspergillus flavus NRRL3357] gi|83767336|dbj|BAE57475.1| protein product b5,
  misc_feature (1)..(117): NCBI GI: 39977215 Blast Desc: MGG_06510 [Magnaporthe grisea 70-15] gi|145016063|gb|EDK00553.1| MGG_06510 [Magnaporthe grisea 70-15]
  misc_feature (2)..(130): NCBI GI: 189201237 Blast Desc: microsomal cytochrome b5 [Pyrenophora tritici-repentis Pt-1C-BFP] gi|187984054|gb|EDU49542.1| microsomal cytochrome b5 [Pyrenophora tritici-repentis Pt-1C-BFP]
  misc_feature (1)..(131): NCBI GI: 145243840 Blast Desc: An11g04370 [Aspergillus niger] gi|134079114|emb|CAK40669.1| protein product [Aspergillus niger]
  misc_feature (4)..(130): NCBI GI: 156034192 Blast Desc: SS1G_13399 [Sclerotinia sclerotiorum 1980] gi|154698802|gb|EDN98540.1| SS1G_13399 [Sclerotinia sclerotiorum 1980]
  misc_feature (4)..(133): NCBI GI: 223975217 Blast Desc: [Zea mays]
  misc_feature (2)..(87): SWISSPROT Homolog: EC 1.7.1.1 Nitrate reductase (NADH)
  misc_feature: Useful for introducing or modulating the production of volatile compounds
MADKEYTYQDVAEHNTKKDLFVVIHDKVYDCAKFVDEHPGGEEVLLDVGGQDATEAFEDVGHSDEARETLDQLLVGTLKRKPGDPEPKAVASAVAPAANTSSAGMGTALYAAVFVGGIAAYLGYNYLQQQSQKS

SEQ ID NO: 26924 - DNA, 1304 bp, Muscodor strobelii
  misc_feature: SGI EST ID NO. CUFF.63457.0
  misc_feature: Variant of the nucleotide sequence at SEQ ID NO 26922
ctgaactaagagacgaccgtgagcggcagatgcgggacggcatcttgattatttcctgtcccaatagtacctggcggagtggccaggcggctcaggttgcagggcggtaacacatgcagcatctgacagtgaccgcaatttaggccatccttcatcttcgtccctcttccaccttcttttccacgcaaccccccaattccctgattctctctcctcgcccactcgcctgtcgcttgctcacctagcccatcgtcaacaaccgccgttagcgattgatctggattttacttcgtttgttattgtttcatcctagaaaaacccaccaaaacccaaccgcaaaaatggccgacaaggagtatacctatcaagacgttgctgagcacaacactaagaaggacctgttcgtcgttatccacgataaggtctacgactgcgccaagtttgtcgacgagcaccctggtggcgaggaagtcctgttggatgtcggtggccaggatgcgaccgaggctttcgaggatgttggacacagtgacgaggcccgggaaaccctcgaccagctcctcgtcggaaccctgaagcgcaagcctggtgacccagagcccaaggctgtcgcttcggccgttgcccccgctgccaacacatcctcagcaggcatgggcacggccctgtacgccgccgtcttcgtcggtggtatcgccgcgtacctcggatacaactaccttcagcagcaatcgcagaagtcttgaagtggttctgcggcgtcgtcttttcaacaaaacacataacatgagaaatgatccgaaagcatcgcctcgcaagcaggggtgtatcacagatgacgataacccacggaaggccgcgggattgacagctcattgcctcaacagcgagatttttgtgcgtatgtgtgtgcaggaccgagaaataagctagagcgtggaaattcgatttttgcttcgggtttcgtgtgcattgtgtatttcaggcctattcgttgtcaaataccttcaaactagagctgcttacgggagggcagaggatatgcatagatacagcaaataatatgccatttcgatcaacaacatcattatctcctgtttttaagttctaatggagctatgatatcaacggcgatatgacggcaatgcagctgatatgactttcgattgccctgattgattcaaggtcaattcgtgttggcttgcttatacatgctgctttgatgatgagcagcagtgacattctgcatcaactgatcctctacctatgaaattcaacttttctctcataaaaagtcagctctg

SEQ ID NO: 26925 - DNA, 906 bp, Muscodor strobelii
  misc_feature: SGI cDNA ID NO. 569214
  misc_feature: Reduced expression when VOC is produced
  misc_feature: Encodes the peptide sequence at SEQ ID NO 26926
atgtcaagcctgtcggcggcgaagctcaacggcaacggcaagcgccttgcgcctccgtctccagccaactccaacacctcgcccacacgctccgccggctcgccctcgtccgcctcgaagcgacagaagcgcgacaatgtcatcagcatcaaggatcgcgcatccaccccgacccccgctgctgcggcagccgcggccaaggctcaagattttggcagtcatatgatgacccaactcacctacgccgtcgactacctcaaatccaagcgcgagcccaagaccctgcacgaagtcatgggccatctgaccatgaacaagctcgatcagaaggatcagaagctcttcatgactctcatgcacaagcactcccgcattaccttcatccccgacaagagcggaacgaagactggcctgccagagtgggcgcgaggccaatacgaattcaaggccaagatcccgggcgtccacaacaagacctcccttctcgagcatctgcagcagaaagtagatgcctcagccgtcgtggtcaaggacctgaaggacggctggcccgactgcgacgccgccatctccgagttggaaaccgagcacaagattctcgtggttcgcactaagaaggacaactacgcaaagtatatctggatggaccaggcccgactcaaccacaccacggacccggagttcttgtctatgtggcataagttcgaggttcctagtgtcgaggacattgtccgcaagctcacgtcggtcggacagaagccagcgagcgaggacccgagactcaagaagatcgatgcgccgaagcagcaggcgaagaagaggaagagtacgaagcctccgaagcatcagagtaattcccatatggcgcacttgctcaaggactatacgcatttgaagaggggatga

SEQ ID NO: 26926 - protein, 301 aa, Muscodor strobelii
  misc_feature: SGI Peptide ID NO. 569214
  misc_feature (19)..(300): NCBI GI: 156042207 Blast Desc: SS1G_11654 [Sclerotinia sclerotiorum 1980] gi|154696037|gb|EDN95775.1| SS1G_11654 [Sclerotinia sclerotiorum 1980]
  misc_feature (19)..(300): NCBI GI: 154298525 Blast Desc: BC1G_11447 [Botryotinia fuckeliana B05.10] gi|150858043|gb|EDN33235.1| BC1G_11447 [Botryotinia fuckeliana B05.10]
  misc_feature (72)..(300): NCBI GI: 116202543 Blast Desc: CHGG_09156 [Chaetomium globosum CBS 148.51] gi|88177674|gb|EAQ85142.1| CHGG_09156 [Chaetomium globosum CBS 148.51]
  misc_feature (52)..(300): NCBI GI: 164426610 Blast Desc: NCU03909 [Neurospora crassa OR74A] gi|16945428|emb|CAB91686.2| related to transcription initiation factor IIE, beta subunit [Neurospora crassa] [Neurospora crassa
  misc_feature (3)..(300): NCBI GI: 256733534 Blast Desc: [Nectria haematococca mpVI 77-13-4]
  misc_feature (71)..(300): NCBI GI: 46128483 Blast Desc: FG08619.1 [Gibberella zeae PH-1]
  misc_feature (72)..(300): NCBI GI: 171682000 Blast Desc: protein product [Podospora anserina] gi|170940959|emb|CAP66609.1| protein product [Podospora anserina]
  misc_feature (71)..(300): NCBI GI: 39977213 Blast Desc: MGG_06509 [Magnaporthe grisea 70-15] gi|145016064|gb|EDK00554.1| MGG_06509 [Magnaporthe grisea 70-15]
  misc_feature (48)..(300): NCBI GI: 261359537 Blast Desc: conserved [Verticillium albo-atrum VaMs.102]
  misc_feature (60)..(297): NCBI GI: 1174562 Blast Desc: T2EB_YEAST RecName: Full=Transcription initiation factor IIE subunit beta; Short=TFIIE-beta; AltName: Full=Transcription factor A small subunit; AltName: Full=Factor A
  misc_feature: Useful for introducing or modulating the production of volatile compounds
MSSLSAAKLNGNGKRLAPPSPANSNTSPTRSAGSPSSASKRQKRDNVISIKDRASTPTPAAAAAAAKAQDFGSHMMTQLTYAVDYLKSKREPKTLHEVMGHLTMNKLDQKDQKLFMTLMHKHSRITFIPDKSGTKTGLPEWARGQYEFKAKIPGVHNKTSLLEHLQQKVDASAVVVKDLKDGWPDCDAAISELETEHKILVVRTKKDNYAKYIWMDQARLNHTTDPEFLSMWHKFEVPSVEDIVRKLTSVGQKPASEDPRLKKIDAPKQQAKKRKSTKPPKHQSNSHMAHLLKDYTHLKRG

SEQ ID NO: 26927 - DNA, 1727 bp, Muscodor strobelii
  misc_feature: SGI EST ID NO. CUFF.63454.0
  misc_feature: Variant of the nucleotide sequence at SEQ ID NO 26925
gccgtcccgccacaaacgctagcagctgacgtaggtacatccgtaccctttccagcctcgtgtgctgcctgtagccctttgccctttcttcctctttcatcatccgtctcttgacgagatcgatcgccatccatccatctgcttccgacaacccacgatccttactctaccagcagatctcgccatctcagcctttctgtcgacgcaacggtcaccatgtcaagcctgtcggcggcgaagctcaacggcaacggcaagcgccttgcgcctccgtctccagccaactccaacacctcgcccacacgctccgccggctcgccctcgtccgcctcgaagcgacagaagcgcgacaatgtcatcagcatcaaggatcgcgcatccaccccgacccccgctgctgcggcagccgcggccaaggctcaagattttggcagtcatatgatgacccaactcacctacgccgtcgactacctcaaatccaagcgcgagcccaagaccctgcacgaagtcatgggccatctgaccatgaacaagctcgatcagaaggatcagaagctcttcatgactctcatgcacaagcactcccgcattaccttcatccccgacaagagcggaacgaagactggcctgccagagtgggcgcgaggccaatacgaattcaaggccaagatcccgggcgtccacaacaagacctcccttctcgagcatctgcagcagaaagtagatgcctcagccgtcgtggtcaaggacctgaaggacggctggcccgactgcgacgccgccatctccgagttggaaaccgagcacaagattctcgtggttcgcactaagaaggacaactacgcaaagtatatctggatggaccaggcccgactcaaccacaccacggacccggagttcttgtctatgtggcataagttcgaggttcctagtgtcgaggacattgtccgcaagctcacgtcggtcggacagaagccagcgagcgaggacccgagactcaagaagatcgatgcgccgaagcagcaggcgaagaagaggaagagtacgaagcctccgaagcatcagagtaattcccatatggcgcacttgctcaaggactatacgcatttgaagaggggatgatgggtcttggtggcttgcgcgcaccgcagctattactgtctgagtgattgcgatggtggtacttagcggatcgtgggtagaactgtgggtgtgaactgccagtctctgagagactgcaaaacctagccaatgacgcaacttgtcgctacggtcaaaatgctcgtaaggatggagcggacaacgggagccggcccagtgatcgtgtctatctgtgctcaggcacggagcgtatcagggagcgagagaaaagagagtaaatctttcgtggagcggatcgggaactccatttgcatatacaccggcgtttgatttatagagcggtcaggaaaagaaccccaaaaagagaaaggaggggatttctttcgtgtgcattttctcggcgtttggggtcatgggctttcacgatgtcttgatggacgatcaagatacaagagaaggcaagaggcagataggtctagcgctcaaaatacaccggtacatttatacaagatgatgaattacgcttggtgcatcgcaatgtcatatagatttgcttcggggcatttgtggtaaatgccactctgacttctctcacggagatgagataggtgatcgtggaagcttac

SEQ ID NO: 26928 - DNA, 978 bp, Muscodor strobelii
  misc_feature: SGI cDNA ID NO. 569215
  misc_feature: Encodes the peptide sequence at SEQ ID NO 26929
atgaacctcttcacagccgtcaacgacgcgctctccaccgccctagccgaagacgagaacgtcctagtcttcggcgaagacgtagccttcgggggcgtattccgctgcacaatgaaactcgtcgagtcctacggcgcagaacgagtcttcaacacgcctctcacggaacaaggaataatgggtttcggcatcggtctagcagccgaggggatgcggcccgtagccgagatccagttcgcagactacgtctacccagccttcgaccagctggtgaacgaagcagcgaaataccgataccgcgaaggccgcacgggacgctcagccggtggtctaactgtcaggatgccgtgcggaggagttggacatggggggttataccattcccaatcccccgaatctctcttcacccatatccccggattaagggtagtcatgcctcgatcccccttacaagcaaagggtctcctcctctctgcaatacgcagcaacgacccgtgtatattcatggagcccaaaatcctgtatcgcgcagcagtagaacaggtcccaaccggttcatacaccctacccctaggtaaagccgagatcctcaaagaaggttccaacgtaaccataatatcctacggccaaccgctctacacctgtcaagccgctctcgaaaaagcagaaagggacttcggcatatccatcgaattaatcgatctgcgtacaatctacccctgggacaaagccaccgtcttcaaatccgtgcagaagaccggccgctgcatggtagtccacgagtccatggtgaacgcaggagtaggcgccgagatctccgcctctatccagggcgatccggagacgttcctaagactcgaggcacccgtcgctagagtagcggggtggagcacgcatacggctcttatgtttgagaagtttaatatacctgatgttgctagagtttatgatagtattaagaaccttatagagtactag

SEQ ID NO: 26929 - protein, 325 aa, Muscodor strobelii
  misc_feature: SGI Peptide ID NO. 569215
  misc_feature (1)..(178): Pfam Id: PF02779 Pfam Desc: Transketolase, pyrimidine binding domain
  misc_feature (192)..(315): Pfam Id: PF02780 Pfam Desc: Transketolase, C-terminal domain
  misc_feature (1)..(325): NCBI GI: 85085708 Blast Desc: 2-oxoisovalerate dehydrogenase beta subunit, mitochondrial precursor [Neurospora crassa OR74A] gi|16945431|emb|CAB91689.2| 3-methyl-2-oxobutanoate dehydrogenase
  misc_feature (1)..(325): NCBI GI: 261359541 Blast Desc: 2-oxoisovalerate dehydrogenase subunit beta [Verticillium albo-atrum VaMs.102]
  misc_feature (1)..(325): NCBI GI: 171681994 Blast Desc: protein product [Podospora anserina] gi|170940956|emb|CAP66606.1| protein product [Podospora anserina]
  misc_feature (1)..(325): NCBI GI: 46128489 Blast Desc: FG08622.1 [Gibberella zeae PH-1]
  misc_feature (1)..(325): NCBI GI: 116202539 Blast Desc: conserved [Chaetomium globosum CBS 148.51] gi|88177672|gb|EAQ85140.1| conserved [Chaetomium globosum CBS 148.51]
  misc_feature (1)..(325): NCBI GI: 145608612 Blast Desc: conserved [Magnaporthe grisea 70-15] gi|145016061|gb|EDK00551.1| conserved [Magnaporthe grisea 70-15]
  misc_feature (1)..(325): NCBI GI: 156047717 Blast Desc: pyruvate dehydrogenase E1 component beta subunit [Sclerotinia sclerotiorum 1980] gi|154693943|gb|EDN93681.1| pyruvate dehydrogenase E1 component beta subunit [Sclerotinia
  misc_feature (22)..(325): NCBI GI: 154293681 Blast Desc: BC1G_14088 [Botryotinia fuckeliana B05.10] gi|150845244|gb|EDN20437.1| BC1G_14088 [Botryotinia fuckeliana B05.10]
  misc_feature (1)..(325): NCBI GI: 189201077 Blast Desc: 2-oxoisovalerate dehydrogenase subunit beta, mitochondrial precursor [Pyrenophora tritici-repentis Pt-1C-BFP] gi|187983974|gb|EDU49462.1| 2-oxoisovalerate dehydrogenase beta,
  misc_feature (1)..(325): NCBI GI: 258574823 Blast Desc: 2-oxoisovalerate dehydrogenase beta subunit [Uncinocarpus reesii 1704] gi|237901859|gb|EEP76260.1| 2-oxoisovalerate dehydrogenase beta subunit [Uncinocarpus reesii
  misc_feature (1)..(325): SWISSPROT Homolog: EC 1.2.4.4 3-methyl-2-oxobutanoate dehydrogenase (2-methylpropanoyl-transferring)
  misc_feature: Useful for introducing or modulating the production of volatile compounds
  misc_feature: Useful for fungicidal and/or biocontrol applications
MNLFTAVNDALSTALAEDENVLVFGEDVAFGGVFRCTMKLVESYGAERVFNTPLTEQGIMGFGIGLAAEGMRPVAEIQFADYVYPAFDQLVNEAAKYRYREGRTGRSAGGLTVRMPCGGVGHGGLYHSQSPESLFTHIPGLRVVMPRSPLQAKGLLLSAIRSNDPCIFMEPKILYRAAVEQVPTGSYTLPLGKAEILKEGSNVTIISYGQPLYTCQAALEKAERDFGISIELIDLRTIYPWDKATVFKSVQKTGRCMVVHESMVNAGVGAEISASIQGDPETFLRLEAPVARVAGWSTHTALMFEKFNIPDVARVYDSIKNLIEY

SEQ ID NO: 26930 - DNA, 1468 bp, Muscodor strobelii
  misc_feature: SGI EST ID NO. CUFF.63717.1
  misc_feature: Variant of the nucleotide sequence at SEQ ID NO 26928
gggattccgggcttcgttcttcacaatctctcattgttcttgcaaagttacaacagcattaactgatcaatcattaatgacatatcatgaattcataacagaaatatcacacatcaccacaaccatgagagccacccgttcacttcgtcaattgcgacagacactctccctctcatccacatccactcccttaaccacccctcagcccataatactatcccccaagagcccgtcaatactcaacccaccccccaaacgcccgactcaacctcccaaccgactattccacaactcccttactagcgcacagctcccaagccgccttaaacagcacggaactctcccccgaaataaaaaatggcacaacaaaacgcatgaacctcttcacagccgtcaacgacgcgctctccaccgccctagccgaagacgagaacgtcctagtcttcggcgaagacgtagccttcgggggcgtattccgctgcacaatgaaactcgtcgagtcctacggcgcagaacgagtcttcaacacgcctctcacggaacaaggaataatgggtttcggcatcggtctagcagccgaggggatgcggcccgtagccgagatccagttcgcagactacgtctacccagccttcgaccagctggtgaacgaagcagcgaaataccgataccgcgaaggccgcacgggacgctcagccggtggtctaactgtcaggatgccgtgcggaggagttggacatggggggttataccattcccaatcccccgaatctctcttcacccatatccccggattaagggtagtcatgcctcgatcccccttacaagcaaagggtctcctcctctctgcaatacgcagcaacgacccgtgtatattcatggagcccaaaatcctgtatcgcgcagcagtagaacaggtcccaaccggttcatacaccctacccctaggtaaagccgagatcctcaaagaaggttccaacgtaaccataatatcctacggccaaccgctctacacctgtcaagccgctctcgaaaaagcagaaagggacttcggcatatccatcgaattaatcgatctgcgtacaatctacccctgggacaaagccaccgtcttcaaatccgtgcagaagaccggccgctgcatggtagtccacgagtccatggtgaacgcaggagtaggcgccgagatctccgcctctatccagggcgatccggagacgttcctaagactcgaggcacccgtcgctagagtagcggggtggagcacgcatacggctcttatgtttgagaagtttaatatacctgatgttgctagagtttatgatagtattaagaaccttatagagtactagatagacttgtatatagtcaataaaggaagagcatgaagaagaagaagacgtcaagaatgcgtcagtgatgatcgattctcatgatatgaataagcgtgatgcctcacatatctaca

SEQ ID NO: 26931 - DNA, 2301 bp, Muscodor strobelii
  misc_feature: SGI cDNA ID NO. 569216
  misc_feature: Encodes the peptide sequence at SEQ ID NO 26932
atggcgcagtacgaggactccgatggggctgagcgccaccagaagcgctcagaaggacacaggaagaatcacaagaggcgaaaatcacgagatcatggcggaaccagtcgctcgaatcagggcctttcgatggatgcattggcccaattgaacgagttgaataccaggagcgatgcgccgatgcctacataccaacgagagcgggagagaagacaccgatcacgaccgcgacgtgaggagtatgatgagattgtggttgaggagtacgattctccgaagaaggaacggagaaagagacgcgaaagtagagagcctgatgacgaagtggtagtagaggaatacgatgccccgagaagacacagaagacagcagagtcgggacccggatcgagcacatgactcacggagaagatcccgaagacgagagggcgactacacagactacgagagcgaacctacaacgccgaggagagctaggcgacaacgtgttcgagaacaatccgattgggaagacgagcaagagagaaactttcgtgagagcgagaagagacacaagaagaggaaatccaaacgattggtctctggagccattgtcgaggagggacgagcgactcccgatctgcgaggtggtgtcggcagtaaacacagcagctacaatagtattgaggatgagaaactgcgacactataaaccgccgaaggcttacaagaaaaagaagaaatggatcatcgctggaatcgctctgctcatactcatcatcgtcatcatagtcgcagtcgtcgtaagcaagaacaacaacaaactgcccacagggaagggaggtcattcatcatcggccggtgacgatgtaccgacttatgccaaaggaacataccttgatcctgcgacatggtatgataccacggatttcaacacgacttatacgaatcagacagttggtggattgccgattgagggcttgtttgatgattatgatgactctgcgcaggcgaatgacaaagtgccggctttggatgatgattggggggattactctgatacgcctgccagaggtgttaatctcggtggttggctttcgttggaaccttttatcacgccgtcgttgtttgattacgactcaaagctgggcattattgacgagtggaccttatgttctcatctaggtgtcaggacggcctcttctacgctcgagcaacactatgcgacatttgttacagaggaaacattcaaggagatcgcagacgcaggactcgaccatgtgcgcattccgtacagctactgggcagttcagacctacgatgatgattcatatctctttcgtacgtcgtggagatacttacttcgcggcatcgagtgggcgcgcaaatacgggctacgtgttaacctagacttacatggtctgcctgggtcacaaaacggatggaaccacagcgggcgtcaaggcgcgatcggttggcttaatgggaccaacggcgaccttaacgcacagcgttccctcgacgttcatgaccggctttctaagttctttgcgcaagatcgatataaaaacatcattgcgttctacggcctagccaatgaaccgcagatgctagccttaccgccagccacggtggtgaactggacgcagactgcgtacaagctcgtcaaagacaacggtctaaaacaagcgaagatcgtgttcggagatgggtttatggggttatcgaaatggcatggcttgatgaccggacatgatgatttggtcctggacgcgcatatgtacgtcatcttcgacaataatctgatacagttcgatcaccagaagaagatcagctacgcttgtaacgactggacgacccaggcgcaggagagcatcgatacgtctaccgggtacggaccgacgatgttcgcggagtggagccaagccgatacagactgtgcgaaggacctgacgaatgtcgggtgggggaataggtggttgggcacgtataactcggggaatgtctcgagtgaggctacgagccccatgtgtccgaatctagatgatacttgtgattgtgtcgcggcgaatgcggatccggggagttatacgagcgagtataagaagttcttgcttatgtttgctgaggcgcagatgttttctttcgagaagggttggggctggtggtattggacttgggatactgaggcggcgacgcagtggagttataagaagggtcttgcggctggcatactgccgcagaaggcgtatgagagggattttaattgtgggagtgatgatattccggattttgcgggggaggggctgagtgagagttattag

SEQ ID NO: 26932 - protein, 766 aa, Muscodor strobelii
  misc_feature: SGI Peptide ID NO. 569216
  misc_feature (8)..(758): NCBI GI: 156047715 Blast Desc: SS1G_09547 [Sclerotinia sclerotiorum 1980] gi|154693942|gb|EDN93680.1| SS1G_09547 [Sclerotinia sclerotiorum 1980]
  misc_feature (68)..(766): NCBI GI: 85085713 Blast Desc: NCU03914 [Neurospora crassa OR74A] gi|16945432|emb|CAB91690.2| related to GLUCAN 1, 3-BETA-GLUCOSIDASE PRECURSOR protein [Neurospora crassa] NCU03914
  misc_feature (184)..(757): NCBI GI: 256734041 Blast Desc: NECHADRAFT_91874 [Nectria haematococca mpVI 77-13-4]
  misc_feature (118)..(764): NCBI GI: 46128491 Blast Desc: FG08623.1 [Gibberella zeae PH-1]
  misc_feature (192)..(766): NCBI GI: 39977219 Blast Desc: MGG_06512 [Magnaporthe grisea 70-15] gi|145016060|gb|EDK00550.1| MGG_06512 [Magnaporthe grisea 70-15]
  misc_feature (282)..(743): NCBI GI: 154293683 Blast Desc: BC1G_14089 [Botryotinia fuckeliana B05.10] gi|150845245|gb|EDN20438.1| BC1G_14089 [Botryotinia fuckeliana B05.10]
  misc_feature (181)..(766): NCBI GI: 171681992 Blast Desc: protein product [Podospora anserina] gi|170940955|emb|CAP66605.1| protein product [Podospora anserina]
  misc_feature (180)..(766): NCBI GI: 258574891 Blast Desc: UREG_01143 [Uncinocarpus reesii 1704] gi|237901893|gb|EEP76294.1| UREG_01143 [Uncinocarpus reesii 1704]
  misc_feature (15)..(766): NCBI GI: 169618467 Blast Desc: SNOG_12424 [Phaeosphaeria nodorum SN15] gi|111059117|gb|EAT80237.1| SNOG_12424 [Phaeosphaeria nodorum SN15]
  misc_feature (185)..(758): NCBI GI: 240105620 Blast Desc: beta-glucosidase 6 [Coccidioides posadasii C735 delta SOWgp]
  misc_feature (283)..(757): SWISSPROT Homolog: EC 3.2.1.58 Glucan 1,3-beta-glucosidase
MAQYEDSDGAERHQKRSEGHRKNHKRRKSRDHGGTSRSNQGLSMDALAQLNELNTRSDAPMPTYQRERERRHRSRPRREEYDEIVVEEYDSPKKERRKRRESREPDDEVVVEEYDAPRRHRRQQSRDPDRAHDSRRRSRRREGDYTDYESEPTTPRRARRQRVREQSDWEDEQERNFRESEKRHKKRKSKRLVSGAIVEEGRATPDLRGGVGSKHSSYNSIEDEKLRHYKPPKAYKKKKKWIIAGIALLILIIVIIVAVVVSKNNNKLPTGKGGHSSSAGDDVPTYAKGTYLDPATWYDTTDFNTTYTNQTVGGLPIEGLFDDYDDSAQANDKVPALDDDWGDYSDTPARGVNLGGWLSLEPFITPSLFDYDSKLGIIDEWTLCSHLGVRTASSTLEQHYATFVTEETFKEIADAGLDHVRIPYSYWAVQTYDDDSYLFRTSWRYLLRGIEWARKYGLRVNLDLHGLPGSQNGWNHSGRQGAIGWLNGTNGDLNAQRSLDVHDRLSKFFAQDRYKNIIAFYGLANEPQMLALPPATVVNWTQTAYKLVKDNGLKQAKIVFGDGFMGLSKWHGLMTGHDDLVLDAHMYVIFDNNLIQFDHQKKISYACNDWTTQAQESIDTSTGYGPTMFAEWSQADTDCAKDLTNVGWGNRWLGTYNSGNVSSEATSPMCPNLDDTCDCVAANADPGSYTSEYKKFLLMFAEAQMFSFEKGWGWWYWTWDTEAATQWSYKKGLAAGILPQKAYERDFNCGSDDIPDFAGEGLSESY

SEQ ID NO: 26933 - DNA, 2868 bp, Muscodor strobelii
  misc_feature: SGI EST ID NO. CUFF.63481.0
  misc_feature: Variant of the nucleotide sequence at SEQ ID NO 26931
aattgtatacatcgagttattcgatagtgccatttattttgactctccacctgatccgacgctcggggcaccgcccgatacggcatcgcgatagttgcccagtcgacaagtgttgatgcaagggaatcaaggaactacgtaattgcgcaactttgtactgcttctctcactagccaacggcgccgtaccaaagctcatggcgcagtacgaggactccgatggggctgagcgccaccagaagcgctcagaaggacacaggaagaatcacaagaggcgaaaatcacgagatcatggcggaaccagtcgctcgaatcagggcctttcgatggatgcattggcccaattgaacgagttgaataccaggagcgatgcgccgatgcctacataccaacgagagcgggagagaagacaccgatcacgaccgcgacgtgaggagtatgatgagattgtggttgaggagtacgattctccgaagaaggaacggagaaagagacgcgaaagtagagagcctgatgacgaagtggtagtagaggaatacgatgccccgagaagacacagaagacagcagagtcgggacccggatcgagcacatgactcacggagaagatcccgaagacgagagggcgactacacagactacgagagcgaacctacaacgccgaggagagctaggcgacaacgtgttcgagaacaatccgattgggaagacgagcaagagagaaactttcgtgagagcgagaagagacacaagaagaggaaatccaaacgattggtctctggagccattgtcgaggagggacgagcgactcccgatctgcgaggtggtgtcggcagtaaacacagcagctacaatagtattgaggatgagaaactgcgacactataaaccgccgaaggcttacaagaaaaagaagaaatggatcatcgctggaatcgctctgctcatactcatcatcgtcatcatagtcgcagtcgtcgtaagcaagaacaacaacaaactgcccacagggaagggaggtcattcatcatcggccggtgacgatgtaccgacttatgccaaaggaacataccttgatcctgcgacatggtatgataccacggatttcaacacgacttatacgaatcagacagttggtggattgccgattgagggcttgtttgatgattatgatgactctgcgcaggcgaatgacaaagtgccggctttggatgatgattggggggattactctgatacgcctgccagaggtgttaatctcggtggttggctttcgttggaaccttttatcacgccgtcgttgtttgattacgactcaaagctgggcattattgacgagtggaccttatgttctcatctaggtgtcaggacggcctcttctacgctcgagcaacactatgcgacatttgttacagaggaaacattcaaggagatcgcagacgcaggactcgaccatgtgcgcattccgtacagctactgggcagttcagacctacgatgatgattcatatctctttcgtacgtcgtggagatacttacttcgcggcatcgagtgggcgcgcaaatacgggctacgtgttaacctagacttacatggtctgcctgggtcacaaaacggatggaaccacagcgggcgtcaaggcgcgatcggttggcttaatgggaccaacggcgaccttaacgcacagcgttccctcgacgttcatgaccggctttctaagttctttgcgcaagatcgatataaaaacatcattgcgttctacggcctagccaatgaaccgcagatgctagccttaccgccagccacggtggtgaactggacgcagactgcgtacaagctcgtcaaagacaacggtctaaaacaagcgaagatcgtgttcggagatgggtttatggggttatcgaaatggcatggcttgatgaccggacatgatgatttggtcctggacgcgcatatgtacgtcatcttcgacaataatctgatacagttcgatcaccagaagaagatcagctacgcttgtaacgactggacgacccaggcgcaggagagcatcgatacgtctaccgggtacggaccgacgatgttcgcggagtggagccaagccgatacagactgtgcgaaggacctgacgaatgtcgggtgggggaataggtggttgggcacgtataactcggggaatgtctcgagtgaggctacgagccccatgtgtccgaatctagatgatacttgtgattgtgtcgcggcgaatgcggatccggggagttatacgagcgagtataagaagttcttgcttatgtttgctgaggcgcagatgttttctttcgagaagggttggggctggtggtattggacttgggatactgaggcggcgacgcagtggagttataagaagggtcttgcggctggcatactgccgcagaaggcgtatgagagggattttaattgtgggagtgatgatattccggattttgcgggggaggggctgagtgagagttattagagatggctctgttgttcgtctggtggtgagagagggaaagagaggtggccgtggcagtgtcgatgtctgacagttggtgtttcagtcgagtctgggctacgcccggcgtatatatttgccttgagatcagatgctggggagggatggagttgcatactggcgtgatcataatgttttgttttgcagagcgaagcaaagaacgataccacgaaggcatagggagcatcgagcatatgaaagatgtctcgttgcattgttagagcaaaactgtagaatagcatagcatgtcaccggagcaagaatgtatcatgaatgttctgatttccattaactattgctatggagtgatgatcccagagctgtacagctag

SEQ ID NO: 26934 - DNA, 2052 bp, Muscodor strobelii
  misc_feature: SGI cDNA ID NO. 569217
  misc_feature: Encodes the peptide sequence at SEQ ID NO 26935
atgcccgaagatgtaggaacaaatggggccgaggcgtcagatgctatgtcagataatgacatggaacccgacgaactcgaccaacacgacaggagcgaagacgacaagatgatcgatccgcacacttcacctgaaactggcactgagaactcaacagaggtaaaaaagaagtatgatcccaaggatcctcatcgacctcgacgtaaaaaagcaagacgggcttgttatgcctgtcagcgggcgcatttgacgtgcggagacgagcgaccttgtcttagatgcgtcaagcgtggtcttgctgatgcttgccaagatggtgtgcgaaagaaggccaagtacttgcacgatgcgcctcctgaagcccttcgtcctgtcttgggaccgaactacaatccgaatgcaacgccaaagccgacgatcagcagacaaatgtccaacggatctgtagaaccaccggtctattactcacaaagcccaaatgccccaagttaccccatgttcgcgggcggcggcccaaacagcgttggtggtgtcccagagaacgtgtcctttggcggccagcagtcgccagtcgcacctgggtttcaagccgcgaatcaccctcgacagatgaacggcataaccgtgccccaagtatcaggagaaatgccgaataatttccctgcgctgtttgatcccagtaatcctgcacttttcaattttgacctagaaggtcttaatttcggtagtcattatggtgcacttgagttcggcatattggggcatatgtcttctggtgctgcggaaacacctccaagggatgcgatagcacacggtaccggaagtgatgttggatatgggcagacgcctatgttcgctaacggcggctcccagtacaaccatcaactgtacgaccaaggcctcgtggacaattttttgaatgtcgaacagaataatgcatattcacagggcaacttgcaacacggactgccgcatgcttatgcagttgcagcagccggtcccacacctaatagcctggcaagtccagggactgataatacctccagccctcaaccccagagctacggattcgactctccaggagtcggtacttacacacccgctagctcacaatctatggcgcagcccccaaggccaaaagcaaagcccaattttaacgtgaaacttggccctcagtccatcgtcacgaaacgacgtgatgcctcatcaatctacgagactgtcaaagatccctacccgtacctaactggttttcacaacctgatcgaattcgtgcaacgaagattctctcctaaaaacactctacggatcgccaagtcccttgccagcattagaccctcgtttatcgcagtgacaaggaaccttaaccggcaggacctggtgttcatggagaagtgtcttcagcgcacgctgttcgagtacgaggactttatgggacattgctctgccccgaccatcgtgtgccgacgaactggagaggtcgcggcggtaaacaaagagttcattgcacttactggatggacaaaacccatcctgctcggaaaagaatcgaacctcaatgtgaacctgggcaagtcaggatcggaatcggggaacctgaacgggaggagcgagatgaccacgccgcggctaaagaccatgcagcctgaatcggcgatgaatgaagctgaaaggaaccaacctgtgttcatcgcgcagttcatggacgacgacagcgtgatacaattctatgaagatttcgcccagctggcttttggggatagccgcggccgtgtgacgcgaaagtgtcggctgctcaagtatcgcacgaaggagatgaatgaggctttcgccaacgagcagtcgcctaacagggcggctgggaatagtattctcagcaatcgggtgacgaagatcgatggcgaacatggcatctcgaagcttgagaaagacggaaagattgattgcaccttttgctggaccattaaacgtgatgtctttgatatacccatgcttattgttatgaattttctgccatgctactatcgcgaccacgaccagctcgcggtctag

SEQ ID NO: 26935 - protein, 683 aa, Muscodor strobelii
  misc_feature: SGI Peptide ID NO. 569217
  misc_feature (1)..(683): NCBI GI: 164426628 Blast Desc: NCU03938 [Neurospora crassa OR74A] gi|40882340|emb|CAF06162.1| related to transcriptional regulator RDS2 [Neurospora crassa] gi|157071413|gb|EAA28341.2| conserved
  misc_feature (16)..(669): NCBI GI: 116202531 Blast Desc: CHGG_09150 [Chaetomium globosum CBS 148.51] gi|88177668|gb|EAQ85136.1| CHGG_09150 [Chaetomium globosum CBS 148.51]
  misc_feature (1)..(669): NCBI GI: 11359484 Blast Desc: CHGG_09150 [Chaetomium globosum CBS 148.51] gi|88177668|gb|EAQ85136.1| CHGG_09150 [Chaetomium globosum CBS 148.51]
  misc_feature (1)..(683): NCBI GI: 256734038 Blast Desc: [Nectria haematococca mpVI 77-13-4]
  misc_feature (1)..(669): NCBI GI: 171682010 Blast Desc: protein product [Podospora anserina] gi|170940964|emb|CAP66614.1| protein product [Podospora anserina]
  misc_feature (1)..(683): NCBI GI: 46128497 Blast Desc: FG08626.1 [Gibberella zeae PH-1]
  misc_feature (11)..(673): NCBI GI: 154292622 Blast Desc: BC1G_14637 [Botryotinia fuckeliana B05.10] gi|150845851|gb|EDN21044.1| BC1G_14637 [Botryotinia fuckeliana B05.10]
  misc_feature (62)..(669): NCBI GI: 238842193 Blast Desc: transcription factor [Microsporum canis CBS 113480]
  misc_feature (29)..(673): NCBI GI: 240105786 Blast Desc: CPC735_053490 [Coccidioides posadasii C735 delta SOWgp]
  misc_feature (29)..(673): NCBI GI: 119193266 Blast Desc: CIMG_01010 [Coccidioides immitis RS]
MPEDVGTNGAEASDAMSDNDMEPDELDQHDRSEDDKMIDPHTSPETGTENSTEVKKKYDPKDPHRPRRKKARRACYACQRAHLTCGDERPCLRCVKRGLADACQDGVRKKAKYLHDAPPEALRPVLGPNYNPNATPKPTISRQMSNGSVEPPVYYSQSPNAPSYPMFAGGGPNSVGGVPENVSFGGQQSPVAPGFQAANHPRQMNGITVPQVSGEMPNNFPALFDPSNPALFNFDLEGLNFGSHYGALEFGILGHMSSGAAETPPRDAIAHGTGSDVGYGQTPMFANGGSQYNHQLYDQGLVDNFLNVEQNNAYSQGNLQHGLPHAYAVAAAGPTPNSLASPGTDNTSSPQPQSYGFDSPGVGTYTPASSQSMAQPPRPKAKPNFNVKLGPQSIVTKRRDASSIYETVKDPYPYLTGFHNLIEFVQRRFSPKNTLRIAKSLASIRPSFIAVTRNLNRQDLVFMEKCLQRTLFEYEDFMGHCSAPTIVCRRTGEVAAVNKEFIALTGWTKPILLGKESNLNVNLGKSGSESGNLNGRSEMTTPRLKTMQPESAMNEAERNQPVFIAQFMDDDSVIQFYEDFAQLAFGDSRGRVTRKCRLLKYRTKEMNEAFANEQSPNRAAGNSILSNRVTKIDGEHGISKLEKDGKIDCTFCWTIKRDVFDIPMLIVMNFLPCYYRDHDQLAV

SEQ ID NO: 26936 - DNA, 5006 bp, Muscodor strobelii
  misc_feature: SGI EST ID NO. CUFF.63496.0
  misc_feature: Variant of the nucleotide sequence at SEQ ID NO 26934
gcggctttttggccttacataccaagacccgttaaacttcagctagactcccagccgtgagggtcataattcgcgccaccaggattttccattgggccagaaccacaactacggctaacttgattcgccctccgcaattttccacgttcattttcctggcccgccaggttcatctttggtcaagtgctgctcagtgctgacttcattctttggaaccttcgtctatcccacttgcccaccttctccctctggtcttgacgttgcgtttgcgactctgttgtcgaatctcacaccctctaagtgctacgccctcgatgcattgtgtagtaatactgtaaggcctgtaatcgcagccattgactgcagcaacagggccaggagtcgcgaagaagtgcgaatcatcgctgaagaccccggtctcacatcccaccttttgcatttgcatcttctccatatgcctcatattgcaatgtcttgactgcctatacgtctgtctcgattcacacccactctccactcttacaacgccggcacatagacaatttgtatagagacgcacgtcttttgcattttgcctcatattaccttatatgtacattgacttgcggtcgccgaccacacacccgtctgcacctccttaggcctagatcgccttgtccgcagagttgacctcgcctcgacatcattgtcccccgtcaactcactgctctcgtttttactctctctcaccgcggtcttctacttgatcctgcatccaatgcgaactgcttcagaggtcccggctagctgcaggagcatagatcatcccgcatatcaccccagccagactcctcagtgccttatccgtcgccgggtttgtccctgagagtattgattctgcgcttccgctctagcggcccgtccccgtctccgtcccaaaagccctagccattgcttctggacaggacaaatcttcttttgctgacccccgcgatctgtactaacggcgcccgtccagtcgtcttgcccgttcccagcgccccagaattctgtcgcacaggaaacgcctctttgggcacgggagggccgcccattggcgtctacccttactgcccttgccaaccacgttgaatacgagcagttcattgttgtcgcatcccgtgaggcctgcggcagcctactctctgaccacacgccctgtgattactcgggctgttggcggttgttgcacagcgaaagtacatagcaccagactgtacacgagctgtccacgtctcacgtacgcgctaacaatagcttgacgctattctggctattttcatattcagctttagttgaacttattggtacacgcttgtctgaaataatcgtcactggctggccaccccagaccccagacttacatctcatctaggtgtaaagagcggtggacctttcaatagaagagcccggaaatctggtagcgatatcgccctgcaccttgtggtgacattgccgcagaaactcgcaagctggtactttcagggaagtgtggttacccaaagcgaaccgggggcttactggtgatctgctggcacgctggtagcagcccaacaatttcatataaaaccaggacaggatgcccgaagatgtaggaacaaatggggccgaggcgtcagatgctatgtcagataatgacatggaacccgacgaactcgaccaacacgacaggagcgaagacgacaagatgatcgatccgcacacttcacctgaaactggcactgagaactcaacagaggtaaaaaagaagtatgatcccaaggatcctcatcgacctcgacgtaaaaaagcaagacgggcttgttatgcctgtcagcgggcgcatttgacgtgcggagacgagcgaccttgtcttagatgcgtcaagcgtggtcttgctgatgcttgccaagatggtgtgcgaaagaaggccaagtacttgcacgatgcgcctcctgaagcccttcgtcctgtcttgggaccgaactacaatccgaatgcaacgccaaagccgacgatcagcagacaaatgtccaacggatctgtagaaccaccggtctattactcacaaagcccaaatgccccaagttaccccatgttcgcgggcggcggcccaaacagcgttggtggtgtcccagagaacgtgtcctttggcggccagcagtcgccagtcgcacctgggtttcaagccgcgaatcaccctcgacagatgaacggcataaccgtgccccaagtatcaggagaaatgccgaataatttccctgcgctgtttgatcccagtaatcctgcacttttcaattttgacctagaaggtcttaatttcggtagtcattatggtgcacttgagttcggcatattggggcatatgtcttctggtgctgcggaaacacctccaagggatgcgatagcacacggtaccggaagtgatgttggatatgggcagacgcctatgttcgctaacggcggctcccagtacaaccatcaactgtacgaccaaggcctcgtggacaattttttgaatgtcgaacagaataatgcatattcacagggcaacttgcaacacggactgccgcatgcttatgcagttgcagcagccggtcccacacctaatagcctggcaagtccagggactgataatacctccagccctcaaccccagagctacggattcgactctccaggagtcggtacttacacacccgctagctcacaatctatggcgcagcccccaaggccaaaagcaaagcccaattttaacgtgaaacttggccctcagtccatcgtcacgaaacgacgtgatgcctcatcaatctacgagactgtcaaagatccctacccgtacctaactggttttcacaacctgatcgaattcgtgcaacgaagattctctcctaaaaacactctacggatcgccaagtcccttgccagcattagaccctcgtttatcgcagtgacaaggaaccttaaccggcaggacctggtgttcatggagaagtgtcttcagcgcacgctgttcgagtacgaggactttatgggacattgctctgccccgaccatcgtgtgccgacgaactggagaggtcgcggcggtaaacaaagagttcattgcacttactggatggacaaaacccatcctgctcggaaaagaatcgaacctcaatgtgaacctgggcaagtcaggatcggaatcggggaacctgaacgggaggagcgagatgaccacgccgcggctaaagaccatgcagcctgaatcggcgatgaatgaagctgaaaggaaccaacctgtgttcatcgcgcagttcatggacgacgacagcgtgatacaattctatgaagatttcgcccagctggcttttggggatagccgcggccgtgtgacgcgaaagtgtcggctgctcaagtatcgcacgaaggagatgaatgaggctttcgccaacgagcagtcgcctaacagggcggctgggaatagtattctcagcaatcgggtgacgaagatcgatggcgaacatggcatctcgaagcttgagaaagacggaaagattgattgcaccttttgctggaccattaaacgtgatgtctttgatatacccatgcttattgttatgaattttctgccatgctactatcgcgaccacgaccagctcgcggtctagttctggcccttagcctacctcataccctttacgttactcgctatatcgtttttatctatagattcggcaatggtcgtatataccaggcatataggattcatctgtcaagatgtcatgcatgggcggcgttctggatgaggggccccacggttttggcccctactcctgatttgtaggagctggtcatcattccatgtattctcccgatttttccacatcgcctctatgaggtatagacgtgcccttgcgcacatgactctatatatgcatgacggtcctcggaccaaaaacaaccgaagatcctgccaccaagttggctgtgccattgtctcatgttgatttctctatgccagctgaaacgatgccatctaaacgccttgtgatctttatctcgccaccccgtctatgatctaatactctcatcttcagcctgttctcaatggtttgtataccgacccccggtatctatatactatcatctaagctaataaaagccttttaagactgcaaaccacccgctatagccatcatcaaaatacctaaatcacatgatcccgtcactctcactcccttttgtcaccgtgttcatcgtatcaaccaagacccatcgaaactccccttcttacccccaaccacaccctggctcggggtccaagcctcgcgtgcgacgctttgtcgcgcaacatcgcagtcgatgtgtatatcctggatcaaagcatcgagatcatcatagttcttctcgtcgcggacgtagcccatgatgaggagccgcatcggcgcatcgtagaaatctgccttgaaagagtgtaggacgtggacttctgcggaccggactgaattgttgtagaaggggttgtagcctattgacatgaccatggggtatatttgataggttggtgcgtcggaggtggtggagtcgggatgtgagggaggtagggcaagggacgcccagccgaagtacacgcctgagcggacagattcgatccagggtgtgattgaggagtcgactggcagattggcggttgggatcccgagttcttttgaaccccggccgaatccggatattactgtgccttccatttgtaagggatatggagactcgggacctgagtcggcgtagaggattcgtggtctgtcggccattttgagggaattatttgaccggtggttggatggttcaatggcagtaagatggatgtgtgtcgtgtgagatatgagttgttggtggcttggtgatggtgttttgatattgggttaagtaaacagtggtagttggcgcattgcaatgggagcgtcgggatgggatggcggggtcccgacgatggtggaagctcggagagctcgagggtgggatgga

SEQ ID NO: 26937 - DNA, 2058 bp, Muscodor strobelii
  misc_feature: SGI cDNA ID NO. 569218
  misc_feature: Encodes the peptide sequence at SEQ ID NO 26938
atgcccgaagatgtaggaacaaatggggccgaggcgtcagatgctatgtcagataatgacatggaacccgacgaactcgaccaacacgacaggagcgaagacgacaagatgatcgatccgcacacttcacctgaaactggcactgagaactcaacagaggtaaaaaagaagtatgatcccaaggatcctcatcgacctcgacgtaaaaaagcaagacgggcttgttatgcctgtcagcgggcgcatttgacgtgcggagacgagcgaccttgtcttagatgcgtcaagcgtggtcttgctgatgcttgccaagatggtgtgcgaaagaaggccaagtacttgcacgatgcgcctcctgaagcccttcgtcctgtcttgggaccgaactacaatccgaatgcaacgccaaagccgacgatcagcagacaaatgtccaacggatctgtagaaccaccggtctattactcacaaagcccaaatgccccaagttaccccatgttcgcgggcggcggcccaaacagcgttggtggtgtcccagagaacgtgtcctttggcggccagcagtcgccagtcgcacctgggtttcaagccgcgaatcaccctcgacagatgaacggcataaccgtgccccaagtatcaggagaaatgccgaataatttccctgcgctgtttgatcccagtaatcctgcacttttcaattttgacctagaaggtcttaatttcggtagtcattatggtgcacttgagttcggcatattggggcatatgtcttctggtgctgcggaaacacctccaagggatgcgatagcacacggtaccggaagtgatgttggatatgggcagacgcctatgttcgctaacggcggctcccagtacaaccatcaactgtacgaccaaggcctcgtggacaattttttgaatgtcgaacagaataatgcatattcacagggcaacttgcaacacggactgccgcatgcttatgcagttgcagcagccggtcccacacctaatagcctggcaagtccagggactgataatacctccagccctcaaccccagagctacggattcgactctccaggagtcggtacttacacacccgctagctcacaatctatggcgcagcccccaaggccaaaagcaaagcccaattttaacgtgaaacttggccctcagtccatcgtcacgaaacgacgtgatgcctcatcaatctacgagactgtcaaagatccctacccgtacctaactggttttcacaacctgatcgaattcgtgcaacgaagattctctcctaaaaacactctacggatcgccaagtcccttgccagcattagaccctcgtttatcgcagtgacaaggaaccttaaccggcaggacctggtgttcatggagaagtgtcttcagcgcacgctgttcgagtacgaggactttatgggacattgctctgccccgaccatcgtgtgccgacgaactggagaggtcgcggcggtaaacaaagagttcattgcacttactggatggacaaaacccatcctgctcggaaaagaatcgaacctcaatgtgaacctgggcaagtcaggatcggaatcggggaacctgaacgggaggagcgagatgaccacgccgcggctaaagaccatgcagcctgaatcggcgatgaatgaagctgaaaggaaccaacctgtgttcatcgcgcagttcatggacgacgacagcgtgatacaattctatgaagatttcgcccagctggcttttggggatagccgcggccgtgtgacgcgaaagtgtcggctgctcaagtatcgcacgaaggagatgaatgaggctttcgccaacgagcagtcgcctaacagggcggctgggaatagtattctcagcaatcgggtgacgaagatcgatggcgaacatggcatctcgaagcttgagaaagacggaaagattgattgcaccttttgctggaccattaaacgtgatgtctttgatatacccatgcttattgttatgaatgttagttccactcccactctgttgcttcccttcctcctgactactgggtag

SEQ ID NO: 26938 - protein, 685 aa, Muscodor strobelii
  misc_feature: SGI Peptide ID NO. 569218
  misc_feature (16)..(672): NCBI GI: 116202531 Blast Desc: CHGG_09150 [Chaetomium globosum CBS 148.51] gi|88177668|gb|EAQ85136.1| CHGG_09150 [Chaetomium globosum CBS 148.51]
  misc_feature (1)..(671): NCBI GI: 11359484 Blast Desc: CHGG_09150 [Chaetomium globosum CBS 148.51] gi|88177668|gb|EAQ85136.1| CHGG_09150 [Chaetomium globosum CBS 148.51]
  misc_feature (1)..(669): NCBI GI: 164426628 Blast Desc: NCU03938 [Neurospora crassa OR74A] gi|40882340|emb|CAF06162.1| related to transcriptional regulator RDS2 [Neurospora crassa] gi|157071413|gb|EAA28341.2| conserved
  misc_feature (1)..(670): NCBI GI: 171682010 Blast Desc: protein product [Podospora anserina] gi|170940964|emb|CAP66614.1| protein product [Podospora anserina]
  misc_feature (1)..(669): NCBI GI: 256734038 Blast Desc: [Nectria haematococca mpVI 77-13-4]
  misc_feature (1)..(669): NCBI GI: 46128497 Blast Desc: FG08626.1 [Gibberella zeae PH-1]
  misc_feature (11)..(669): NCBI GI: 154292622 Blast Desc: BC1G_14637 [Botryotinia fuckeliana B05.10] gi|150845851|gb|EDN21044.1| BC1G_14637 [Botryotinia fuckeliana B05.10]
  misc_feature (62)..(669): NCBI GI: 238842193 Blast Desc: transcription factor [Microsporum canis CBS 113480]
  misc_feature (29)..(669): NCBI GI: 240105786 Blast Desc: CPC735_053490 [Coccidioides posadasii C735 delta SOWgp]
  misc_feature (29)..(669): NCBI GI: 119193266 Blast Desc: CIMG_01010 [Coccidioides immitis RS]
MPEDVGTNGAEASDAMSDNDMEPDELDQHDRSEDDKMIDPHTSPETGTENSTEVKKKYDPKDPHRPRRKKARRACYACQRAHLTCGDERPCLRCVKRGLADACQDGVRKKAKYLHDAPPEALRPVLGPNYNPNATPKPTISRQMSNGSVEPPVYYSQSPNAPSYPMFAGGGPNSVGGVPENVSFGGQQSPVAPGFQAANHPRQMNGITVPQVSGEMPNNFPALFDPSNPALFNFDLEGLNFGSHYGALEFGILGHMSSGAAETPPRDAIAHGTGSDVGYGQTPMFANGGSQYNHQLYDQGLVDNFLNVEQNNAYSQGNLQHGLPHAYAVAAAGPTPNSLASPGTDNTSSPQPQSYGFDSPGVGTYTPASSQSMAQPPRPKAKPNFNVKLGPQSIVTKRRDASSIYETVKDPYPYLTGFHNLIEFVQRRFSPKNTLRIAKSLASIRPSFIAVTRNLNRQDLVFMEKCLQRTLFEYEDFMGHCSAPTIVCRRTGEVAAVNKEFIALTGWTKPILLGKESNLNVNLGKSGSESGNLNGRSEMTTPRLKTMQPESAMNEAERNQPVFIAQFMDDDSVIQFYEDFAQLAFGDSRGRVTRKCRLLKYRTKEMNEAFANEQSPNRAAGNSILSNRVTKIDGEHGISKLEKDGKIDCTFCWTIKRDVFDIPMLIVMNVSSTPTLLLPFLLTTG

SEQ ID NO: 26939 - DNA, 5006 bp, Muscodor strobelii; identical to SEQ ID NO: 26936
  misc_feature: SGI EST ID NO. CUFF.63496.0
  misc_feature: Variant of the nucleotide sequence at SEQ ID NO 26937

SEQ ID NO: 26940 - DNA, 558 bp, Muscodor strobelii
  misc_feature: SGI cDNA ID NO. 569219
  misc_feature: Encodes the peptide sequence at SEQ ID NO 26941
atggccgacagaccacgaatcctctacgccgactcaggtcccgagtctccatatcccttacaaatggaaggcacagtaatatccggattcggccggggttcaaaagaactcgggatcccaaccgccaatctgccagtcgactcctcaatcacaccctggatcgaatctgtccgctcaggcgtgtacttcggctgggcgtcccttgccctacctccctcacatcccgactccaccacctccgacgcaccaacctatcaaatataccccatggtcatgtcaataggctacaaccccttctacaacaattcagtccggtccgcagaagtccacgtcctacactctttcaaggcagatttctacgatgcgccgatgcggctcctcatcatgggctacgtccgcgacgagaagaactatgatgatctcgatgctttgatccaggatatacacatcgactgcgatgttgcgcgacaaagcgtcgcacgcgaggcttggaccccgagccagggtgtggttgggggtaagaaggggagtttcgatgggtcttggttgatacgatga

SEQ ID NO: 26941 - protein, 185 aa, Muscodor strobelii
  misc_feature: SGI Peptide ID NO. 569219
  misc_feature (18)..(160): Pfam Id: PF01687 Pfam Desc: Riboflavin kinase
  misc_feature (1)..(185): NCBI GI: 256733529 Blast Desc: NECHADRAFT_99626 [Nectria haematococca mpVI 77-13-4]
  misc_feature (1)..(185): NCBI GI: 46128499 Blast Desc: FG08627.1 [Gibberella zeae PH-1]
  misc_feature (4)..(185): NCBI GI: 158514197 Blast Desc: FG08627.1 [Gibberella zeae PH-1]
  misc_feature (3)..(185): NCBI GI: 116202529 Blast Desc: CHGG_09149 [Chaetomium globosum CBS 148.51] gi|88177667|gb|EAQ85135.1| CHGG_09149 [Chaetomium globosum CBS 148.51]
  misc_feature (22)..(185): NCBI GI: 145615850 Blast Desc: MGG_11073 [Magnaporthe grisea 70-15] gi|145023067|gb|EDK06674.1| MGG_11073 [Magnaporthe grisea 70-15]
  misc_feature (1)..(185): NCBI GI: 170099926 Blast Desc: [Laccaria bicolor S238N-H82] gi|164643860|gb|EDR08111.1| [Laccaria bicolor S238N-H82]
  misc_feature (3)..(185): NCBI GI: 158517787 Blast Desc: [Laccaria bicolor S238N-H82] gi|164643860|gb|EDR08111.1| [Laccaria bicolor S238N-H82]
  misc_feature (3)..(164): NCBI GI: 74611259 Blast Desc: RIFK_NEUCR RecName: Full=Riboflavin kinase; AltName: Full=Flavin mononucleotide kinase 1 gi|40882315|emb|CAF06137.1| conserved [Neurospora crassa]
  misc_feature (3)..(164): NCBI GI: 85085950 Blast Desc: NCU03970 [Neurospora crassa OR74A] gi|28918702|gb|EAA28373.1| NCU03970 [Neurospora crassa OR74A]
  misc_feature (4)..(174): NCBI GI: 154292620 Blast Desc: BC1G_14636 [Botryotinia fuckeliana B05.10] gi|150845850|gb|EDN21043.1| BC1G_14636 [Botryotinia fuckeliana B05.10]
  misc_feature (4)..(185): SWISSPROT Homolog: EC 2.7.1.26 Riboflavin kinase
MADRPRILYADSGPESPYPLQMEGTVISGFGRGSKELGIPTANLPVDSSITPWIESVRSGVYFGWASLALPPSHPDSTTSDAPTYQIYPMVMSIGYNPFYNNSVRSAEVHVLHSFKADFYDAPMRLLIMGYVRDEKNYDDLDALIQDIHIDCDVARQSVAREAWTPSQGVVGGKKGSFDGSWLIR

SEQ ID NO: 26942 - DNA, 2217 bp, Muscodor strobelii
  misc_feature: SGI cDNA ID NO. 569220
  misc_feature: Encodes the peptide sequence at SEQ ID NO 26943
atggagtggtccgacaacaagacctcgttcaaactctacgtcctggccgctggtttagtagatgtttggttcctctggacacagattgatatgatcaagatcctcatcgtactcatctgtccaggctttgttttcgctatattcagcggcatgaggatatatcagctcttgagcgaacaaggaaagcgccatattgagttgatgcgagatggtctgaccaacgggataatattggagggacaagccgacgatgcagttcaattgagacccttgttctttgggtctggaaaagaccgcgagctcatcctgaacgtagagatcagccagccatacttcaagaacttgaagtcggcaaagggaaatgaaataccagtcgacatcgaagcgagtattgaggacttgctcgttgagctgcacagatacaatatgattggtagcaacattttcatggtatcacaactagcaataacctcgcagagcgctgaatgggagcggccgtcttcattgtcgacctcttcggatgaaactgtttctgtaatggagagatggtttaaagaatgcacaacaaagcatgcacaatgcatcaaccgccctgggaaagaaccctggtatccgacacgactgctagacgtcgggacgagaggcgttgatggtataagtgtcgatcgttgccaattgatacatggcaacgaggtcgtagcaggagagcgatatatgacattgagccaccgctggggaagttacgcgattgcgaaactgacgatggctactatcgatgtctggcgcaaagcgctgccccttagaatcttgtcgaagacgtttcaggatttcatttggttatcaaggcggatgcatattcgatacgtctggattgactctctttgcattatccaagagggagacaacggtgtcgattggaacaaggaagcaccgactatggctgatgtttatacaaacgcattctgcaatatctcagccgactgggccaacgaaaagagcggcttatttttcgatcgagacccaaaagacttcgacgttccccttctcgatttgaagattgatgctgatggggaagagttgatcgagcagatggtgattatcgatggccctgcggctgggttttggaatgaccaagtcacacattcccctctgaacagaagagcttgggtactacaggagcgattactctcttgtcgaaatctacacttctgcccgcaagaggtgctatttgaatgctgcgaaaccgcagcatgcgaaaggtatcctgaaggtctcccgttgccggaattttccggtgatgcgccactccctaagatatttgaatggtcaaaggacaatacctatgtcgactcgttaacagaaaggtggaaatatgccgattcccgatcacagaccgcgcataatatttggaccgacattgtcacaaaatattctagctgtcagcttaccttcagttcggacaagcccatcgcagtagcgggtttagcaagatattttgaggcagtgcgagacgaaagatacatagcagggctatgggcgaagaatatcgccgctgagatggcgtggcatcgctcatgggtcaacccccgcgttcatgattttcagcggaatgtggcagtcgcgactcagtcgaagcaaagctcaggcgcttacagggcaccaagtttctcatgggccgcaactgacttccccgtcacagccgcagattccttagctcgaggaatcttgccacacgtgcagtgcatcgagtatcgttcgagtctcaaagaaacgacacacccgataacaaggagcatatttggcccgctttcgagccctgctgttgaattgcaggtaataggtttcttgaagcgaacaaagttacagaaacttgaatcaagagttttcgccgttccatttacagagcgtgggactgtccaactctggccagtgaatctagatacagtcgccgacaccgaggatatcaaacatctggaagggagaacactgtactacatgccttggcagattgacgatgagtctgatgttcctaagttcgtcgcaatcttctttgagctggaaagtcgagaaatggcacggtttcgaagaataggtataatgcgttctgaacaagggccgttgaaggagctgtatatgcgagcgcaggaaggggagtctgatttgccatgtcagagttatgataaggaagcaaagaaacacacaatttatgtcgtgtag

SEQ ID NO: 26943 - protein, 738 aa, Muscodor strobelii
  misc_feature: SGI Peptide ID NO. 569220
  misc_feature (238)..(393): Pfam Id: PF06985 Pfam Desc: Heterokaryon incompatibility protein (HET)
  misc_feature (238)..(326): Pfam Id: PF06985 Pfam Desc: Heterokaryon incompatibility protein (HET)
  misc_feature (151)..(674): NCBI GI: 256720581 Blast Desc: NECHADRAFT_85412 [Nectria haematococca mpVI 77-13-4]
  misc_feature (161)..(562): NCBI GI: 145242594 Blast Desc: An09g05610 [Aspergillus niger] gi|134078422|emb|CAL00837.1| protein product [Aspergillus niger]
  misc_feature (170)..(589): NCBI GI: 261358551 Blast Desc: conserved [Verticillium albo-atrum VaMs.102]
  misc_feature (170)..(571): NCBI GI: 256728738 Blast Desc: NECHADRAFT_85988 [Nectria haematococca mpVI 77-13-4]
  misc_feature (170)..(568): NCBI GI: 154291024 Blast Desc: BC1G_15400 [Botryotinia fuckeliana B05.10] gi|150847129|gb|EDN22322.1| BC1G_15400 [Botryotinia fuckeliana B05.10]
  misc_feature (165)..(715): NCBI GI: 225558616 Blast Desc: HET domain-containing protein [Ajellomyces capsulatus G186AR]
  misc_feature (171)..(560): NCBI GI: 256724492 Blast Desc: NECHADRAFT_88127 [Nectria haematococca mpVI 77-13-4]
  misc_feature (165)..(632): NCBI GI: 154286502 Blast Desc: [Ajellomyces capsulatus NAm1] gi|150407687|gb|EDN03228.1| [Ajellomyces capsulatus NAm1]
  misc_feature (172)..(625): NCBI GI: 256732304 Blast Desc: NECHADRAFT_80764 [Nectria haematococca mpVI 77-13-4]
  misc_feature (172)..(560): NCBI GI: 256728185 Blast Desc: NECHADRAFT_24038 [Nectria haematococca mpVI 77-13-4]
MEWSDNKTSFKLYVLAAGLVDVWFLWTQIDMIKILIVLICPGFVFAIFSGMRIYQLLSEQGKRHIELMRDGLTNGIILEGQADDAVQLRPLFFGSGKDRELILNVEISQPYFKNLKSAKGNEIPVDIEASIEDLLVELHRYNMIGSNIFMVSQLAITSQSAEWERPSSLSTSSDETVSVMERWFKECTTKHAQCINRPGKEPWYPTRLLDVGTRGVDGISVDRCQLIHGNEVVAGERYMTLSHRWGSYAIAKLTMATIDVWRKALPLRILSKTFQDFIWLSRRMHIRYVWIDSLCIIQEGDNGVDWNKEAPTMADVYTNAFCNISADWANEKSGLFFDRDPKDFDVPLLDLKIDADGEELIEQMVIIDGPAAGFWNDQVTHSPLNRRAWVLQERLLSCRNLHFCPQEVLFECCETAACERYPEGLPLPEFSGDAPLPKIFEWSKDNTYVDSLTERWKYADSRSQTAHNIWTDIVTKYSSCQLTFSSDKPIAVAGLARYFEAVRDERYIAGLWAKNIAAEMAWHRSWVNPRVHDFQRNVAVATQSKQSSGAYRAPSFSWAATDFPVTAADSLARGILPHVQCIEYRSSLKETTHPITRSIFGPLSSPAVELQVIGFLKRTKLQKLESRVFAVPFTERGTVQLWPVNLDTVADTEDIKHLEGRTLYYMPWQIDDESDVPKFVAIFFELESREMARFRRIGIMRSEQGPLKELYMRAQEGESDLPCQSYDKEAKKHTIYVV

SEQ ID NO: 26944 - DNA, 1902 bp, Muscodor strobelii
  misc_feature: SGI cDNA ID NO. 569221
  misc_feature: Elevated expression when VOC is produced
  misc_feature: Encodes the peptide sequence at SEQ ID NO 26945
atgcgtaccctgccggcaagggcgctggctggtcgccgcatccagggcgttgttgcaagagcagttggtttcttcacccatcatctacagaactggagattccgttaccgaaccttgccaagtttcaacgacgatttgcctgatacaacttggcgcaagattaagcatcaccaaaagctcctatcgaatcgaagaatcatgattcctgtgtcgctactgctgttggttgggagcatcagtgccattgcaatccgttctacgtctttatcaactaatcagtatccgttgctccgaaatgcttctatcgaatcccttgggcagggcctagattcgaggatgttcacaagtgtcgaactcgtgcaggtcatcaaatggataaagatgtcttcagttactattttcgaaagcggcccttgtagaatcgactatgctgacagttcacgacgcaaggcatacctcgcccggatacacgaagtcaacgataccgttcatgccgtaactgagattaatccggacgcgcttgaaatagcggctgatttagacacccaacgacagctgggtaccgttcgaggcccgctacatggaataccagttctgttgaagaataatatagctacttttgaccgtatggatacaacatccggatcctgggctctcgtcgggtctaaaacaccagttgatgctacagtcgtaagtaaactacggagctccggcgttattatcttagggaaaacgagcatttctcagtgggcgaagtttcggtccagcaactcaagtaacggctggtctgccgtaggtggccaggtatatggtccttttgtgcccgggcaggacccatggggcagttctagtggtagtgcagtagcttctacacttggactggctgttggagctctgggtacggaaactgacggctccatcaccggaccggcttcgttcaatggcgtcgttggaatcaagccaactatgggcttgacgtcccgacacctcgtgattcctgtaagcgagcaccaggacaccgtagggccgttgactagaacggtaaaagatgcagcgtacattcttcaagccatttccggtgtagatccacacgataactacacaaatgccattcctcacctgacgatgccggactacgccgctgcgtgtaatctgactgctatatctggcttacgaatcggggtccctaggaatgtcctggcaataaaatcgaacaacttgaccgacccgataattacccaattcgagcaggctactcaccgtctggcctccatgggtgctgtgattgtcaacaccacgttcccagcagcagaagaattggagaactccgacattcctaggcagatagagatagcagattttgcggtaaacttgaaaacgtatctcgacagtctgatagtaaatccgaataatatcacgtcacttgccgatctccgtaacttcacgcagcattcgcctctcgaggactatccggagcgtgacacagccatgtgggacaaggctttggaaagctggaacaatacagacccaagattctggccaatgtaccaacatgcactctactatggagacgaaggcggtctgcttggtgccattcgccgggacaatctagatgcggtggcgctccctgcgcatgtttcttcgacctacgccgctgcagttggggcgcccatcgtgactgttcccctagatttctatcctgatgataccccggtcttccataattcttggggcttgattgacgcagccccacgtatgccatttggtatcgctttcctgggagacaggttcacagaagaaaagctcataagcattgcttatgcttatgagcagttgacaaaggctatagataaagtccaaccatatattttgccgacaacggaattgcgtgatgttgtgtaa

SEQ ID NO: 26945 - protein, 633 aa, Muscodor strobelii
  misc_feature: SGI Peptide ID NO. 569221
  misc_feature (147)..(603): Pfam Id: PF01425 Pfam Desc: Amidase
  misc_feature (147)..(439): Pfam Id: PF01425 Pfam Desc: Amidase
  misc_feature (93)..(633): NCBI GI: 189201323 Blast Desc: glutamyl-tRNA(Gln) amidotransferase subunit A [Pyrenophora tritici-repentis Pt-1C-BFP] gi|187984097|gb|EDU49585.1| glutamyl-tRNA(Gln) amidotransferase A
  misc_feature (93)..(633): NCBI GI: 238837925 Blast Desc: amidase [Microsporum canis CBS 113480]
  misc_feature (75)..(633): NCBI GI: 225555498 Blast Desc: amidase [Ajellomyces capsulatus G186AR]
  misc_feature (94)..(629): NCBI GI: 70997715 Blast Desc: amidase [Aspergillus fumigatus Af293] gi|66851230|gb|EAL91556.1| amidase, [Aspergillus fumigatus Af293] gi|159126673|gb|EDP51789.1| amidase, [Aspergillus fumigatus
  misc_feature (75)..(633): NCBI GI: 240273757 Blast Desc: amidase [Ajellomyces capsulatus H143]
  misc_feature (95)..(633): NCBI GI: 121713462 Blast Desc: amidase, [Aspergillus clavatus NRRL 1] gi|119402495|gb|EAW12916.1| amidase, [Aspergillus clavatus NRRL 1]
  misc_feature (155)..(629): NCBI GI: 240108933 Blast Desc: Amidase family protein [Coccidioides posadasii C735 delta SOWgp]
  misc_feature (93)..(630): NCBI GI: 258572490 Blast Desc: conserved [Uncinocarpus reesii 1704] gi|237905277|gb|EEP79678.1| conserved [Uncinocarpus reesii 1704]
  misc_feature (151)..(623): NCBI GI: 145249428 Blast Desc: An14g04290 [Aspergillus niger] gi|134081732|emb|CAK48521.1| protein product [Aspergillus niger]
  misc_feature (93)..(633): NCBI GI: 171695870 Blast Desc: protein product [Podospora anserina] gi|170948177|emb|CAP60341.1| protein product [Podospora anserina]
  misc_feature (90)..(623): SWISSPROT Homolog: EC 3.5.1.4 Amidase
  misc_feature: Useful for introducing or modulating the production of volatile compounds
MRTLPARALAGRRIQGVVARAVGFFTHHLQNWRFRYRTLPSFNDDLPDTTWRKIKHHQKLLSNRRIMIPVSLLLLVGSISAIAIRSTSLSTNQYPLLRNASIESLGQGLDSRMFTSVELVQVIKWIKMSSVTIFESGPCRIDYADSSRRKAYLARIHEVNDTVHAVTEINPDALEIAADLDTQRQLGTVRGPLHGIPVLLKNNIATFDRMDTTSGSWALVGSKTPVDATVVSKLRSSGVIILGKTSISQWAKFRSSNSSNGWSAVGGQVYGPFVPGQDPWGSSSGSAVASTLGLAVGALGTETDGSITGPASFNGVVGIKPTMGLTSRHLVIPVSEHQDTVGPLTRTVKDAAYILQAISGVDPHDNYTNAIPHLTMPDYAAACNLTAISGLRIGVPRNVLAIKSNNLTDPIITQFEQATHRLASMGAVIVNTTFPAAEELENSDIPRQIEIADFAVNLKTYLDSLIVNPNNITSLADLRNFTQHSPLEDYPERDTAMWDKALESWNNTDPRFWPMYQHALYYGDEGGLLGAIRRDNLDAVALPAHVSSTYAAAVGAPIVTVPLDFYPDDTPVFHNSWGLIDAAPRMPFGIAFLGDRFTEEKLISIAYAYEQLTKAIDKVQPYILPTTELRDVV

SEQ ID NO: 26946 - DNA, 1716 bp, Muscodor strobelii
  misc_feature: SGI EST ID NO. CUFF.63572.0
  misc_feature: Variant of the nucleotide sequence at SEQ ID NO 26944
cgagttcccaacaacttcctttcaattcgtccgcaatcgacggggaggctcaatgtgccaatcaagaaaggtacacactgttgaacaggggcttgtcgcatgtgcgctctcggctatcatcaacgcgttgctaccataattacacccaatgcgatgcgtaccctgccggcaagggcgctggctggtcgccgcatccagggcgttgttgcaagagcagttggtttcttcacccatcatctacagaactggagattccgttaccgaaccttgccaagtttcaacgacgatttgcctgatacaacttggcgcaagattaagcatcaccaaaagctcctatcgaatcgaagaatcatgattcctgtgtcgctactgctgttggttgggagcatcagtgccattgcaatccgttctacgtctttatcaactaatcagtatccgttgctccgaaatgcttctatcgaatcccttgggcagggcctagattcgaggatgttcacaagtgtcgaactcgtgcaggcatacctcgcccggatacacgaagtcaacgataccgttcatgccgtaactgagattaatccggacgcgcttgaaatagcggctgatttagacacccaacgacagctgggtaccgttcgagggtaacttgaagtgaagtcacctctacaacaccaacttctgacaaccgctagcccgctacatggaataccagttctgttgaagaataatatagctacttttgaccgtatggatacaacatccggatcctgggctctcgtcgggtctaaaacaccagttgatgctacagtcgtaagtaaactacggagctccggcgttattatcttagggaaaacgagcatttctcagtgggcgaagtttcggtccagcaactcaagtaacggctggtctgccgtaggtggccaggtatatggtccttttgtgcccgggcaggacccatggggcagttctagtggtagtgcagtagcttctacacttggactggctgttggagctctgggtacggaaactgacggctccatcaccggaccggcttcgttcaatggcgtcgttggaatcaagccaactatgggcttgacgtcccgacacctcgtgattcctgtaagcgagcaccaggacaccgtagggccgttgactagaacggtaaaagatgcagcgtacattcttcaagccatttccggtgtagatccacacgataactacacaaatgccattcctcacctgacgatgccggactacgccgctgcgtgtaatctgactgctatatctggcttacgaatcggggtccctaggaatgtcctggcaataaaatcgaacaacttgaccgacccgataattacccaattcgagcaggctactcaccgtctggcctccatgggtgctgtgattgtcaacaccacgttcccagcagcagaagaattggagaactccgacattcctaggcagatagagatagcagattttgcggtaaacttgaaaacgtatctcgacagtctgatagtaaatccgaataatatcacgtcacttgccgatctccgtaacttcacgcagcattcgcctctcgaggactatccggagcgtgacacagccatgtgggacaaggctttggaaagctggaacaatacagacccaagattctggccaatgtaccaacatgcactctactatggagacgaaggcggtctgcttggtgccattcgc

SEQ ID NO: 26947 - DNA, 1758 bp, Muscodor strobelii
  misc_feature: SGI cDNA ID NO. 569222
  misc_feature: Encodes the peptide sequence at SEQ ID NO 26948
atgcgtaccctgccggcaagggcgctggctggtcgccgcatccagggcgttgttgcaagagcagttggtttcttcacccatcatctacagaactggagattccgttaccgaaccttgccaagtttcaacgacgatttgcctgatacaacttggcgcaagattaagcatcaccaaaagctcctatcgaatcgaagaatcatgattcctgtgtcgctactgctgttggttgggagcatcagtgccattgcaatccgttctacgtctttatcaactaatcagtatccgttgctccgaaatgcttctatcgaatcccttgggcagggcctagattcgaggatgttcacaagtgtcgaactcgtgcaggcatacctcgcccggatacacgaagtcaacgataccgttcatgccgtaactgagattaatccggacgcgcttgaaatagcggctgatttagacacccaacgacagctgggtaccgttcgaggcccgctacatggaataccagttctgttgaagaataatatagctacttttgaccgtatggatacaacatccggatcctgggctctcgtcgggtctaaaacaccagttgatgctacagtctgggcgaagtttcggtccagcaactcaagtaacggctggtctgccgtaggtggccaggtatatggtccttttgtgcccgggcaggacccatggggcagttctagtggtagtgcagtagcttctacacttggactggctgttggagctctgggtacggaaactgacggctccatcaccggaccggcttcgttcaatggcgtcgttggaatcaagccaactatgggcttgacgtcccgacacctcgtgattcctgtaagcgagcaccaggacaccgtagggccgttgactagaacggtaaaagatgcagcgtacattcttcaagccatttccggtgtagatccacacgataactacacaaatgccattcctcacctgacgatgccggactacgccgctgcgtgtaatctgactgctatatctggcttacgaatcggggtccctaggaatgtcctggcaataaaatcgaacaacttgaccgacccgataattacccaattcgagcaggctactcaccgtctggcctccatgggtgctgtgattgtcaacaccacgttcccagcagcagaagaattggagaactccgacattcctaggcagatagagatagcagattttgcggtaaacttgaaaacgtatctcgacagtctgatagtaaatccgaataatatcacgtcacttgccgatctccgtaacttcacgcagcattcgcctctcgaggactatccggagcgtgacacagccatgtgggacaaggctttggaaagctggaacaatacagacccaagattctggccaatgtaccaacatgcactctactatggagacgaaggcggtctgcttggtgccattcgccgggacaatctagatgcggtggcgctccctgcgcatgtttcttcgacctacgccgctgcagttggggcgcccatcgtgactgttcccctagatttctatcctgatgataccccggtcttccataattcttggggcttgattgacgcagccccacgtatgccatttggtatcgctttcctgggagacaggttcacagaagaaaagctcataagcattgcttatgcttatgagcagttgacaaaggctatagataaagtccaaccatatattttgccgacaacggaattgcgtgatgttgtgtaa

SEQ ID NO: 26948 - protein, 585 aa, Muscodor strobelii
  misc_feature: SGI Peptide ID NO. 569222
  misc_feature (118)..(555): Pfam Id: PF01425 Pfam Desc: Amidase
  misc_feature (207)..(391): Pfam Id: PF01425 Pfam Desc: Amidase
  misc_feature (118)..(201): Pfam Id: PF01425 Pfam Desc: Amidase
  misc_feature (93)..(585): NCBI GI: 238837925 Blast Desc: amidase [Microsporum canis CBS 113480]
  misc_feature (93)..(585): NCBI GI: 189201323 Blast Desc: glutamyl-tRNA(Gln) amidotransferase subunit A [Pyrenophora tritici-repentis Pt-1C-BFP] gi|187984097|gb|EDU49585.1| glutamyl-tRNA(Gln) amidotransferase A
  misc_feature (75)..(585): NCBI GI: 225555498 Blast Desc: amidase [Ajellomyces capsulatus G186AR]
  misc_feature (75)..(585): NCBI GI: 240273757 Blast Desc: amidase [Ajellomyces capsulatus H143]
  misc_feature (95)..(585): NCBI GI: 121713462 Blast Desc: amidase, [Aspergillus clavatus NRRL 1] gi|119402495|gb|EAW12916.1| amidase, [Aspergillus clavatus NRRL 1]
  misc_feature (94)..(581): NCBI GI: 70997715 Blast Desc: amidase [Aspergillus fumigatus Af293] gi|66851230|gb|EAL91556.1| amidase, [Aspergillus fumigatus Af293] gi|159126673|gb|EDP51789.1| amidase, [Aspergillus fumigatus
  misc_feature (93)..(582): NCBI GI: 258572490 Blast Desc: conserved [Uncinocarpus reesii 1704] gi|237905277|gb|EEP79678.1| conserved [Uncinocarpus reesii 1704]
  misc_feature (92)..(585): NCBI GI: 171695870 Blast Desc: protein product [Podospora anserina] gi|170948177|emb|CAP60341.1| protein product [Podospora anserina]
  misc_feature (72)..(581): NCBI GI: 119181312 Blast Desc: CIMG_05773 [Coccidioides immitis RS]
  misc_feature (126)..(581): NCBI GI: 240108933 Blast Desc: Amidase family protein [Coccidioides posadasii C735 delta SOWgp]
  misc_feature (90)..(575): SWISSPROT Homolog: EC 3.5.1.4 Amidase
MRTLPARALAGRRIQGVVARAVGFFTHHLQNWRFRYRTLPSFNDDLPDTTWRKIKHHQKLLSNRRIMIPVSLLLLVGSISAIAIRSTSLSTNQYPLLRNASIESLGQGLDSRMFTSVELVQAYLARIHEVNDTVHAVTEINPDALEIAADLDTQRQLGTVRGPLHGIPVLLKNNIATFDRMDTTSGSWALVGSKTPVDATVWAKFRSSNSSNGWSAVGGQVYGPFVPGQDPWGSSSGSAVASTLGLAVGALGTETDGSITGPASFNGVVGIKPTMGLTSRHLVIPVSEHQDTVGPLTRTVKDAAYILQAISGVDPHDNYTNAIPHLTMPDYAAACNLTAISGLRIGVPRNVLAIKSNNLTDPIITQFEQATHRLASMGAVIVNTTFPAAEELENSDIPRQIEIADFAVNLKTYLDSLIVNPNNITSLADLRNFTQHSPLEDYPERDTAMWDKALESWNNTDPRFWPMYQHALYYGDEGGLLGAIRRDNLDAVALPAHVSSTYAAAVGAPIVTVPLDFYPDDTPVFHNSWGLIDAAPRMPFGIAFLGDRFTEEKLISIAYAYEQLTKAIDKVQPYILPTTELRDVV

SEQ ID NO: 26949 - DNA, 1716 bp, Muscodor strobelii; identical to SEQ ID NO: 26946
  misc_feature: SGI EST ID NO. CUFF.63572.0
  misc_feature: Variant of the nucleotide sequence at SEQ ID NO 26947

SEQ ID NO: 26950 - DNA, 561 bp, Muscodor strobelii
  misc_feature: SGI cDNA ID NO. 569223
  misc_feature: Encodes the peptide sequence at SEQ ID NO 26951
atggacgtacaagctcagacaaatgacgatggcagcgtgagagctcggcttctctatctcaaacacgacaagaagtgggagtttgagaaaccgtacgaaatgggctacgagccccgaggaggatttcctgttacgaacgccgtcggtgagccgcaaacgctcaccattcgaaatcttcgaactctgcaagacgcccagagtctgaatagctacgggtttgcaattgggctagccaagtgtaccctgacgcaagtagaatatcgcgacaacgacaaagttcagagcacatactatcctgtagctgagaaactactcaagcacctatttccagaagttgctgaaatgaagatactagaacatctagcaaaaaggggaattgggttcgattacaacgacggagaccaggacactgccttcgaaattgagcaacctgtccccggagtgcacatcgactactcttcccagtcggcttctcagatggccgcagcacttaatatcgaccaccataaatactcccgatacatagcagtgaagttagttatcttcctgttcttcgagtga

SEQ ID NO: 26951 - protein, 186 aa, Muscodor strobelii
  misc_feature: SGI Peptide ID NO. 569223
  misc_feature (10)..(179): NCBI GI: 145238152 Blast Desc: An07g06460 [Aspergillus niger] gi|134076204|emb|CAK39491.1| protein product [Aspergillus niger]
  misc_feature (5)..(180): NCBI GI: 242803285 Blast Desc: conserved [Talaromyces stipitatus ATCC 10500] gi|218717488|gb|EED16909.1| conserved [Talaromyces stipitatus ATCC 10500]
  misc_feature (5)..(179): NCBI GI: 242803280 Blast Desc: conserved [Talaromyces stipitatus ATCC 10500] gi|218717487|gb|EED16908.1| conserved [Talaromyces stipitatus ATCC 10500]
  misc_feature (5)..(179): NCBI GI: 258563006 Blast Desc: [Uncinocarpus reesii 1704] gi|237907755|gb|EEP82156.1| [Uncinocarpus reesii 1704]
  misc_feature (29)..(164): NCBI GI: 186685770 Blast Desc: Npun_F5723 [Nostoc punctiforme PCC 73102] gi|186468222|gb|ACC84023.1| conserved [Nostoc punctiforme PCC 73102]
  misc_feature (29)..(157): NCBI GI: 75906327 Blast Desc: Ava_0102 [Anabaena variabilis ATCC 29413] gi|75700052|gb|ABA19728.1| conserved [Anabaena variabilis ATCC 29413]
  misc_feature (15)..(180): NCBI GI: 261189077 Blast Desc: [Ajellomyces dermatitidis SLH14081] gi|239591955|gb|EEQ74536.1| [Ajellomyces dermatitidis SLH14081]
  misc_feature (11)..(118): NCBI GI: 256723498 Blast Desc: NECHADRAFT_81142 [Nectria haematococca mpVI 77-13-4]
  misc_feature (12)..(151): NCBI GI: 91780194 Blast Desc: Bxe_C0126 [Burkholderia xenovorans LB400] gi|91692854|gb|ABE36051.1| Conserved [Burkholderia xenovorans LB400]
  misc_feature (9)..(157): NCBI GI: 169856373 Blast Desc: CC1G_08491 [Coprinopsis cinerea okayama7#130] gi|116504125|gb|EAU87020.1| CC1G_08491 [Coprinopsis cinerea okayama7#130]
MDVQAQTNDDGSVRARLLYLKHDKKWEFEKPYEMGYEPRGGFPVTNAVGEPQTLTIRNLRTLQDAQSLNSYGFAIGLAKCTLTQVEYRDNDKVQSTYYPVAEKLLKHLFPEVAEMKILEHLAKRGIGFDYNDGDQDTAFEIEQPVPGVHIDYSSQSASQMAAALNIDHHKYSRYIAVKLVIFLFFE

SEQ ID NO: 26952 - DNA, 213 bp, Muscodor strobelii
  misc_feature: SGI cDNA ID NO. 569224
  misc_feature: Encodes the peptide sequence at SEQ ID NO 26953
atgtacaccgagaatatgaggctgttttataacgagaatcacgcttggtactatgctaaggacttgacagaagatgagtgcgtcgtcttctgtcagacagactctgggggcccctgtggcgtagcccatgcaagctttgagaatcccgaggcacataaggatgctgcgccgagatcaagcattgaattgagagcgtatctattttttatatag

SEQ ID NO: 26953 - protein, 70 aa, Muscodor strobelii
  misc_feature: SGI Peptide ID NO. 569224
  misc_feature (1)..(69): NCBI GI: 242801385 Blast Desc: CmcJ-like methyltransferase, [Talaromyces stipitatus ATCC 10500] gi|218717098|gb|EED16519.1| CmcJ-like methyltransferase, [Talaromyces stipitatus ATCC 10500]
  misc_feature (4)..(69): NCBI GI: 91778676 Blast Desc: Bxe_B1430 [Burkholderia xenovorans LB400] gi|91691336|gb|ABE34534.1| conserved [Burkholderia xenovorans LB400]
  misc_feature (4)..(69): NCBI GI: 145238152 Blast Desc: An07g06460 [Aspergillus niger] gi|134076204|emb|CAK39491.1| protein product [Aspergillus niger]
  misc_feature (4)..(69): NCBI GI: 242803280 Blast Desc: conserved [Talaromyces stipitatus ATCC 10500] gi|218717487|gb|EED16908.1| conserved [Talaromyces stipitatus ATCC 10500]
  misc_feature (1)..(69): NCBI GI: 238844685 Blast Desc: conserved [Microsporum canis CBS 113480]
  misc_feature (2)..(69): NCBI GI: 159128206 Blast Desc: AFUB_044950 [Aspergillus fumigatus A1163]
  misc_feature (4)..(69): NCBI GI: 145601241 Blast Desc: MGG_08723 [Magnaporthe grisea 70-15] gi|145009266|gb|EDJ93977.1| MGG_08723 [Magnaporthe grisea 70-15]
  misc_feature (2)..(69): NCBI GI: 119474411 Blast Desc: NFIA_005460 [Neosartorya fischeri NRRL 181] gi|119407234|gb|EAW17184.1| NFIA_005460 [Neosartorya fischeri NRRL 181]
  misc_feature (4)..(69): NCBI GI: 209522596 Blast Desc: conserved [Burkholderia sp. H160] gi|209496969|gb|EDZ97256.1| conserved [Burkholderia sp. H160]
  misc_feature (10)..(69): NCBI GI: 145240899 Blast Desc: An08g09870 [Aspergillus niger] gi|134077620|emb|CAK96764.1| protein product [Aspergillus niger]
MYTENMRLFYNENHAWYYAKDLTEDECVVFCQTDSGGPCGVAHASFENPEAHKDAAPRSSIELRAYLFFI

SEQ ID NO: 26954 - DNA, 374 bp, Muscodor strobelii
  misc_feature: SGI EST ID NO. CUFF.63505.0
  misc_feature: Variant of the nucleotide sequence at SEQ ID NO 26952
agccactccaaggtccaggaaatgactggccgctggctttatgtgatcaacgcacaattgatgttaatgcggatttggtgatttccgatatagtgaatcctaatatgtacaccgagaatatgaggctgttttataacgagaatcacgcttggtactatgctaaggacttgacagaagatgagtgcgtcgtcttctgtcagacagactctgggggcccctgtggcgtagcccatgcaagctttgagaatcccgaggcacataaggatgctgcgccgagatcaagcattgaattgagagcgtatctattttttatatagcacatagcagatcagcgtagggatcactagatgatattcaagtagtttgtaataaac

SEQ ID NO: 26955 - DNA, 402 bp, Muscodor strobelii
  misc_feature: SGI cDNA ID NO. 569225
  misc_feature: Encodes the peptide sequence at SEQ ID NO 26956
atgtgtccgactcccacatggcacacggtctgcgatgctgagactgctgtaatcggcggtgtgccattagccgagtccggagtcctcaacgatgggggtgagcttataatttcagtccaggccagcacctccaatgactcgaacatccgcgatgccctgattcactctgccgggatcatcgttcgagaggctgctcagggtaacacctgctacgaggcgttttacgaagttgaggtcaagaagcgatttactctttggtcattgggggtttcttcggtggcctttttgagagagatcggccgtatccgacgccacaggagaatacttggtgtaacacgatcaattttgtggaaccacaacactggaacccttagtggcgacgagcagctctaccaggactag

SEQ ID NO: 26956 - protein, 133 aa, Muscodor strobelii
  misc_feature: SGI Peptide ID NO. 569225
MCPTPTWHTVCDAETAVIGGVPLAESGVLNDGGELIISVQASTSNDSNIRDALIHSAGIIVREAAQGNTCYEAFYEVEVKKRFTLWSLGVSSVAFLREIGRIRRHRRILGVTRSILWNHNTGTLSGDEQLYQD

SEQ ID NO: 26957 - DNA, 714 bp, Muscodor strobelii
  misc_feature: SGI cDNA ID NO. 569226
  misc_feature: Encodes the peptide sequence at SEQ ID NO 26958
atgcgagacgataatcgcaatctcgtgcctattacggcttcgctcaagggctttttgcaatgccatctttcacatgacggtctgctcatgccgccctccgggttcccacagctcttctcccccgacatcgagaacgcctacgtctacgtatacattatcaacttagacgcagagatcctgacgatgaacttcggtacctacttcgttctctgtcacatcccacacgccaataaactatggctccattcaatcaggaatcgggtctatagacagaccatgtacacgtacaagacgaccctctccctcggcgtctgcccagaggagtgcatggcctcgcccgcgctggagctatccgaacttaagaacgagcttggtcaccccttcggcgtcgtaactcccaagacagacgtgactcgacctcgcaccgcgtttctaacgcatgccccagtcgagatactaagacattaccagcactatatcatcaacttcggcatggaatggagtcctaactccttcccgtttcgcgacttggcatttgcactcgtgtctgtcgcatccgaaccagttgccaaggtcagcacttctgctattcgatctcttttcagctttgcttttcccaaagtgttcggtactactcgacgagggaagtcgacatacagttgcagctttgccggatcctcaaagcagcagagcaacaaaagcatcagtgtctag

SEQ ID NO: 26958 - protein, 237 aa, Muscodor strobelii
  misc_feature: SGI Peptide ID NO. 569226
  misc_feature (41)..(186): NCBI GI: 238482835 Blast Desc: conserved [Aspergillus flavus NRRL3357] gi|220700706|gb|EED57044.1| conserved [Aspergillus flavus NRRL3357]
  misc_feature (32)..(186): NCBI GI: 255942249 Blast Desc: Pc18g00460 [Penicillium chrysogenum Wisconsin 54-1255] gi|211586626|emb|CAP94270.1| Pc18g00460 [Penicillium chrysogenum Wisconsin 54-1255]
  misc_feature (15)..(200): NCBI GI: 159122823 Blast Desc: F-box domain protein [Aspergillus fumigatus A1163]
  misc_feature (15)..(200): NCBI GI: 70989910 Blast Desc: F-box domain protein [Aspergillus fumigatus Af293] gi|66847436|gb|EAL87766.1| F-box domain protein [Aspergillus fumigatus Af293]
  misc_feature (15)..(200): NCBI GI: 169771291 Blast Desc: [Aspergillus oryzae RIB40] gi|83767974|dbj|BAE58113.1| protein product [Aspergillus oryzae]
  misc_feature (26)..(186): NCBI GI: 145229689 Blast Desc: An01g07290 [Aspergillus niger] gi|134055262|emb|CAK43848.1| [Aspergillus niger]
  misc_feature (49)..(197): NCBI GI: 115391069 Blast Desc: [Aspergillus terreus NIH2624] gi|114193963|gb|EAU35663.1| [Aspergillus terreus NIH2624]
  misc_feature (48)..(189): NCBI GI: 121708204 Blast Desc: conserved [Aspergillus clavatus NRRL 1] gi|119400207|gb|EAW10633.1| conserved [Aspergillus clavatus NRRL 1]
MRDDNRNLVPITASLKGFLQCHLSHDGLLMPPSGFPQLFSPDIENAYVYVYIINLDAEILTMNFGTYFVLCHIPHANKLWLHSIRNRVYRQTMYTYKTTLSLGVCPEECMASPALELSELKNELGHPFGVVTPKTDVTRPRTAFLTHAPVEILRHYQHYIINFGMEWSPNSFPFRDLAFALVSVASEPVAKVSTSAIRSLFSFAFPKVFGTTRRGKSTYSCSFAGSSKQQSNKSISV

SEQ ID NO: 26959 - DNA, 948 bp, Muscodor strobelii
  misc_feature: SGI cDNA ID NO. 569227
  misc_feature: Encodes the peptide sequence at SEQ ID NO 26960
atgctcttttgcaactccccagatttctctgcgacatcaactactacccttgaaggccttcgcgcaatcgccgatgcacagtgctttgtcgcgccgaccttgaccactgacacgcccaatgcgagccagtatagcgcgacacagattactcagtttctgaagaactctcatgccgcgtatgattttcagaaccttcacaaggatgagcttgatgctctcaaatcgcactatgaagagttctcaaagatcgacttggcttgtcttagacccgttgagtttgaaagtatatgccaagatctctttgtgaggatcgactatctgttctttttaagcctcttcacccgttgtattccaacagactccccgcgccaattgaccgagaaggtcaagctggacctccctccctcccatcaccaagagccgctgattttgctcactcctcgagttcatggtaggagctggtcagctcactacgaccctttttatcgccgcatttatatctgtgcttctggtcccaatggaaagctaaggcgattagatgagattgtaaagtctatggttggtgtgatgatccaagcttatctagacatcttctgtgatcgagagggcgaggactacaagaagctggttagtccaaatggaaatcacggccatctcttctgggacttggaggagttcattctggcaaagcttttccagtatactggcatagaggctcttgagaaactggttgctggacttccacagtacagaaaagaactagcggagaatgaggtgtcttggcaagcatatcgcgacaatgtacatggtttgggagacgcacacacctcaacaaatgaagctaccaaaaacaaagaaggcgatatcgttgacttggacaccactacggctgacaggaatgaaaaagaacactatgagggtgaaacatcgacgataaacaatccttaa

SEQ ID NO: 26960 - protein, 315 aa, Muscodor strobelii
  misc_feature: SGI Peptide ID NO. 569227
MLFCNSPDFSATSTTTLEGLRAIADAQCFVAPTLTTDTPNASQYSATQITQFLKNSHAAYDFQNLHKDELDALKSHYEEFSKIDLACLRPVEFESICQDLFVRIDYLFFLSLFTRCIPTDSPRQLTEKVKLDLPPSHHQEPLILLTPRVHGRSWSAHYDPFYRRIYICASGPNGKLRRLDEIVKSMVGVMIQAYLDIFCDREGEDYKKLVSPNGNHGHLFWDLEEFILAKLFQYTGIEALEKLVAGLPQYRKELAENEVSWQAYRDNVHGLGDAHTSTNEATKNKEGDIVDLDTTTADRNEKEHYEGETSTINNP

SEQ ID NO: 26961 - DNA, 594 bp, Muscodor strobelii
  misc_feature: SGI cDNA ID NO. 569228
  misc_feature: Encodes the peptide sequence at SEQ ID NO 26962
atggctttttcaagccgcgctcccaaccctcccaaccctcctatcccctccatcccctctgccgtccgtgcaagctcccacgcccaaatacccgtgtggatgtggtgtggtggtcgcctgtatctgccaccacggtttatacccctctcaccatctacaatgccgcctaaggcgaaaattcggtgctacaattgtggcaaggagggccacaaggcctctggttgtcggctcaactacattcccgctgggtacacccccgggccgcctccctttacccctccacctgcccccgccgccgccaagaaggtcaacaaatccctagatgaccagattgctgagctccgcgctcagtatgcgggtatcgaggccaaggagcggcgcctcgccgaggagaagaaggtaacggccctgttccaactcttgtcgacagtcatgctaatgattgatgttgaaaagaaaattatcgagaagatcgcaacgctggagatagcccgggatgcagtaccagaggcaaaagagaagctcgacgccatgatccaggctgccaaggaggcgaggggtccttccatccatgtgtcctatactatcatttga

SEQ ID NO: 26962 - protein, 197 aa, Muscodor strobelii
  misc_feature: SGI Peptide ID NO. 569228
  misc_feature (60)..(77): Pfam Id: PF00098 Pfam Desc: Zinc knuckle
MAFSSRAPNPPNPPIPSIPSAVRASSHAQIPVWMWCGGRLYLPPRFIPLSPSTMPPKAKIRCYNCGKEGHKASGCRLNYIPAGYTPGPPPFTPPPAPAAAKKVNKSLDDQIAELRAQYAGIEAKERRLAEEKKVTALFQLLSTVMLMIDVEKKIIEKIATLEIARDAVPEAKEKLDAMIQAAKEARGPSIHVSYTII

SEQ ID NO: 26963 - DNA, 708 bp, Muscodor strobelii
  misc_feature: SGI cDNA ID NO. 569229
  misc_feature: Encodes the peptide sequence at SEQ ID NO 26964
atgtcgtcgccaacaattgaggaattcggtctcttccgaacgtatctcagcccgcggatcgaagatattgcattcctgaaggaccacctgggcgagggcctgtccgacaacgattttatgtatcacttcgacgagggtggcgttatctcagatgaaccaactgacgacgcaactgagcgcaaatacgcctggtattcttattcacattacctgaatgcctacatcacgttttacgtcaacctgacaacttcgtgggccatgaactccattcgctacacggaaatgcgatatcgagatatgattatcgacaacatacgagatgccgaaggcgacttgaagacgctgcagtggttcatcgtcagagacgtcgggaacagggcagcacgagaagcaatatgtgagcacttccgaagagcggacaaggactggatggtgaagggtgttgtcgaatcctatccgagtgaccgggattgggaggagctcgcgtcgcagaatccattcacaagaggcattgtaggcctcctcgacgaatatgcggaggaaatgggatatacaagaattacgcgcgtggtttttgtctcccaaggccgaagaccacctggatctcgaccaatacctctctatggagatctaacactccacatgcttatcgagctttaccggccatcgcataaacaccattcacttcatccgactcgcatcccttag

SEQ ID NO: 26964 - protein, 235 aa, Muscodor strobelii
  misc_feature: SGI Peptide ID NO. 569229
MSSPTIEEFGLFRTYLSPRIEDIAFLKDHLGEGLSDNDFMYHFDEGGVISDEPTDDATERKYAWYSYSHYLNAYITFYVNLTTSWAMNSIRYTEMRYRDMIIDNIRDAEGDLKTLQWFIVRDVGNRAAREAICEHFRRADKDWMVKGVVESYPSDRDWEELASQNPFTRGIVGLLDEYAEEMGYTRITRVVFVSQGRRPPGSRPIPLYGDLTLHMLIELYRPSHKHHSLHPTRIP

SEQ ID NO: 26965 - DNA, 313 bp, Muscodor strobelii
  misc_feature: SGI EST ID NO. CUFF.63532.0
  misc_feature: Variant of the nucleotide sequence at SEQ ID NO 26963
cctatccgagtgaccgggattgggaggagctcgcgtcgcagaatccattcacaagaggcattgtaggcctcctcgacgaatatgcggaggaaatgggatatacaagaattacgcgcgtggtttttgtctcccaaggccgaagaccacctggatctcgaccaatacctctctatggagatctaacactccacatgcttatcgagctttaccggccatcgcataaacaccattcacttcatccgactcgcatcccttagataattataacacggactttttatcctgcctgaagtgactcggcggtcccgactca

SEQ ID NO: 26966 - DNA, 708 bp, Muscodor strobelii
  misc_feature: SGI cDNA ID NO. 569230
  misc_feature: Encodes the peptide sequence at SEQ ID NO 26967
atgtccttcagtgcagcggtcatcgggtcgacaggcctcgtcggccaccagattctgtcgacggtcctcagcatcgacgcctacaagacagtccacaccatctcccgccgcgcacctaagacagagtcctctcccaagctcaacgcgaccatcgaggccgacaccgagaaatggacatcccaactgacggccatctcgcccaagccgtcaatcgtctactcagccctgggcaccacacgtgccgcagctggcggcgtccagaaccagtggaagatcgaccacgacttgaacgtcgagctcgccaaatccgcccgcaccgccgacatccagaccttcgtcttcgtctcctccgccggcacacgcggcctcatgagcaacatgattccctactccaagatgaagattggcgtcgaggacacgatcaaatcactcgacttcccacaggccatcatactgcggcccggactcctcatgggtaaacgagaggttgcacatgctggtggtcccatgatggagacctgtgtccgtggtcttagcaagttcttcggtcagggagccacggatgcatttggtcaagacgatgtcgttgttgcgcgtgctgctgtcagagctgcggcgcttgcggctgaggggaaggccccgagtaagtattggattttggagcagagggatattgttagacttgggcgggatgagtggactgcatga

SEQ ID NO: 26967 - protein, 235 aa, Muscodor strobelii
  misc_feature: SGI Peptide ID NO. 569230
  misc_feature (5)..(229): Pfam Id: PF01370 Pfam Desc: NAD dependent epimerase/dehydratase family
  misc_feature (1)..(233): NCBI GI: 46128501 Blast Desc: FG08628.1 [Gibberella zeae PH-1]
  misc_feature (4)..(233): NCBI GI: 158517786 Blast Desc: FG08628.1 [Gibberella zeae PH-1]
  misc_feature (4)..(233): NCBI GI: 256733528 Blast Desc: NECHADRAFT_59094 [Nectria haematococca mpVI 77-13-4]
  misc_feature (4)..(233): NCBI GI: 85085687 Blast Desc: NCU03908 [Neurospora crassa OR74A] gi|74625161|sp|Q9P5L2.1|FMP52_NEUCR RecName: Full=Protein fmp-52, mitochondrial; Flags: Precursor gi|7899395|emb|CAB91685.1| crassa
  misc_feature (4)..(233): NCBI GI: 169785425 Blast Desc: [Aspergillus oryzae RIB40] gi|121797298|sp|Q2TXI3.1|FM522_ASPOR RecName: Full=Protein fmp52-2, mitochondrial; Flags: Precursor protein product oryzae]
  misc_feature (4)..(233): NCBI GI: 238506419 Blast Desc: conserved [Aspergillus flavus NRRL3357] gi|220689124|gb|EED45475.1| conserved [Aspergillus flavus NRRL3357]
  misc_feature (4)..(235): NCBI GI: 258575487 Blast Desc: conserved [Uncinocarpus reesii 1704] gi|237902191|gb|EEP76592.1| conserved [Uncinocarpus reesii 1704]
  misc_feature (4)..(233): NCBI GI: 212540904 Blast Desc: conserved [Penicillium marneffei ATCC 18224] gi|210067906|gb|EEA21998.1| conserved [Penicillium marneffei ATCC 18224]
  misc_feature (4)..(233): NCBI GI: 115383804 Blast Desc: conserved [Aspergillus terreus NIH2624] gi|121742308|sp|Q0CZ00.1|FM522_ASPTN RecName: Full=Protein fmp52-2, mitochondrial; Flags: Precursor conserved [Aspergillus
  misc_feature (4)..(233): NCBI GI: 119497795 Blast Desc: NFIA_033240 [Neosartorya fischeri NRRL 181] gi|158512687|sp|A1CYD8.1|FM522_NEOFI RecName: Full=Protein fmp52-2, mitochondrial; Flags: Precursor conserved [Neosartorya
MSFSAAVIGSTGLVGHQILSTVLSIDAYKTVHTISRRAPKTESSPKLNATIEADTEKWTSQLTAISPKPSIVYSALGTTRAAAGGVQNQWKIDHDLNVELAKSARTADIQTFVFVSSAGTRGLMSNMIPYSKMKIGVEDTIKSLDFPQAIILRPGLLMGKREVAHAGGPMMETCVRGLSKFFGQGATDAFGQDDVVVARAAVRAAALAAEGKAPSKYWILEQRDIVRLGRDEWTA

SEQ ID NO: 26968 - DNA, 1129 bp, Muscodor strobelii
  misc_feature: SGI EST ID NO. CUFF.63535.0
  misc_feature: Variant of the nucleotide sequence at SEQ ID NO 26966
acggaaaaagacccaaagctccaaagcccctccaacactatattgacatcacctccatccttgacccaaataaccacccgcttcactgcaaacaaaatttgtttctagatactacgctttgcagatagtagtagcctcaccactaccccaccatgtccttcagtgcagcggtcatcgggtcgacaggcctcgtcggccaccagattctgtcgacggtcctcagcatcgacgcctacaagacagtccacaccatctcccgccgcgcacctaagacagagtcctctcccaagctcaacgcgaccatcgaggccgacaccgagaaatggacatcccaactgacggccatctcgcccaagccgtcaatcgtctactcagccctgggcaccacacgtgccgcagctggcggcgtccagaaccagtggaagatcgaccacgacttgaacgtcgagctcgccaaatccgcccgcaccgccgacatccagaccttcgtcttcgtctcctccgccggcacacgcggcctcatgagcaacatgattccctactccaagatgaagattggcgtcgaggacacgatcaaatcactcgacttcccacaggccatcatactgcggcccggactcctcatgggtaaacgagaggttgcacatgctggtggtcccatgatggagacctgtgtccgtggtcttagcaagttcttcggtcagggagccacggatgcatttggtcaagacgatgtcgttgttgcgcgtgctgctgtcagagctgcggcgcttgcggctgaggggaaggccccgagtaagtattggattttggagcagagggatattgttagacttgggcgggatgagtggactgcatgagtgatgggcgccgtgacgtgatcacttccattgttcggcgctctgcatgcttgttaggtgttgaggcgtttgttattgagtcgcatataccccaagtgtatgaataagagttcaagttgtattttaggggcctttggaatgaacttcatgaaaccaagtgtgcttgttttaatggcttgggtcgtgcagttgccttgacgtaagggatcacaatactatctctccgtctctgacggacaagatcactagatacttaggtatgtatacat

SEQ ID NO: 26969 - DNA, 1413 bp, Muscodor strobelii
  misc_feature: SGI cDNA ID NO. 569231
  misc_feature: Encodes the peptide sequence at SEQ ID NO 26970
atgctccgttacatcatattcaagcgctggagaaggtactcggccctcattctattcttctcacttatcgtcgctctctggactgcgtggcgcatcgtccaatactcggcgacattgaagcgcgacgcgccgaccatggggtctgttggaccttcaattgagcctgagcgcgtagctgccgtaatgctctcatggtcggatctgaagctcatatcattcgagaagacgcatgacctatgggcgggatatggacatatctgcgaggtcaaggcacgagctacaagcgcagacgcccatgcacaaatgaaagaagtcttgggcaatgtaggaaacgatggagaattcaatttgatcctcaaaatcatctcaccacctcctacaggagccggatctaaggacgaaggacacttgaggaagatctacagctataatgtcgagcagtacttctacaactcgattgccccccacttgaacgccaaggtggccatggctcgtgcgatagcgacaacctacgacatggtagggaaacccgatgctgacctactggagggacttacagcaactctcatgacggatttgaggaccagataccctctttctggtgacgagcatcgtaatctcaacgacgaccaggtccatagtgctatcaattggctttctaaattccaccgggaatcgtggagtttaccgcctatctcgaaagactcgcttctcgaaccaccgttgatagaagctgagagacggaagtcgacacaagtagcagaaccatctgtgtgggcaaatggtggatacacatatcttgctacaaggcggaaagagtacaacgctttctgtctggatcaaacctcagaatggtcttggctactctgcggagaattcttgaacggccaatccctcgcagaagtagtggcggacgtcttgaagccaagtccgtttctcgaacagcaaagccttatacatggtgatgtgaagtctgagaatctgtttacatcgcagtacggcagcggaattgctttctacgattttcagtatgtcggctttggacttggagtgtgcgacctggctaagttgtttacttgttcagtcccaatgtggatgttggtgaggggaatggaggactacactaagaagctagctatgtgcgaccctgagaagagactgctagaacgatactatgagaatctgctagccggtacgaaaaagaactatgactggagtttgtttatccgacattgggagactgctttagttgactggcttcggtttcaagcatcatggggattttggggcaatacagattggctcgaggctcgagtacgctcaatagtgaacgatgtgtcgtggaggaaatggctccgagagcagcaaaggatgagagttgcgcgaaatggcgttgtgagcgaagatcactaa

SEQ ID NO: 26970 - protein, 470 aa, Muscodor strobelii
  misc_feature: SGI Peptide ID NO. 569231
  misc_feature (95)..(405): Pfam Id: PF02958 Pfam Desc: Domain of function (DUF227)
  misc_feature (52)..(455): NCBI GI: 39961120 Blast Desc: MGG_09503 [Magnaporthe grisea 70-15] gi|145011002|gb|EDJ95658.1| MGG_09503 [Magnaporthe grisea 70-15]
  misc_feature (54)..(454): NCBI GI: 67526625 Blast Desc: AN3770.2 [Aspergillus nidulans FGSC A4] gi|40740788|gb|EAA59978.1| AN3770.2 [Aspergillus nidulans FGSC A4] gi|259481679|tpe|CBF75425.1| TPA: conserved [Aspergillus FGSC
  misc_feature (53)..(455): NCBI GI: 256731613 Blast Desc: NECHADRAFT_85241 [Nectria haematococca mpVI 77-13-4]
  misc_feature (62)..(452): NCBI GI: 145245037 Blast Desc: An11g08200 [Aspergillus niger] gi|134079481|emb|CAK46013.1| protein product [Aspergillus niger]
  misc_feature (62)..(460): NCBI GI: 255955185 Blast Desc: Pc21g13270 [Penicillium chrysogenum Wisconsin 54-1255] gi|211590056|emb|CAP96224.1| Pc21g13270 [Penicillium chrysogenum Wisconsin 54-1255]
  misc_feature (56)..(455): NCBI GI: 46122919 Blast Desc: FG05837.1 [Gibberella zeae PH-1]
  misc_feature (58)..(455): NCBI GI: 169777153 Blast Desc: [Aspergillus oryzae RIB40] gi|238494264|ref|XP_002378368.1| conserved [Aspergillus flavus NRRL3357] gi|83771779|dbj|BAE61909.1| protein product oryzae]
  misc_feature (55)..(457): NCBI GI: 261355173 Blast Desc: PIG-P domain-containing protein [Verticillium albo-atrum VaMs.102]
  misc_feature (55)..(465): NCBI GI: 189195602 Blast Desc: conserved [Pyrenophora tritici-repentis Pt-1C-BFP] gi|187980018|gb|EDU46644.1| conserved [Pyrenophora tritici-repentis Pt-1C-BFP]
  misc_feature (49)..(343): NCBI GI: 115438204 Blast Desc: conserved [Aspergillus terreus NIH2624] gi|114188821|gb|EAU30521.1| conserved [Aspergillus terreus NIH2624]
MLRYIIFKRWRRYSALILFFSLIVALWTAWRIVQYSATLKRDAPTMGSVGPSIEPERVAAVMLSWSDLKLISFEKTHDLWAGYGHICEVKARATSADAHAQMKEVLGNVGNDGEFNLILKIISPPPTGAGSKDEGHLRKIYSYNVEQYFYNSIAPHLNAKVAMARAIATTYDMVGKPDADLLEGLTATLMTDLRTRYPLSGDEHRNLNDDQVHSAINWLSKFHRESWSLPPISKDSLLEPPLIEAERRKSTQVAEPSVWANGGYTYLATRRKEYNAFCLDQTSEWSWLLCGEFLNGQSLAEVVADVLKPSPFLEQQSLIHGDVKSENLFTSQYGSGIAFYDFQYVGFGLGVCDLAKLFTCSVPMWMLVRGMEDYTKKLAMCDPEKRLLERYYENLLAGTKKNYDWSLFIRHWETALVDWLRFQASWGFWGNTDWLEARVRSIVNDVSWRKWLREQQRMRVARNGVVSEDH

SEQ ID NO: 26971 - DNA, 1454 bp, Muscodor strobelii
  misc_feature: SGI EST ID NO. CUFF.63544.0
  misc_feature: Variant of the nucleotide sequence at SEQ ID NO 26969
cgctggagaaggtactcggccctcattctattcttctcacttatcgtcgctctctggactgcgtggcgcatcgtccaatactcggcgacattgaagcgcgacgcgccgaccatggggtctgttggaccttcaattgagcctgagcgcgtagctgccgtaatgctctcatggtcggatctgaagctcatatcattcgagaagacgcatgacctatgggcgggatatggacatatctgcgaggtcaaggcacgagctacaagcgcagacgcccatgcacaaatgaaagaagtcttgggcaatgtaggaaacgatggagaattcaatttgatcctcaaaatcatctcaccacctcctacaggagccggatctaaggacgaaggacacttgaggaagatctacagctataatgtcgagcagtacttctacaactcgattgccccccacttgaacgccaaggtggccatggctcgtgcgatagcgacaacctacgacatggtagggaaacccgatgctgacctactggagggacttacagcaactctcatgacggatttgaggaccagataccctctttctggtgacgagcatcgtaatctcaacgacgaccaggtccatagtgctatcaattggctttctaaattccaccgggaatcgtggagtttaccgcctatctcgaaagactcgcttctcgaaccaccgttgatagaagctgagagacggaagtcgacacaagtagcagaaccatctgtgtgggcaaatggtggatacacatatcttgctacaaggcggaaagagtacaacgctttctgtctggatcaaacctcagaatggtcttggctactctgcggagaattcttgaacggccaatccctcgcagaagtagtggcggacgtcttgaagccaagtccgtttctcgaacagcaaagccttatacatggtgatgtgaagtctgagaatctgtttacatcgcagtacggcagcggaattgctttctacgattttcagtatgtcggctttggacttggagtgtgcgacctggctaagttgtttacttgttcagtcccaatgtggatgttggtgaggggaatggaggactacactaagaagctagctatgtgcgaccctgagaagagactgctagaacgatactatgagaatctgctagccggtacgaaaaagaactatgactggagtttgtttatccgacattgggagactgctttagttgactggcttcggtttcaagcatcatggggattttggggcaatacagattggctcgaggctcgagtacgctcaatagtgaacgatgtgtcgtggaggaaatggctccgagagcagcaaaggatgagagttgcgcgaaatggcgttgtgagcgaagatcactaaacgtacaaaacgttactagaagttacttctccaagctaataaacccttaatcattcatatgtctg

SEQ ID NO: 26972 - DNA, 795 bp, Muscodor strobelii
  misc_feature: SGI cDNA ID NO. 569232
  misc_feature: Encodes the peptide sequence at SEQ ID NO 26973
atgacctctcaaccagccctcaccatgtaccgcgggtggccagaccccaacctctacgtctggtcaccctacgtgaccaaattggaagcgcgcctgcgcttctcgggtctatcctacaaatacgccgctggttcacccaagagtgcaccgcggggcaaaatcccttacctcgacctaacaccagctggtgacaccggcgcagtagagcagctcagcgactccacgctcatcgtcaaagaactcgcagcgcgaggtatgctcaaggatctcaacgatggcttgagcaagactgagaaagcgatggacttggcactgagagcgctattagaagataaactcagtttttaccactcctgggaacgatggacccagaattactacacaatgcgagaccacgtgatgtggcccatcccctatttcatcaggatcttcatcgggcagctcgcataccggaatacggtcgccactttgcatggccaaggcactggcagattcagcgccgaggagattggtgagttccggaaagagatttggacttctttttccgatcttcttctcgagtcaaaagtgaagaatgggaagagcggaaagggtgaagacgaacctttctgggtctcgggtggggatgggccgacagaggttgatgcttcgttgtttggatttgttgtcagcgctttgttgtgcactgcgggcccggagtcgaaggcggatgtcaagagttctcccatcctcggagagtacgccaaacggatacatgtaaagtatttcccggaatatgagaactctccaatgtga

SEQ ID NO: 26973 - protein, 264 aa, Muscodor strobelii
  misc_feature: SGI Peptide ID NO. 569232
  misc_feature (7)..(260): NCBI GI: 67517069 Blast Desc: AN0815.2 [Aspergillus nidulans FGSC A4] gi|40746489|gb|EAA65645.1| AN0815.2 [Aspergillus nidulans FGSC A4] gi|259488902|tpe|CBF88728.1| TPA: glutathione S-transferase,
  misc_feature (5)..(261): NCBI GI: 121712184 Blast Desc: glutathione S-transferase, [Aspergillus clavatus NRRL 1] gi|119401859|gb|EAW12281.1| glutathione S-transferase, [Aspergillus clavatus NRRL 1]
  misc_feature (1)..(261): NCBI GI: 115396570 Blast Desc: conserved [Aspergillus terreus NIH2624] gi|114193493|gb|EAU35193.1| conserved [Aspergillus terreus NIH2624]
  misc_feature (4)..(258): NCBI GI: 242790284 Blast Desc: glutathione S-transferase, [Talaromyces stipitatus ATCC 10500] gi|218718119|gb|EED17539.1| glutathione S-transferase, [Talaromyces stipitatus ATCC 10500]
  misc_feature (1)..(260): NCBI GI: 39968995 Blast Desc: MGG_10108 [Magnaporthe grisea 70-15] gi|145015254|gb|EDJ99790.1| MGG_10108 [Magnaporthe grisea 70-15]
  misc_feature (1)..(260): NCBI GI: 255954593 Blast Desc: Pc21g10140 [Penicillium chrysogenum Wisconsin 54-1255] gi|211589760|emb|CAP95911.1| Pc21g10140 [Penicillium chrysogenum Wisconsin 54-1255]
  misc_feature (5)..(260): NCBI GI: 256728596 Blast Desc: NECHADRAFT_51085 [Nectria haematococca mpVI 77-13-4]
  misc_feature (3)..(260): NCBI GI: 119482954 Blast Desc: glutathione S-transferase, [Neosartorya fischeri NRRL 181] gi|119409660|gb|EAW19608.1| glutathione S-transferase, [Neosartorya fischeri NRRL 181]
  misc_feature (7)..(260): NCBI GI: 212534498 Blast Desc: glutathione S-transferase, [Penicillium marneffei ATCC 18224] gi|210069804|gb|EEA23894.1| glutathione S-transferase, [Penicillium marneffei ATCC 18224]
  misc_feature (5)..(260): NCBI GI: 116198571 Blast Desc: CHGG_07441 [Chaetomium globosum CBS 148.51] gi|88178720|gb|EAQ86188.1| CHGG_07441 [Chaetomium globosum CBS 148.51]
MTSQPALTMYRGWPDPNLYVWSPYVTKLEARLRFSGLSYKYAAGSPKSAPRGKIPYLDLTPAGDTGAVEQLSDSTLIVKELAARGMLKDLNDGLSKTEKAMDLALRALLEDKLSFYHSWERWTQNYYTMRDHVMWPIPYFIRIFIGQLAYRNTVATLHGQGTGRFSAEEIGEFRKEIWTSFSDLLLESKVKNGKSGKGEDEPFWVSGGDGPTEVDASLFGFVVSALLCTAGPESKADVKSSPILGEYAKRIHVKYFPEYENSPM

SEQ ID NO: 26974 - DNA, 587 bp, Muscodor strobelii
  misc_feature: SGI EST ID NO. CUFF.63565.0
  misc_feature: Variant of the nucleotide sequence at SEQ ID NO 26972
gcagattcagcgccgaggagattggtgagttccggaaagagatttggacttctttttccgatcttcttctcgagtcaaaagtgaagaatgggaagagcggaaagggtgaagacgaacctttctgggtctcgggtggggatgggccgacagaggttgatgcttcgttgtttggatttgttgtcagcgctttgttgtgcactgcgggcccggagtcgaaggcggatgtcaagagttctcccatcctcggagagtacgccaaacggatacatgtaaagtatttcccggaatatgagaactctccaatgtgaaatcgggggagtgctggagaccaagtggtgtaccaagaaagaggctaagatagtgtgtgatcttgagatcttgaaatcgttgcagtcatgcatgttctcggaggataacgactactttcatgtatgtgtacaagcaattgcaattagggtctcaacgacgtgtcggggaatgtaatattcacacaggtatgtatgccagagaagagagaatgataaggatttctatagttatgaacgttgttactcatagactttaccgcaattaataccattgcgaaa

SEQ ID NO: 26975 - DNA, 2208 bp, Muscodor strobelii
  misc_feature: SGI cDNA ID NO. 569233
  misc_feature: Encodes the peptide sequence at SEQ ID NO 26976
atgtctgacgtagagcgggccaatgtagaaggggcgctggctgcgcaacagacggcgcccaatgtggcaacgccaaatgctccacaagcagaagtaccactatcgccatgggcagaacggttcccagaagttctccacgcatggggccgccctacctcggtattggatgaagacaacaggcactcgggctatgcgatggagtaccccaggagcgatcccaagtattacaatgactctccttacctcgaaaagccactcaatggatcggatttgaacagactcttcgtgagcgaggcgatacagcgtcttaggctccgggggctagtaacgtggcaggcaggacctttgaattcgtatgtcgacttcaggaactctacaggtgtagttagtggtggacatcgccttgtcgatacccttaacatcggtgaccttaacgtgggcggccttcacgacgacgttcagacagtttgggaccaaagtgtgatagaggttgatgagagcaagtggttttcggtcttcgccaaatctcactggtacgaccttcgtggggatgagacggtctcgctaataccggaaccacctggcggatcgttcagtgtcgacgaccccaagatcgtcacttgcccttactatgatcatggcgatcttgatggcactacaagacttatcattaagcgcagaatgaaaaccttgctgtttggaaacatcatccgatggggagacgcagatccgggaaccgagccgacgccggacgccatggtcctcttgtcccaagcaggggaagtagacctcgcggtcaagcatggtagacaagttccgaccgatccagctgcggacatgtccgatgcggatatatcatctcatctctcaagaatgttcgaaatcatgacaagagaggctttttggtcattccttatggagaaacatccaggccagacgaatggattaacactcgcacggggacggttggtgcttttgaacctactgcttgtcaagaatctctccaatccagatctcacgctggcagaacgatgccatcttcacttcgtcgtggccaagacggtggtacacgaaacttgtcacgtcattttgcgaatgcgctatgagcggctaggactgcgaggcacaccagaacccttctacgatttcgaaccggtggccgaggcgggcgaagcttttgaatcacgagtatttggtggcaggtatcaagttgcgctccaacgtacgaatgtggttcggatgaacacagtaacgcgaagagtctggccatttattagtcatatggagtcccgatatgtggacgtcgagaccagccacagtccttcatcgggtgtcgatgcacgagtcatggatgcctggaacgaacgacagaccgaatgggccctggcacgcaaaggctggtatgatgaggagagcgcgcgttggtatacttcaccatggggagttcctttcgtcataatccggacgatggcagttttttccaaattcttcgcggagggagattttcatacgtgccggcggaacatcccccttgtagggtttaacatagctggggggatagagtggttactacatacgccattccaagataatttgcctccatcaaatgcgagcggcgatccgaatcattggtactactttgcagttggtctactcatgacagcagcacttcctattcaccgccatgaaggccctgcaccaaatgtcacccgggatcccaaaaccgttcatcgatatgtcccttcaaaagatttcgcgccaggggaaactacaattcaaccgagaggaaaatatccaattgtgtacgctgtttctgaggacccaaagccgatgatcgaaactcctatctatcacaatccatttagtgacactccagagcaacgtttacgtccatcacaggaaggacatttagacgtacttgataacattcttagacatgtaagccagaatagctctgtcgtttccggtccgtggtgtcgaaaactcttcgacacgtcgcgctcgatacgaaaagaacgagagcagctcaggctggattatccagatacgcatttgagtctagcaataaagagatgggacttcgaacctccggactatgatccagaaaacatggactggatacgctggcggccggaccgccagggtttcgcgaatgtccctaactatcaaccacctcagatcccgacgattccccctacttgggcgtag

SEQ ID NO: 26976 - protein, 735 aa, Muscodor strobelii
  misc_feature: SGI Peptide ID NO. 569233
  misc_feature (90)..(335): NCBI GI: 85089861 Blast Desc: NCU09292 [Neurospora crassa OR74A] gi|28919473|gb|EAA28908.1| NCU09292 [Neurospora crassa OR74A]
  misc_feature (35)..(182): NCBI GI: 116195352 Blast Desc: [Chaetomium globosum CBS 148.51] gi|88180187|gb|EAQ87655.1| [Chaetomium globosum CBS 148.51]
MSDVERANVEGALAAQQTAPNVATPNAPQAEVPLSPWAERFPEVLHAWGRPTSVLDEDNRHSGYAMEYPRSDPKYYNDSPYLEKPLNGSDLNRLFVSEAIQRLRLRGLVTWQAGPLNSYVDFRNSTGVVSGGHRLVDTLNIGDLNVGGLHDDVQTVWDQSVIEVDESKWFSVFAKSHWYDLRGDETVSLIPEPPGGSFSVDDPKIVTCPYYDHGDLDGTTRLIIKRRMKTLLFGNIIRWGDADPGTEPTPDAMVLLSQAGEVDLAVKHGRQVPTDPAADMSDADISSHLSRMFEIMTREAFWSFLMEKHPGQTNGLTLARGRLVLLNLLLVKNLSNPDLTLAERCHLHFVVAKTVVHETCHVILRMRYERLGLRGTPEPFYDFEPVAEAGEAFESRVFGGRYQVALQRTNVVRMNTVTRRVWPFISHMESRYVDVETSHSPSSGVDARVMDAWNERQTEWALARKGWYDEESARWYTSPWGVPFVIIRTMAVFSKFFAEGDFHTCRRNIPLVGFNIAGGIEWLLHTPFQDNLPPSNASGDPNHWYYFAVGLLMTAALPIHRHEGPAPNVTRDPKTVHRYVPSKDFAPGETTIQPRGKYPIVYAVSEDPKPMIETPIYHNPFSDTPEQRLRPSQEGHLDVLDNILRHVSQNSSVVSGPWCRKLFDTSRSIRKEREQLRLDYPDTHLSLAIKRWDFEPPDYDPENMDWIRWRPDRQGFANVPNYQPPQIPTIPPTWA

SEQ ID NO: 26977 - DNA, 1892 bp, Muscodor strobelii
  misc_feature: SGI EST ID NO. CUFF.63577.0
  misc_feature: Variant of the nucleotide sequence at SEQ ID NO 26975
cgcagatccgggaaccgagccgacgccggacgccatggtcctcttgtcccaagcaggggaagtagacctcgcggtcaagcatggtagacaagttccgaccgatccagctgcggacatgtccgatgcggatatatcatctcatctctcaagaatgtgttagttatgcaatcgtcaacacgaattgtagagggtgttttggcgactcttaaccactggactactcttgtgtaccaaacctcaaaataaaacaaattctgacgtgtctttacagtcgaaatcatgacaagagaggctttttggtcattccttatggagaaacatccaggccagacgaatggattaacactcgcacggggacggttggtgcttttgaacctactgcttgtcaagaatctctccaatccagatctcacgctggcagaacgatgccatcttcacttcgtcgtggccaagacggtggtacacgaaacttgtcacgtcattttgcgaatgcgctatgagcggctaggactgcgaggcacaccagaacccgtgagtccgtcagcctggaggcgactctggagatttctcgcacattgcttgacgggattacttagttctacgatttcgaaccggtggccgaggcgggcgaagcttttgaatcacgagtatttggtggcaggtatcaagttgcgccttatccccacactgttccgatctctagcaatattcatacttggccgggaatcgacgaatctcgaacttcccgaaaaatcatgtcacaacttaaacagtcccgtgacgcttctgttatacacgttcatgcggcgtggctatcaaagcttctatcgcgcaatttctgggatgatgagagcataccaagaaaaagcgacaatttctgtaaggatagctttaccaccccctcgcacccccaaagccccccaaagatatatgagctccaatcatcctcgtcatcctcgtgttatatcacactagcactaagttctaactatcatgtggcagtccaacgtacgaatgtggttcggatgaacacagtaacgcgaagagtctggccatttattagtcatatggagtcccgatatgtggacgtcgagaccagccacagtccttcatcgggtgtcgatgcacgagtcatggatgcctggaacgaacgacagaccgaatgggccctggcacgcaaaggctggtatgatgaggagagcgcgcgttggtatacttcaccagtgagttaggcttcgcgatccacttgcccatgaaactgacgacatggatgcaaagtggggagttcctttcgtcataatccggacgatggcagttttttccaaattcttcgcggagggagattttcatacgtgccggcggaacatcccccttgtagggtttaacatagctggggggatagagtggttactacatacgccattccaagataatttgcctccatcaaatgcgagcggcgatccgaatcattggtactactttgcagttggtgcgtacttaccgcttacactgacctttccgttgtacattgtgtaatgtcagtatggcaatccggctaatggcactcgtctcgccaggtctactcatgacagcagcacttcctattcaccgccatgaaggccctgcaccaaatgtcacccgggatcccaaaaccgttcatcgatatgtcccttcaaaagatttcgcgccaggggaaactacaattcaaccgagaggaaaatatccaattgtgtacgctgtttctgaggacccaaagccgatgatcgaaactcctatctatcacaatccatttagtgacactccagagcaacgtttacgtccatcacaggaaggacatttagacgtacttgataacattcttagacatgtaagccagaatagctctgtcgttt

SEQ ID NO: 26978 - DNA, 5760 bp, Muscodor strobelii
  misc_feature: SGI cDNA ID NO. 569234
  misc_feature: Reduced expression when VOC is produced
  misc_feature: Encodes the peptide sequence at SEQ ID NO 26979
atggatgagggcttcgagccgtcatcggcgcaagcgttcaacattgcttcccacatcctcaacccccaagccgtcggcgacaccatctcccgtgccacctcgcccggcctgccctcctcgacgagaggcgacgacagcaaacgctaccgaacccgaacctttgcctacttccagctgctcccctatcccgtcgaagaggaggcccagcgcgatgctgctctgcagggaatcctaaagcaactctacatcgccgtcaaggcagaagacttctcgcccggggctctgcattggacgcgtcagctgcaagcatggatgtccttgaagttcgatatgccccgcgagctacgcgccaagctcgccaagctctatttccatctggctctggctccaggcttggatgcgagtgctactgaccgattctccagaatggtggtgaccctgacgagaaagaagaacttcttgcggccccaggatgacctcaccctcgattggagacctctttggaaggtgatcaaaaacattgtattgcccgaagaggctccggcccaccacgcgaccatgcgacggggcatgaagaacctctggaagctgtgtctacacgcacagtcctacttcgaccccaaggagcgtcacgccatgctgcacgagatcctcccctacttcagcacgtcagacctttcagacgccttcattgtattcggcgtcatgaacttcctgatgcccacggccccggcgccacctaccgagcctctctcgcggccggctgatttcctgcccacattcttccacttgtggtccttggtatcccggtctaaggtgacggacaacaccatgctcgacatcttctcgagactggcccgagactatcttgcctgcacccatgtgcccttcggcgagcacggcatattcacacgagaccagtccgatctcatcttcaccgccatcctgcggctcacagacatccccgttggccaggccaactcgccttacacgaacgtcgactattcggccggcatggccatgttcctcgagaaggacaagaagaaacatcccgtgacgtacataatagcccgctggattgtctcttccttatcgccattctgcctggaaggagacagctctgtcttgtgcagcctcgagggtctcatggagtctgtcgacacctttttccacccttccaatcatgggtcgtggaccagaatgctctctcatctgacctattacttgaccgagttgttcgtctctcgctggaacaaggagcagaacggagaacaagatactccggcggacaggcagatcaacgcggcgttgaagaagcgatttgtgctgtgcttgcgagaggtcaccttcatgggtctgtttggcaagggaaaccagataacttccatgtatttcggggccctccagaatttgacgtatctcgagcccgatttgatgttgcccggtgccctccagcgattctacccttccttgcagggtttggtggaagtccaccgaaccacatctagtcttattggcttgcagatgattgccaacgtgatgaccagacagaagggcttcagatgtcatgtcacagccctgctagctttggcactgcctggtatcgatgccaatgacctgaacaagacccagtacactctcaacttcctccagacggtggcctacagcattcccttcgtcaatctagccaaggagaatagcaagatacacgacacgagcttggctatgcaatttgtgcagagcgagatggaccgcatggagaccgaggggcaagatgtcaagattgactatgccaacgaactgagtgatgaggacgaagcggacattgcccgatcttccacagctggattcggcgagttcgtcatcacgctactcgggaaagtgttcactttgttagaaaacttgcccgacatgcatgccagatcgggatcgccagaggacaacatcatcaacacactacctgccgcgttgacccccatgtttgcatctttgtcccccgaactgttcgatctggctcttgagaagctagcaacatttgtatcttcccatgttgtccaccaagctcgagatgccatggcatggatttgtaatgccctgtgcaaggtcaaccccgaaaagaccctgaaagtgttcatccccatgctgattatcaacatccggcacgagatcgactcgaacggggctgcttccgaccgcagcagcggcgcggaaattcttccccgcgatagagcactcgtctggcatatcagcatactgagcatgtgcgtcgtccacgtcggtagcgaggttctcaagtacaaaaaggacctgttcagcattgcagagtacatgcaagagaaatgccgtggtcttccgactatccacattagcaacttcatccaccatcttctccttaatcttacgcacacttaccccatcgacacggcattgttcgagcccgaagtctttgaacgcggcctggacatcgaggattggggaaagaccacggcaccggctgacttgacaatccgatggcacaggcctgtgattgaagaaatccagtttgccaccgaactcttcgagtctcaggcagaagctgccacacgccggttagaggcgctcatgagcaatgagcctcccgtaagtcgaaagggcaaaaacaaagaatggtcggatgagacgtctcgacaactcagtcagcttaggctggtcatttcaggcgtagctacactatttgatccaaagagggcatctggcgaggcgaatggccacgttaacggcaatggcaccatcgatgattctagcgatgtggtcatggaagacgacgacgaaacggaagccgacgacccacttgcggaggccggagaagatgatgagactaagccacaattcaaataccaggcaggatatttactcacctccgacactcctctttacaaccggctccacactctgcgagaaaacattggcaagctcctctcgagaactcactcctttttgaataccaaccaggaggacgacgtagcttgcttcactgctctgtactcgacgtaccggacgtggatcaccgatgtcggctttgagcgatcggctcatcccctcgatcgcctcattcggctctataaggcagacatcgcgcctttcaagattagcggtcttcgcaagatctatccgcgcccattgctgattaaaagggcagatggttatcagcaacagcgtgtcaagcataacgctacggtgagacgcaagagctcattggacaaacgacttcttctggatctagctgaatcatgtgtctcgccgtacactgatgcactggatgagatggatcatgatcgcatcaaaggcgccatgtataccttattgtttaccagccttctcaagaccttgatgaaggactggcgcttcgccccggaactgatgcgtctttatatcagagctgctggtgtcgacaaaacgtctattcaaactctcggctccactgcagtctatccgctcatagagttcggtaagaggttcgaactaatggtgatcacggatcaagacattctcgacacgatcaagcccggagtggactgttctaaaatgatagacgcgaggcacgagtttatcgttgagagacgagagaaagtggagcaaaagaaggcaagcctggggctagagttgacgaagctcgcaaaggagtcacactggaagacagcgagtcgctgtgtcatcttcgccgccaacctatgtcttcgctttaagagccttgcgcccccggaattcattgaccttttggtgaggggcactaatgatccccatccgggtttgagggccacttacctctctgccttttcggcgatcttctccatgatcgatgagcgggccatctacgatcattcctactcgaactatttgctcgagaaggaacacgagatcaacaagatcattgtacccgttgccaaaggcgatgccgcctacacatccaagtatttggacaacttcaagaatcccacgaatgttgagtattacattgatgctgatcatccaggatggcttgtctgggggaagcagttccacgccttcaagggtaagtcccagagatttgacgactacgacgagctggagaaagccgcgaggaagcagatcggcgatctgctcacgcgtgaatggctcagcaaattctacgaacacctgaagcaggagcctagggattcaacggccgataggttcaggacgcccaacgtcgtcttgctcatgcatgtgttcgatctgatgcactacggtcagacagccctcaagtttgaagacgtaaaggagttgacccttgaggtttatggagatggtagcgataaacaccagcaccgcgccacggcggagattcttggcgccttgcttggtggcctggccgattcgccagccgagatgaaggcgcctgtatgggattttgccttgccgctcattactagcgtgttccaagacaatctgacaccggaaaaccaaacgtattgggtgacatttctgcattttctttcggacagtaaagatccacggcgttgttacgcgctcgtgtcctggctcagcgaattccgacttgacatgacttctaatgcggctttcaaagaatcgtccaaagttgggcttctcgacttcctgattaatgatggtggatggcactatcgccacgagaagccaattttggaagacttcctagctcacattgatcacccttacaaatctgtccgggaggcgattgggcgagttatctctacgatctatcgtacccgctattatgaagctttcgagaatgtggacacgttgctcgagcaaaacaaagcagattcgagcatcggaatccgtccctacaagcccacagacgagttcatagccaccatcaaggatgttttcgaccgtttagagaggtggcgtcacgaacggacacctggctcacatacgccttctccgtacacttcgggctccaagactgtattaacatggcttgatggcaccctatcgtcgcaagaatgcacacagctgataccattcttccctgacccgttcattgatcaattattgcacatgatggatgtcaaagaggacccagagcttatgcggcttgcgtatcacgtgtatcggcatctacccaacatccctttccgaaccggcgaagatggaccgttcatcgcggctctaatccgacttggcaagactgcgacaagctggcaccaacgtctgcgtgcccttgtgaacatgcaagtcatctacttcaggcgtctctttctcatggataatacacagcgaaagctcctgttcgatgctgtcggtgacatgctagcagatccccaacttgaagtgaggacagtgtctggctcgacgcttgctggcatgattcgatgctctccagtgcccatccgcaaccccatcatacaagagtttaaggcacgtttcgagacgcagttggcgaagaacccgatgccgaagaaaaaagcgcccggcaccgaaacgccgtctggcgacaccctgagggtagtgaagaggcacgcagctgtacttggtctcggagcattgattgaagcattcccttatctcacaccgccacccaagtggatgcccgaggttctcgcgctcctcgcacgacgcgctgctagcgacccaggtatcgtcgggaaagccaccaagagcatcttatcggaattcaagaagacaagacaggacagttgggctgtcgatcagaagtactttacccccgaccaactagaggacctagaaggtgttctctggaagagttactttgcgtaa

SEQ ID NO: 26979 - protein, 1919 aa, Muscodor strobelii
  misc_feature: SGI Peptide ID NO. 569234
  misc_feature (1)..(1919): NCBI GI: 164425515 Blast Desc: NCU05620 [Neurospora crassa OR74A] gi|40881951|emb|CAF06270.1| conserved [Neurospora crassa] gi|157070956|gb|EAA30880.2| NCU05620 [Neurospora crassa OR74A]
  misc_feature (27)..(1919): NCBI GI: 171682604 Blast Desc: protein product [Podospora anserina] gi|170941261|emb|CAP66911.1| protein product [Podospora anserina]
  misc_feature (29)..(1919): NCBI GI: 46124079 Blast Desc: FG06417.1 [Gibberella zeae PH-1]
  misc_feature (1)..(1919): NCBI GI: 256727187 Blast Desc: [Nectria haematococca mpVI 77-13-4]
  misc_feature (1)..(1919): NCBI GI: 261359300 Blast Desc: conserved [Verticillium albo-atrum VaMs.102]
  misc_feature (26)..(1919): NCBI GI: 145607561 Blast Desc: MGG_04342 [Magnaporthe grisea 70-15] gi|145015084|gb|EDJ99652.1| MGG_04342 [Magnaporthe grisea 70-15]
  misc_feature (27)..(1919): NCBI GI: 156064295 Blast Desc: SS1G_00155 [Sclerotinia sclerotiorum 1980] gi|154691017|gb|EDN90755.1| SS1G_00155 [Sclerotinia sclerotiorum 1980]
  misc_feature (26)..(1919): NCBI GI: 225682642 Blast Desc: conserved [Paracoccidioides brasiliensis Pb03]
  misc_feature (26)..(1919): NCBI GI: 226285135 Blast Desc: conserved [Paracoccidioides brasiliensis Pb01]
  misc_feature (26)..(1919): NCBI GI: 242769502 Blast Desc: proteasome activator subunit 4, [Talaromyces stipitatus ATCC 10500] gi|218724975|gb|EED24392.1| proteasome activator subunit 4, [Talaromyces stipitatus ATCC 10500]
  misc_feature: Useful for introducing or modulating the production of volatile compounds
MDEGFEPSSAQAFNIASHILNPQAVGDTISRATSPGLPSSTRGDDSKRYRTRTFAYFQLLPYPVEEEAQRDAALQGILKQLYIAVKAEDFSPGALHWTRQLQAWMSLKFDMPRELRAKLAKLYFHLALAPGLDASATDRFSRMVVTLTRKKNFLRPQDDLTLDWRPLWKVIKNIVLPEEAPAHHATMRRGMKNLWKLCLHAQSYFDPKERHAMLHEILPYFSTSDLSDAFIVFGVMNFLMPTAPAPPTEPLSRPADFLPTFFHLWSLVSRSKVTDNTMLDIFSRLARDYLACTHVPFGEHGIFTRDQSDLIFTAILRLTDIPVGQANSPYTNVDYSAGMAMFLEKDKKKHPVTYIIARWIVSSLSPFCLEGDSSVLCSLEGLMESVDTFFHPSNHGSWTRMLSHLTYYLTELFVSRWNKEQNGEQDTPADRQINAALKKRFVLCLREVTFMGLFGKGNQITSMYFGALQNLTYLEPDLMLPGALQRFYPSLQGLVEVHRTTSSLIGLQMIANVMTRQKGFRCHVTALLALALPGIDANDLNKTQYTLNFLQTVAYSIPFVNLAKENSKIHDTSLAMQFVQSEMDRMETEGQDVKIDYANELSDEDEADIARSSTAGFGEFVITLLGKVFTLLENLPDMHARSGSPEDNIINTLPAALTPMFASLSPELFDLALEKLATFVSSHVVHQARDAMAWICNALCKVNPEKTLKVFIPMLIINIRHEIDSNGAASDRSSGAEILPRDRALVWHISILSMCVVHVGSEVLKYKKDLFSIAEYMQEKCRGLPTIHISNFIHHLLLNLTHTYPIDTALFEPEVFERGLDIEDWGKTTAPADLTIRWHRPVIEEIQFATELFESQAEAATRRLEALMSNEPPVSRKGKNKEWSDETSRQLSQLRLVISGVATLFDPKRASGEANGHVNGNGTIDDSSDVVMEDDDETEADDPLAEAGEDDETKPQFKYQAGYLLTSDTPLYNRLHTLRENIGKLLSRTHSFLNTNQEDDVACFTALYSTYRTWITDVGFERSAHPLDRLIRLYKADIAPFKISGLRKIYPRPLLIKRADGYQQQRVKHNATVRRKSSLDKRLLLDLAESCVSPYTDALDEMDHDRIKGAMYTLLFTSLLKTLMKDWRFAPELMRLYIRAAGVDKTSIQTLGSTAVYPLIEFGKRFELMVITDQDILDTIKPGVDCSKMIDARHEFIVERREKVEQKKASLGLELTKLAKESHWKTASRCVIFAANLCLRFKSLAPPEFIDLLVRGTNDPHPGLRATYLSAFSAIFSMIDERAIYDHSYSNYLLEKEHEINKIIVPVAKGDAAYTSKYLDNFKNPTNVEYYIDADHPGWLVWGKQFHAFKGKSQRFDDYDELEKAARKQIGDLLTREWLSKFYEHLKQEPRDSTADRFRTPNVVLLMHVFDLMHYGQTALKFEDVKELTLEVYGDGSDKHQHRATAEILGALLGGLADSPAEMKAPVWDFALPLITSVFQDNLTPENQTYWVTFLHFLSDSKDPRRCYALVSWLSEFRLDMTSNAAFKESSKVGLLDFLINDGGWHYRHEKPILEDFLAHIDHPYKSVREAIGRVISTIYRTRYYEAFENVDTLLEQNKADSSIGIRPYKPTDEFIATIKDVFDRLERWRHERTPGSHTPSPYTSGSKTVLTWLDGTLSSQECTQLIPFFPDPFIDQLLHMMDVKEDPELMRLAYHVYRHLPNIPFRTGEDGPFIAALIRLGKTATSWHQRLRALVNMQVIYFRRLFLMDNTQRKLLFDAVGDMLADPQLEVRTVSGSTLAGMIRCSPVPIRNPIIQEFKARFETQLAKNPMPKKKAPGTETPSGDTLRVVKRHAAVLGLGALIEAFPYLTPPPKWMPEVLALLARRAASDPGIVGKATKSILSEFKKTRQDSWAVDQKYFTPDQLEDLEGVLWKSYFA

SEQ ID NO: 26980 - DNA, 7476 bp, Muscodor strobelii
  misc_feature: SGI EST ID NO. CUFF.63727.0
  misc_feature: Variant of the nucleotide sequence at SEQ ID NO 26978
ctttagtatttagcccagcccggcccagcccatcgcattgcatcccgcctgccgcccttcgcagcgcacgccggggtagcagaacacaccgcgggtggtctagccaacggcgaagcttcgacatcgacaacagcccccaacccgacgtcgcaccaaacgcatatcatcatccccaatagccgccacgccgccacacgttaccgcattactgcacaactccatcccttgggtgcccggcatcgccatccattgcatttgctttgggggctgcgagctaggtattatctgtgtattacttgctactttacaggttgcaggtaacagattgcaggtagatagacggtggcacgcaggtagactgtgatagggacaacagacgttgttagagacgttgttagctgtgcctcgccagcgcatcgcatcgcactcgggccaccggtgtcagtctatcgccatcggattcgattcgccacgagccactcgagacacacgaagacgtactcggcggcagtccacgaccacacccggtcctacgtcccacctcgcccgtcccacgttcaaccgccctctcaatccggccatcgcccggtgtgacgagataggtcgatcgtgccaccctttgctctcatcgccattccctcttcgcagttgttggagcaaatcaacccctcctccaaccggccgatcatcacgttgcggcactcgacgagtacatctctctccctccctctcccacctgcgacccgagcctcgacagacaatcctcggccatggatgagggcttcgagccgtcatcggcgcaagcgttcaacattgcttcccacatcctcaacccccaagccgtcggcgacaccatctcccgtgccacctcgcccggcctgccctcctcgacgagaggcgacgacagcaaacgctaccgaacccgaacctttgcctacttccagctgctcccctatcccgtcgaagaggaggcccagcgcgatgctgctctgcagggaatcctaaagcaactctacatcgccgtcaaggcagaagacttctcgcccggggctctgcattggacgcgtcagctgcaagcatggatgtccttgaagttcgatatgccccgcgagctacgcgccaagctcgccaagctctatttccatctggctctggctccaggcttggatgcgagtgctactgaccgattctccagaatggtggtgaccctgacgagaaagaagaacttcttgcggccccaggatgacctcaccctcgattggagacctctttggaaggtgatcaaaaacattgtattgcccgaagaggctccggcccaccacgcgaccatgcgacggggcatgaagaacctctggaagctgtgtctacacgcacagtcctacttcgaccccaaggagcgtcacgccatgctgcacgagatcctcccctacttcagcacgtcagacctttcagacgccttcattgtattcggcgtcatgaacttcctgatgcccacggccccggcgccacctaccgagcctctctcgcggccggctgatttcctgcccacattcttccacttgtggtccttggtatcccggtctaaggtgacggacaacaccatgctcgacatcttctcgagactggcccgagactatcttgcctgcacccatgtgcccttcggcgagcacggcatattcacacgagaccagtccgatctcatcttcaccgccatcctgcggctcacagacatccccgttggccaggccaactcgccttacacgaacgtcgactattcggccggcatggccatgttcctcgagaaggacaagaagaaacatcccgtgacgtacataatagcccgctggattgtctcttccttatcgccattctgcctggaaggagacagctctgtcttgtgcagcctcgagggtctcatggagtctgtcgacacctttttccacccttccaatcatgggtcgtggaccagaatgctctctcatctgacctattacttgaccgagttgttcgtctctcgctggaacaaggagcagaacggagaacaagatactccggcggacaggcagatcaacgcggcgttgaagaagcgatttgtgctgtgcttgcgagaggtcaccttcatgggtctgtttggcaagggaaaccagataacttccatgtatttcggggccctccagaatttgacgtatctcgagcccgatttgatgttgcccggtgccctccagcgattctacccttccttgcagggtttggtggaagtccaccgaaccacatctagtcttattggcttgcagatgattgccaacgtgatgaccagacagaagggcttcagatgtcatgtcacagccctgctagctttggcactgcctggtatcgatgccaatgacctgaacaagacccagtacactctcaacttcctccagacggtggcctacagcattcccttcgtcaatctagccaaggagaatagcaagatacacgacacgagcttggctatgcaatttgtgcagagcgagatggaccgcatggagaccgaggggcaagatgtcaagattgactatgccaacgaactgagtgatgaggacgaagcggacattgcccgatcttccacagctggattcggcgagttcgtcatcacgctactcgggaaagtgttcactttgttagaaaacttgcccgacatgcatgccagatcgggatcgccagaggacaacatcatcaacacactacctgccgcgttgacccccatgtttgcatctttgtcccccgaactgttcgatctggctcttgagaagctagcaacatttgtatcttcccatgttgtccaccaagctcgagatgccatggcatggatttgtaatgccctgtgcaaggtcaaccccgaaaagaccctgaaagtgttcatccccatgctgattatcaacatccggcacgagatcgactcgaacggggctgcttccgaccgcagcagcggcgcggaaattcttccccgcgatagagcactcgtctggcatatcagcatactgagcatgtgcgtcgtccacgtcggtagcgaggttctcaagtacaaaaaggacctgttcagcattgcagagtacatgcaagagaaatgccgtggtcttccgactatccacattagcaacttcatccaccatcttctccttaatcttacgcacacttaccccatcgacacggcattgttcgagcccgaagtctttgaacgcggcctggacatcgaggattggggaaagaccacggcaccggctgacttgacaatccgatggcacaggcctgtgattgaagaaatccagtttgccaccgaactcttcgagtctcaggcagaagctgccacacgccggttagaggcgctcatgagcaatgagcctcccgtaagtcgaaagggcaaaaacaaagaatggtcggatgagacgtctcgacaactcagtcagcttaggctggtcatttcaggcgtagctacactatttgatccaaagagggcatctggcgaggcgaatggccacgttaacggcaatggcaccatcgatgattctagcgatgtggtcatggaagacgacgacgaaacggaagccgacgacccacttgcggaggccggagaagatgatgagactaagccacaattcaaataccaggcaggatatttactcacctccgacactcctctttacaaccggctccacactctgcgagaaaacattggcaagctcctctcgagaactcactcctttttgaataccaaccaggaggacgacgtagcttgcttcactgctctgtactcgacgtaccggacgtggatcaccgatgtcggctttgagcgatcggctcatcccctcgatcgcctcattcggctctataaggcagacatcgcgcctttcaagattagcggtcttcgcaagatctatccgcgcccattgctgattaaaagggcagatggttatcagcaacagcgtgtcaagcataacgctacggtgagacgcaagagctcattggacaaacgacttcttctggatctagctgaatcatgtgtctcgccgtacactgatgtgcgccgagtcgcacaaagcgctcaagatgcatctgtcaaggcactgattggggtagaccgctcgtcatcccggtcattctagaccgtttccgtaaggcactggatgagatggatcatgatcgcatcaaaggcgccatgtataccttattgtttaccagccttctcaagaccttgatgaaggactggcgcttcgccccggaactgatgcgtctttatatcagagctgctggtgtcgacaaaacgtctattcaaactctcggctccactgcagtctatccgctcatagagttcggtaagaggttcgaactaatggtgatcacggatcaagacattctcgacacgatcaagcccggagtggactgttctaaaatgatagacgcgaggcacgagtttatcgttgagagacgagagaaagtggagcaaaagaaggcaagcctggggctagagttgacgaagctcgcaaaggagtcacactggaagacagcgagtcgctgtgtcatcttcgccgccaacctatgtcttcgctttaagagccttgcgcccccggaattcattgaccttttggtgaggggcactaatgatccccatccgggtttgagggccacttacctctctgccttttcggcgatcttctccatgatcgatgagcgggccatctacgatcattcctactcgaactatttgctcgagaaggaacacgagatcaacaagatcattgtacccgttgccaaaggcgatgccgcctacacatccaagtatttggacaacttcaagaatcccacgaatgttgagtattacattgatgctgatcatccaggatggcttgtctgggggaagcagttccacgccttcaagggtaagtcccagagatttgacgactacgacgagctggagaaagccgcgaggaagcagatcggcgatctgctcacgcgtgaatggctcagcaaattctacgaacacctgaagcaggagcctagggattcaacggccgataggttcaggacgcccaacgtcgtcttgctcatgcatgtgttcgatctgatgcactacggtcagacagccctcaagtttgaagacgtaaaggagttgacccttgaggtttatggagatggtagcgataaacaccagcaccgcgccacggcggagattcttggcgccttgcttggtggcctggccgattcgccagccgagatgaaggcgcctgtatgggattttgccttgccgctcattactagcgtgttccaagacaatctgacaccggaaaaccaaacgtattgggtgacatttctgcattttctttcggacagtaaagatccacggcgttgttacgcgctcgtgtcctggctcagcgaattccgacttgacatgacttctaatgcggctttcaaagaatcgtccaaagttgggcttctcgacttcctgattaatgatggtggatggcactatcgccacgagaagccaattttggaagacttcctagctcacattgatcacccttacaaatctgtccgggaggcgattgggcgagttatctctacgatctatcgtacccgctattatgaagctttcgagaatgtggacacgttgctcgagcaaaacaaagcagattcgagcatcggaatccgtccctacaagcccacagacgagttcatagccaccatcaaggatgttttcgaccgtttagagaggtggcgtcacgaacggacacctggctcacatacgccttctccgtacacttcgggctccaagactgtattaacatggcttgatggcaccctatcgtcgcaagaatgcacacagctgataccattcttccctgacccgttcattgatcaattattgcacatgatggatgtcaaagaggacccagagcttatgcggcttgcgtatcacgtgtatcggcatctacccaacatccctttccgaaccggcgaagatggaccgttcatcgcggctctaatccgacttggcaagactgcgacaagctggcaccaacgtctgcgtgcccttgtgaacatgcaagtcatctacttcaggcgtctctttctcatggataatacacagcgaaagctcctgttcgatgctgtcggtgacatgctagcagatccccaacttgaagtgaggacagtgtctggctcgacgcttgctggcatgattcgatgctctccagtgcccatccgcaaccccatcatacaagagtttaaggcacgtttcgagacgcagttggcgaagaacccgatgccgaagaaaaaagcgcccggcaccgaaacgccgtctggcgacaccctgagggtagtgaagaggcacgcagctgtacttggtctcggagcattgattgaagcattcccttatctcacaccgccacccaagtggatgcccgaggttctcgcgctcctcgcacgacgcgctgctagcgacccaggtatcgtcgggaaagccaccaagagcatcttatcggaattcaagaagacaagacaggacagttgggctgtcgatcagaagtactttacccccgaccaactagaggacctagaaggtgttctctggaagagttactttgcgtaaagcggagcacgaagaccagacactatcatcacacagcaatcactatcaatagcttaccactaaggtttatcatgtctacgaactcgcttgtcaatggagagaaacttgcgatcctcggtcttggcactaaaacttgtactatacgagaacaagaagggacatgagcttcataagcttcgtcgactgggccattgccctgatgtaaacaacacgaccaaaatggtcaaaatttgttaagtgtgtgtggcgcactgtcactcccgaacttatgagtgttggctagtcagagccgcgtctcgaatgtagataaaactagctgtctaagaatggccgctgaactcgcgaacagcacatagagggatagaaagattagtggttcgagttcgagcggaccaggagtgggtttggttgattgtgaaatacggaatatgatagacaaatgaatacacactcagcttctatgtcgagagtggtatgacaacgaattagaaggtgtgcagactgtaggttatgtggcactgcccaaatgctgccacctggagctgcggtgtaacatcgattacagcattttggggccagggggcggtttcgtccttgttctttaggtcaaacgcgtggtcctgaacagcaatgccatatatacctatctcattttcaaacacgacggattcgcagcgctgcaatgcaacacaaggacgcgacatcagggtggccaaggctgactgagtcttgtcaatctcagactcctaggttggcatttctcaggcctgtcgcaatgtgtatctcgctgcttcgccaaaccccaccacttttcttttcatcattcattctttacacctagcttcaag

SEQ ID NO: 26981 - DNA, 537 bp, Muscodor strobelii
  misc_feature: SGI cDNA ID NO. 569235
  misc_feature: Encodes the peptide sequence at SEQ ID NO 26982
atgccaccggagcccgattctgggtttaacgaccaaggtgatccggctgtattagatgagatgcaggaagcccttcacggaccccagcgggacggtataatcacgacggctggaggcgaactggtagtcaacgacattgttatagccgtatctgctaaggagacgaggggcagatctagagacgccctggatcagttcacaatggcccagtactcacctaacaaggctgtcgcccaacggacattcttacacccaggaaaggagacgatcaccttgagcgtctcagctacagtcgacgagcgatccccccaggtgaccatcatcgcagtccgtgtcaaggagggcgacgaatacgtggtcaataaacagaatcctgtcaccgttcaagaacttgtcaacggcgatattcctaatttcgtgactattggttgtcgcacgggtagcgatgtgcacggctattatcaagtcattcttcaagctcgtctcacgggtcttctggagatagcgcttgctttggatgcgattcctggtgtataa

SEQ ID NO: 26982 - protein, 178 aa, Muscodor strobelii
  misc_feature: SGI Peptide ID NO. 569235
MPPEPDSGFNDQGDPAVLDEMQEALHGPQRDGIITTAGGELVVNDIVIAVSAKETRGRSRDALDQFTMAQYSPNKAVAQRTFLHPGKETITLSVSATVDERSPQVTIIAVRVKEGDEYVVNKQNPVTVQELVNGDIPNFVTIGCRTGSDVHGYYQVILQARLTGLLEIALALDAIPGV

SEQ ID NO: 26983 - DNA, 210 bp, Muscodor strobelii
  misc_feature: SGI cDNA ID NO. 569236
  misc_feature: Encodes the peptide sequence at SEQ ID NO 26984
atgccgaaaacagacgaagaaatccaacgggagaaggacattgcggagggacaaagaatcgctcgagagcagaaccgaaaggctgaagcagaaaagttgaagagggaacaaaaggagagagaggagcaagccaagggtttcgaggacgacgatgactttgctccaaaagtcgattacgttggcgaagagaaatactggccacgaaaatga

SEQ ID NO: 26984 - protein, 69 aa, Muscodor strobelii
  misc_feature: SGI Peptide ID NO. 569236
MPKTDEEIQREKDIAEGQRIAREQNRKAEAEKLKREQKEREEQAKGFEDDDDFAPKVDYVGEEKYWPRK

SEQ ID NO: 26985 - DNA, 469 bp, Muscodor strobelii
  misc_feature: SGI EST ID NO. CUFF.63616.0
  misc_feature: Variant of the nucleotide sequence at SEQ ID NO 26983
ccgaaaacagacgaagaaatccaacgggagaaggacattgcggagggacaaagaatcgctcgagagcagaaccgaaaggctgaagcagaaaagttgaagagggaacaaaaggagagagaggagcaagccaagggtttcgaggacgacgatgactttgctccaaaagtcgattacgttggcgaagagaaatactggccacgaaaatgatggtgcaatggcccggtcaggagctctgacagaggtctctcttcttaggtcgtaaatggctaatgcctaggcactattgaaggtcatttgttaggtcaggttaggttaggtgtttgcttttttgtttttgtttctttgcttgggggtttaggcttggaatttccatgcttcgctcgtttatctggctttgaagtctatttcttcactctgaattgatcttagtttaattgtcgctcattatcacaagcacagcccaggaggt

SEQ ID NO: 26986 - DNA, 210 bp, Muscodor strobelii
  misc_feature: SGI cDNA ID NO. 569237
  misc_feature: Encodes the peptide sequence at SEQ ID NO 26987
atgtcagacgggtccaacttccagcctgaaaacctgggcggtgaacatgcctcaacctctgggtccggcaacacacagcaggcgaacgatgtcctgggtatgggatcccagttctggggaatcgataccgacccctccaagtatcccaagacactttctgtcaagtctaagacctcaggaaagaagaaaagtaaagatgttcgccgatag

SEQ ID NO: 26987 - protein, 69 aa, Muscodor strobelii
  misc_feature: SGI Peptide ID NO. 569237
MSDGSNFQPENLGGEHASTSGSGNTQQANDVLGMGSQFWGIDTDPSKYPKTLSVKSKTSGKKKSKDVRR

SEQ ID NO: 26988 - DNA, 933 bp, Muscodor strobelii
  misc_feature: SGI EST ID NO. CUFF.63628.0
  misc_feature: Variant of the nucleotide sequence at SEQ ID NO 26986
cgccggggttagatccgttgtcgatgctcataggctgactcaatctcagatgataatgaggctgatcttcgctgtccacgccaagacaaatgctggtgggactgtttgccaatttccaattggtctggcgctcaaggtctgatcttgactggacagcaggaacgagaaattcgcccgcatttcggtgtaatgattcagtgaccatttacaagatgctggagtatcgtaatttattagacgatagctgcgacgacgctggtttccagggcaaagggttacagctatgcctgcaccttgttgtcactgacgatatcgaccacgttctttctgtcgacaggtggtcaggtagtctgtctataagtaaaaggcttccccgacgaaaaagctattctctcatacatcaaaaaatcattcctcagcccgaagaagatattcgaaagtcttgcttgttaaggtgtgctctccgtcgatttttggccaggccctgcaagttgcatcactcgcaggctgtccaacgcatatcatcatctgtcaagtaacactatcgtcaaggttgttagtcttagccatgtcagacgggtccaacttccagcctgaaaacctgggcggtgaacatgcctcaacctctgggtccggcaacacacagcaggcgaacgatgtcctgggtatgggatcccagttctggggaatcgataccgacccctccaagtatcccaagacactttctgtcaagtctaagacctcaggaaagaagaaaagtaaagatgttcgccgatagattgatgctggaccatttcgtgaaggcgtcagaactacaatagtcggacggtattagtattgatgagctatgagactagaggtcgaatcaatagaggaaggctgcaagtttcggtagttagctgtatacattcgttacaattagaagactgctca

SEQ ID NO: 26989 - DNA, 3132 bp, Muscodor strobelii
  misc_feature: SGI cDNA ID NO. 569238
  misc_feature: Encodes the peptide sequence at SEQ ID NO 26990
atggaagccgtcggcctggtctcctcggtcatcacactggccgaggtcatcctaaaggcaatcagcgttgtgcgtggtgtcagtacagcgtctacagagaaggccgagatgcatatggagctcgcatcactccatgctctgctagtgtctctagagtaccacctagcctctgcggacgataaatcagacccggaggcttgggcacctgggctgcttctacctgctataggcgacgtcaacgaagacctcatcaagctatatacgaaacatctgtcgtctatgagagatgatcttgatgcgctgaagatcggcgagcaggcacgcgaagctcaaaaaatcattgagcgctgggcgccacttgatctttcgggttcgcagacaacagcgttcgatcgcgtctccccggggactggcgaatggtttctaagatccaaagcggtacaagattgggtttcgaacttggggtctacgatatggtgctcagggcagcctgccgcaggcaagactgtcatgacgtccatcgcggtcaattggcttcgcaatgagtacaaagaccctgactacgataacatcgcagtggcctatgcctattgcgactacaaacaaaaagcgttccaaacgccgataaatatattgatggctctttggcgtcaactaattgaacccggattcgaacagggtaaaaaggtgcagaagctttgggaagacactaagaatggtttgacccagccgagccaagaaaagcttatcgaagttttacaagaagcgatggagaacatgtcacgaacttttatactcgtggatgccttggacgagatctcgcccgatgacgccgaaacgctgatgagcgcactgaagtcacttcaatcgaagaacaattgtagtatattggtcacctctcgcgacattccgtcgattgctgacatattcgaggacctctttgagagttacgatcgactcaagatttatgcacgcccggatgacattgttcgctatatacaggcgagaattaccgaagaacggtgttttagaaggatcaaggagaggctaccatcattcgaagacgatatcatcaaggctatcatcccgcagtgcaatggcatgtttctgcttgctcgcttatacatagacagccttacgaagagatcaacaaatgttgcgcgattcaaacaggctcttcaaagtctaccggaaggtctggatgacacatacgacgatgctatgggtcgcatagagtccgatgaattccctggacagagagatgatgcgattaggtccttgtattgggtcgccttcgttgagtacccgcttggcgtccaggctctggctcatgcccttgcgacagaaccggacgattcagactacaatgtggacaatgagttcatcggtgatatcacttctatatgcgctgggctcattgttgttgactctatcactcagacggttcggcttgctcatgccacgacccatgagtatctgagaaagaaccaagcaagatggttcccagatctgcgaacacatatggtgcatacgatgttgacatatctttcattcgatacgttgacacggcccttaaacaaggaccagacgctacaagcgatgattgcgaaataccctttactcccatacgctgcagagcattggggagatcacttcaatgaagtggacgatccaattgggaccatccatgcacttgcaacgcgcttcatgaaatcggattaccgcgtttccgatgcgctagtaagggatcaagtcgttgcatgcacccaagccagtcacggtggtaatcctctgtctgggaatattcatgggcttcacattgcggtacttatggaccttccaatcttcgttacagcgatccagaaatacgaactggagaacccgccacctaacccactgggaatctcaccattaaccctggcggcatcactagatcgtgtacatattgcgaaactgctgatcgatagtggcgcagatgttcacggcgtgcctggatttccctggagaccaattcaccacgcagcgggccttgggcactctgttggcatagtcaatttgctcctcgagcacggagctaacatagatgaaagagtttcaaaagacccgagcgatgagctaaactacccttgcgccgttggccaaactcctttgtacgaggcatcagtctggcataatctcgagatagccgaagtcctttttgcgagaggggccgatgccaatcttccgatcgcgatcggacgggagagtgtcctcacctccgagggcactcggtatcattcaggagcctggccggcattcgcaaaacatctgcctgagagcttctacaagagtcaaagtttcatgtcggatttcgtcgagcaagccaccattgataatatcaaggcacttgttgagatgattggaaacgacatcaacgcgggctaccctaatcttcttgatcacgccatcgcctacggagatggcgagaagatcaagctcttgctcgatcattgtgcgatacccaagcggcgatatgagatggacagtgaagctattgcccgatactcaacagcttcgtggttctcgtccttgtgtagcgcgattgaaacaagcgcccaataccccggaggtggtgacagcatccctttggtgatgaatcaggcaacatacgatccgccactagcagtagatcagtcctcgccatatacaccctgcctgtccgttgtggtggatgataacgtggtcttccccgtgcgagccatcgcattcaagtggacgtcgcatgatcaaggattcagcggtaaccgcagcgcatggggcacctacgaggactctcatacgtggttcgaggcaagggtgaacaacaaaagttgtccgcagccactctcctctagggaagatgccggcgacttttcccggacagtgtacataaagcccaacatgcacgccgagtggagttggagatcgcacacgaaggtttgggaccgggaacattccgaaaagcgagagttcttagactatatacggagcggcagtgtcgttgaggtgttccctagagctatgtacccggcttgggtaaactacttgcaatccatgcaagtgagtatttatgatagtcatccggaccgagtccaacaagagtttagttcatag

SEQ ID NO: 26990 - protein, 1043 aa, Muscodor strobelii
  misc_feature: SGI Peptide ID NO. 569238
  misc_feature (633)..(661): Pfam Id: PF00023 Pfam Desc: Ankyrin repeat
  misc_feature (712)..(744): Pfam Id: PF00023 Pfam Desc: Ankyrin repeat
  misc_feature (98)..(829): NCBI GI: 119479349 Blast Desc: Ankyrin repeat protein [Neosartorya fischeri NRRL 181] gi|119407857|gb|EAW17806.1| Ankyrin repeat protein [Neosartorya fischeri NRRL 181]
  misc_feature (90)..(738): NCBI GI: 225557065 Blast Desc: ankyrin repeat protein [Ajellomyces capsulatus G186AR]
  misc_feature (112)..(738): NCBI GI: 256720834 Blast Desc: NECHADRAFT_85540 [Nectria haematococca mpVI 77-13-4]
  misc_feature (97)..(738): NCBI GI: 238491078 Blast Desc: ankyrin repeat-containing protein, [Aspergillus flavus NRRL3357] gi|220697189|gb|EED53530.1| ankyrin repeat-containing protein, [Aspergillus flavus NRRL3357]
  misc_feature (97)..(738): NCBI GI: 169773129 Blast Desc: [Aspergillus oryzae RIB40] gi|83768894|dbj|BAE59031.1| protein product [Aspergillus oryzae]
  misc_feature (82)..(733): NCBI GI: 169782465 Blast Desc: [Aspergillus oryzae RIB40] gi|83774438|dbj|BAE64562.1| protein product [Aspergillus oryzae]
  misc_feature (72)..(691): NCBI GI: 212541358 Blast Desc: serine/threonine-protein kinase ripk4, [Penicillium marneffei ATCC 18224] gi|210068133|gb|EEA22225.1| serine/threonine-protein kinase ripk4, [Penicillium marneffei
  misc_feature (79)..(688): NCBI GI: 242821429 Blast Desc: ankyrin repeat-containing protein, [Talaromyces stipitatus ATCC 10500] gi|218712600|gb|EED12025.1| ankyrin repeat-containing protein, [Talaromyces stipitatus ATCC 10500]
  misc_feature (126)..(741): NCBI GI: 238508580 Blast Desc: Pfs, NACHT and Ankyrin domain protein [Aspergillus flavus NRRL3357] gi|220688371|gb|EED44724.1| Pfs, NACHT and Ankyrin domain protein [Aspergillus flavus NRRL3357]
  misc_feature (83)..(695): NCBI GI: 171693393 Blast Desc: protein product [Podospora anserina] gi|170946645|emb|CAP73448.1| protein product [Podospora anserina]
MEAVGLVSSVITLAEVILKAISVVRGVSTASTEKAEMHMELASLHALLVSLEYHLASADDKSDPEAWAPGLLLPAIGDVNEDLIKLYTKHLSSMRDDLDALKIGEQAREAQKIIERWAPLDLSGSQTTAFDRVSPGTGEWFLRSKAVQDWVSNLGSTIWCSGQPAAGKTVMTSIAVNWLRNEYKDPDYDNIAVAYAYCDYKQKAFQTPINILMALWRQLIEPGFEQGKKVQKLWEDTKNGLTQPSQEKLIEVLQEAMENMSRTFILVDALDEISPDDAETLMSALKSLQSKNNCSILVTSRDIPSIADIFEDLFESYDRLKIYARPDDIVRYIQARITEERCFRRIKERLPSFEDDIIKAIIPQCNGMFLLARLYIDSLTKRSTNVARFKQALQSLPEGLDDTYDDAMGRIESDEFPGQRDDAIRSLYWVAFVEYPLGVQALAHALATEPDDSDYNVDNEFIGDITSICAGLIVVDSITQTVRLAHATTHEYLRKNQARWFPDLRTHMVHTMLTYLSFDTLTRPLNKDQTLQAMIAKYPLLPYAAEHWGDHFNEVDDPIGTIHALATRFMKSDYRVSDALVRDQVVACTQASHGGNPLSGNIHGLHIAVLMDLPIFVTAIQKYELENPPPNPLGISPLTLAASLDRVHIAKLLIDSGADVHGVPGFPWRPIHHAAGLGHSVGIVNLLLEHGANIDERVSKDPSDELNYPCAVGQTPLYEASVWHNLEIAEVLFARGADANLPIAIGRESVLTSEGTRYHSGAWPAFAKHLPESFYKSQSFMSDFVEQATIDNIKALVEMIGNDINAGYPNLLDHAIAYGDGEKIKLLLDHCAIPKRRYEMDSEAIARYSTASWFSSLCSAIETSAQYPGGGDSIPLVMNQATYDPPLAVDQSSPYTPCLSVVVDDNVVFPVRAIAFKWTSHDQGFSGNRSAWGTYEDSHTWFEARVNNKSCPQPLSSREDAGDFSRTVYIKPNMHAEWSWRSHTKVWDREHSEKREFLDYIRSGSVVEVFPRAMYPAWVNYLQSMQVSIYDSHPDRVQQEFSS

SEQ ID NO: 26991 - DNA, 209 bp, Muscodor strobelii
  misc_feature: SGI EST ID NO. CUFF.63634.0
  misc_feature: Variant of the nucleotide sequence at SEQ ID NO 26989
cggggactggcgaatggtttctaagatccaaagcggtacaagattgggtttcgaacttggggtctacgatatggtgctcagggcagcctgccgcaggcaagactgtcatgacgtccatcgcggtcaattggcttcgcaatgagtacaaagaccctgactacgataacatcgcagtggcctatgcctattgcgactacaaacaaaaagcg

SEQ ID NO: 26992 - DNA, 1419 bp, Muscodor strobelii
  misc_feature: SGI cDNA ID NO. 569239
  misc_feature: Encodes the peptide sequence at SEQ ID NO 26993
atggctaccgacagcaagcacggcgcgttgccgaaaaccccgtcgccgtcacctccggtccgcagtcgggagcggcgcgccaagttttggctctctttgcaggtagtctgtaccattttggtgcttatctactacaatctcaacacgccatacgactcatctcacaaatcacctatagaggagccagtatcaattgcaagctcactggagacatgcgcatgggaaactctatcagaacacacatcactgctctccgtgccgccaatcacgcgctcggaattccttgctcgacaggaagtgctggcagccactttacgcgatgagggcatcgacgctttcatcgcggaaccatccgcttcttcaacatattatcacaacatatcctcaaaattcgatctctccgaacgcccataccttagcattttatcgtcgtcgggagaattttcttacctggtcccgcagttcgagactggacgtatcaacccctcgtcgcaacacatggttttcgaaggcgatgccgacgcagccgcgatcccctggccggaagagagtattccgtatgctgtactcaaggagaagagaggtgggttgaaaaagatcatgatcgatgaacatgcgcgtcatatgatagctgctggcctgcaagatgtgggtattgaagttgtgcctatgagtcttgaggtcaagcagttgcgtgctgtgaagacggatgccgagatcgacatcatgaggggcatcagctctttcacgcgacagcttatacgatctttacaaggatgcatcaaagtgggcacatcccaagaggatctcgtggctactggccgtgccctctttactcgtgctggtgtcggcgaaacatactgggcgattgcgttgtttggtcctcaggccgcgtacccgcatggagggaaaggaggtgcaatcctgcaagagggccaattcatactattggacattgggagtgtattacacggctacggcagtgatgtgacgaggacatttctcccagtaggcggtactgtcagcgatgacttaatggagatctgggaaactgtgcacaaatctcagagcgctggtttcgcgaaaatgttcccgaatgagacgtgtcgcgacgccgatgcggcgtctagagtgcccgttgacaaacttggctataaagacttctacacgcatcgccttggtcatggattgggactcgcgatacatgagcatccgtacttgaacggcgcgaatgaagagaagctcagggctggagtggttgttactaatgagccgggtatctacgtgaccaatgaacaagcaaaatcactcggaaagagtgaaggctttggtgtcagattggaagatccaatactggtgacggaagatggtggtgttccattgacagggcgccgggcagtgtcaccgtgggacccatag

SEQ ID NO: 26993 - protein, 472 aa, Muscodor strobelii
  misc_feature: SGI Peptide ID NO. 569239
  misc_feature (241)..(463): Pfam Id: PF00557 Pfam Desc: metallopeptidase family M24
  misc_feature (294)..(463): Pfam Id: PF00557 Pfam Desc: metallopeptidase family M24
  misc_feature (14)..(472): NCBI GI: 154320656 Blast Desc: BC1G_01800 [Botryotinia fuckeliana B05.10] gi|150853489|gb|EDN28681.1| BC1G_01800 [Botryotinia fuckeliana B05.10]
  misc_feature (11)..(472): NCBI GI: 156040383 Blast Desc: SS1G_12208 [Sclerotinia sclerotiorum 1980] gi|154696264|gb|EDN96002.1| SS1G_12208 [Sclerotinia sclerotiorum 1980]
  misc_feature (83)..(472): NCBI GI: 154308161 Blast Desc: BC1G_07826 [Botryotinia fuckeliana B05.10] gi|150852911|gb|EDN28103.1| BC1G_07826 [Botryotinia fuckeliana B05.10]
  misc_feature (82)..(472): NCBI GI: 162312259 Blast Desc: X-Pro dipeptidase () [Schizosaccharomyces pombe] gi|30913537|sp|Q9UUD8.1|YOD1_SCHPO RecName: Full=Uncharacterized peptidase C18A7.01 gi|157310438|emb|CAA20739.3| X-Pro dipeptidase
  misc_feature (19)..(472): NCBI GI: 156058760 Blast Desc: SS1G_03392 [Sclerotinia sclerotiorum 1980] gi|154701179|gb|EDO00918.1| SS1G_03392 [Sclerotinia sclerotiorum 1980]
  misc_feature (87)..(472): NCBI GI: 169611831 Blast Desc: SNOG_09030 [Phaeosphaeria nodorum SN15] gi|160702374|gb|EAT83222.2| SNOG_09030 [Phaeosphaeria nodorum SN15]
  misc_feature (90)..(472): NCBI GI: 212529844 Blast Desc: xaa-pro dipeptidase, [Penicillium marneffei ATCC 18224] gi|210074477|gb|EEA28564.1| xaa-pro dipeptidase, [Penicillium marneffei ATCC 18224]
  misc_feature (90)..(472): NCBI GI: 212529846 Blast Desc: xaa-pro dipeptidase, [Penicillium marneffei ATCC 18224] gi|210074478|gb|EEA28565.1| xaa-pro dipeptidase, [Penicillium marneffei ATCC 18224]
  misc_feature (61)..(472): NCBI GI: 242762069 Blast Desc: xaa-pro dipeptidase app, [Talaromyces stipitatus ATCC 10500] gi|218723500|gb|EED22917.1| xaa-pro dipeptidase app, [Talaromyces stipitatus ATCC 10500]
  misc_feature (18)..(472): NCBI GI: 145231232 Blast Desc: An01g14920 [Aspergillus niger] gi|134056011|emb|CAK37446.1| protein product [Aspergillus niger]
MATDSKHGALPKTPSPSPPVRSRERRAKFWLSLQVVCTILVLIYYNLNTPYDSSHKSPIEEPVSIASSLETCAWETLSEHTSLLSVPPITRSEFLARQEVLAATLRDEGIDAFIAEPSASSTYYHNISSKFDLSERPYLSILSSSGEFSYLVPQFETGRINPSSQHMVFEGDADAAAIPWPEESIPYAVLKEKRGGLKKIMIDEHARHMIAAGLQDVGIEVVPMSLEVKQLRAVKTDAEIDIMRGISSFTRQLIRSLQGCIKVGTSQEDLVATGRALFTRAGVGETYWAIALFGPQAAYPHGGKGGAILQEGQFILLDIGSVLHGYGSDVTRTFLPVGGTVSDDLMEIWETVHKSQSAGFAKMFPNETCRDADAASRVPVDKLGYKDFYTHRLGHGLGLAIHEHPYLNGANEEKLRAGVVVTNEPGIYVTNEQAKSLGKSEGFGVRLEDPILVTEDGGVPLTGRRAVSPWDP

SEQ ID NO: 26994 - DNA, 1919 bp, Muscodor strobelii
  misc_feature: SGI EST ID NO. CUFF.63644.0
  misc_feature: Variant of the nucleotide sequence at SEQ ID NO 26992
atgtgttgaagacgaccattcaaagcagccggtgagaagttagaacttgccgtctccgagattcgttgaatgtgagaagttgcaagcaattgcagatctttcaaacagcacgcagatccgggtgtgagccgaatgcaacgcgtgggccggaatcattgtcgtagaccgcatcaagcacgctgatcttttgtcgggcctgaaagagtgagaatatggacgagactcgttgaaaagggtcttgaggattgaggcgagggcggagacgcgataacgaatatgcgacaccgaggtcggcccacagtaggagacccatagcaagaccaacgtcataccttcaccagccacttgcgacgagagacagcagtgacttgttcatttctcacatcaaaacacttaacatggctaccgacagcaagcacggcgcgttgccgaaaaccccgtcgccgtcacctccggtccgcagtcgggagcggcgcgccaagttttggctctctttgcaggtagtctgtaccattttggtgcttatctactacaatctcaacacgccatacgactcatctcacaaatcacctatagaggagccagtatcaattgcaagctcactggagacatgcgcatgggaaactctatcagaacacacatcactgctctccgtgccgccaatcacgcgctcggaattccttgctcgacaggaagtgctggcagccactttacgcgatgagggcatcgacgctttcatcgcggaaccatccgcttcttcaacatattatcacaacatatcctcaaaattcgatctctccgaacgcccataccttagcattttatcgtcgtcgggagaattttcttacctggtcccgcagttcgagactggacgtatcaacccctcgtcgcaacacatggttttcgaaggcgatgccgacgcagccgcgatcccctggccggaagagagtattccgtatgctgtactcaaggagaagagaggtgggttgaaaaagatcatgatcgatgaacatgcgcgtcatatgatagctgctggcctgcaagatgtgggtattgaagttgtgcctatgagtcttgaggtcaagcagttgcgtgctgtgaagacggatgccgagatcgacatcatgaggggcatcagctctttcacgcgacagcttatacgatctttacaaggatgcatcaaagtgggcacatcccaagaggatctcgtggctactggccgtgccctctttactcgtgctggtgtcggcgaaacatactgggcgattgcgttgtttggtcctcaggccgcgtacccgcatggagggaaaggaggtgcaatcctgcaagagggccaattcatactattggacattgggagtgtattacacggctacggcagtgatgtgacgaggacatttctcccagtaggcggtactgtcagcgatgacttaatggagatctgggaaactgtgcacaaatctcagagcgctggtttcgcgaaaatgttcccgaatgagacgtgtcgcgacgccgatgcggcgtctagagtgcccgttgacaaacttggctataaagacttctacacgcatcgccttggtcatggattgggactcgcgatacatgagcatccgtacttgaacggcgcgaatgaagagaagctcagggctggagtggttgttactaatgagccgggtatctacgtgaccaatgaacaagcaaaatcactcggaaagagtgaaggctttggtgtcagattggaagatccaatactggtgacggaagatggtggtgttccattgacagggcgccgggcagtgtcaccgtgggacccataggttgcacgatgtacatatcgatcttacttaatgacaatacatgcgcgctatcgagttattgaaaagctaaacctaatcatatgatcatatacattagagaaa

SEQ ID NO: 26995 - DNA, 393 bp, Muscodor strobelii
  misc_feature: SGI cDNA ID NO. 569240
  misc_feature: Elevated expression when VOC is produced
  misc_feature: Encodes the peptide sequence at SEQ ID NO 26996
atgcagttcaccacaaccgttttggccctagtggccttgattgcccctgcattcgctgcacccgctgccctagaggctcgtgctgctactacctgtggctcgacgtcctatactgccactcaagtaaacacagctgctcagaaagcgtgctcgtactatactgctgggacctccaccaacagctacccacacacttacaacaattacgagggtttcagtttcaaggtatcgggaccataccttgaattccccatgttgaccagcggcgcttacactggtggatcacctggtgctgaccgtgtcatcatcaacaccgcttgcaagcttgccggtgagattacacatacaggtgcaagcggaaacaactttgttgcttgctccccgttatactag

SEQ ID NO: 26996 - protein, 130 aa, Muscodor strobelii
  misc_feature: SGI Peptide ID NO. 569240
  misc_feature (46)..(126): Pfam Id: PF00545 Pfam Desc: ribonuclease
  misc_feature (1)..(127): NCBI GI: 51704254 Blast Desc: RNF1_GIBFU RecName: Full=Guanyl-specific ribonuclease F1; Short=RNase F1; Flags: Precursor gi|3355900|dbj|BAA31984.1| ribonuclease F1 [Gibberella fujikuroi] ribonuclease F1 fujikuroi]
  misc_feature (28)..(127): NCBI GI: 157831142 Blast Desc: RNF1_GIBFU RecName: Full=Guanyl-specific ribonuclease F1; Short=RNase F1; Flags: Precursor gi|3355900|dbj|BAA31984.1| ribonuclease F1 [Gibberella fujikuroi] ribonuclease F1 fujikuroi]
  misc_feature (6)..(127): NCBI GI: 46139351 Blast Desc: FG11190.1 [Gibberella zeae PH-1]
  misc_feature (29)..(127): NCBI GI: 133154 Blast Desc: FG11190.1 [Gibberella zeae PH-1]
  misc_feature (22)..(127): NCBI GI: 169614207 Blast Desc: SNOG_10241 [Phaeosphaeria nodorum SN15] gi|111061456|gb|EAT82576.1| SNOG_10241 [Phaeosphaeria nodorum SN15]
  misc_feature (27)..(127): NCBI GI: 223742 Blast Desc: SNOG_10241 [Phaeosphaeria nodorum SN15] gi|111061456|gb|EAT82576.1| SNOG_10241 [Phaeosphaeria nodorum SN15]
  misc_feature (1)..(127): NCBI GI: 256722728 Blast Desc: NECHADRAFT_87185 [Nectria haematococca mpVI 77-13-4]
  misc_feature (27)..(127): NCBI GI: 464653 Blast Desc: NECHADRAFT_87185 [Nectria haematococca mpVI 77-13-4]
  misc_feature (1)..(127): NCBI GI: 255933728 Blast Desc: Pc12g14380 [Penicillium chrysogenum Wisconsin 54-1255] gi|211582862|emb|CAP81065.1| Pc12g14380 [Penicillium chrysogenum Wisconsin 54-1255]
  misc_feature (23)..(127): NCBI GI: 189199054 Blast Desc: guanyl-specific ribonuclease Pb1 [Pyrenophora tritici-repentis Pt-1C-BFP] gi|187982963|gb|EDU48451.1| guanyl-specific ribonuclease Pb1 [Pyrenophora tritici-repentis
  misc_feature (32)..(127): SWISSPROT Homolog: EC 3.1.27.3 Ribonuclease T(1)
  misc_feature: Useful for introducing or modulating the production of volatile compounds
MQFTTTVLALVALIAPAFAAPAALEARAATTCGSTSYTATQVNTAAQKACSYYTAGTSTNSYPHTYNNYEGFSFKVSGPYLEFPMLTSGAYTGGSPGADRVIINTACKLAGEITHTGASGNNFVACSPLY

SEQ ID NO: 26997 - DNA, 890 bp, Muscodor strobelii
  misc_feature: SGI EST ID NO. CUFF.63652.0
  misc_feature: Variant of the nucleotide sequence at SEQ ID NO 26995
tgtccaaagatgaggaaggctattcgtgctgcgtagctgtgtgtaatctcaagttaaactcgcggatcatcttctccttcagactctcccttcataatgcagttcaccacaaccgttttggccctagtggccttgattgcccctgcattcgctgcacccgctgccctagaggctcgtgctgctactacctgtggctcgacgtcctatactgccactcaagtaaacacagctgctcagaaagcgtgctcgtactatactgctgggacctccaccaacagctacccacacacttacaacaattacgagggtttcagtttcaaggtatcgggaccataccttgaattccccatgttgaccagcggcgcttacactggtggatcacctggtgctgaccgtgtcatcatcaacaccgcttgcaagcttgccggtgagattacacatacaggtgcaagcggaaacaactttgttgcttgctccccgttatactagagtggaaaaacatttcaaaacttgatttaagaacaaaatttgaggaaagcgatttacaagagaggattctatgtttgattgcttcaaaacggaacgcttggcggtcacctggtggtttaagtcaatgatgacttgacgattgcacggctcttaacgaatatgaaaaatatacattcagacttattctcttataactttcgctttcaaaactagtgaacttgattatattagactcttcatagaagctgtactttcagatcgagagtttagtagtagtttgaaagcgcggagaaaagtttcaaaaaggcgatgccacgaacaaccaatcatgttcacagcttgttgtgcgccttgctttaagttctggcgactttactcgaatagacttacaaatagaccga

SEQ ID NO: 26998 - DNA, 1017 bp, Muscodor strobelii
  misc_feature: SGI cDNA ID NO. 569241
  misc_feature: Encodes the peptide sequence at SEQ ID NO 26999
atggcaccaacaaacacagcggcatggtacccatccaacaaagcgccaaccctcgaggtcggtccagctccataccctagtcccaacgccgacgagatcatagtcaaagtcgccattgcagcattcaacccagtagactataagatccagaatctcggccaagatctctttcccttcctcaaatttccctatgtcggcggctccgacatttcaggaaccgtcgtcgaagtgggagaaggcgtaaatcgtttccaacccggagaccgagtcctcggcgcaaccctgcctctccagtctcgtacagccgcatatcagcactacgccgctgtccctgcggccttagcaactaagctaccgaatgatgtgtcattcgaagacgcagcggtaatccctgcttgtttcgcaacggccgtagtagcgctctacgaccatctcaaactctctcatcccacagtcccgaaagcgtccagcaatggaaaggctgtctttatcagcgccggcgcttcgagcgtaggaagcaacgccatccagcttgcagtagcctccggttacgaagtcttcactacgtcttctccgtctaacttcgcgcattgcgagaaactcggcgcaagagtgttcgattaccactctgctaccgtagcgcaggacatcaaagacgcattcaagggcaaagagtgtgctggaggtttcgcagtgactgatactagtgccgaactcgtcttcgacgtcgtatctagtctaggtggtaaactcgtcgcgcttactctcccatattctgaggacgcagtgccgaagggtgtgagcgctagatttatacatgctactgaaattgtccaagttggtctggcggatgcgttcttcgataagttccttactgaggctttggcgaagaagcaatttgcgcttgagcctaagccggagcttgttgggaagggcctggagtctgttcaagctgcgttcgataggcagaaggctggtggtgtttcgcgtaagaagttagttatttctctcgagtaa

SEQ ID NO: 26999 - protein, 338 aa, Muscodor strobelii
  misc_feature: SGI Peptide ID NO. 569241
  misc_feature (30)..(118): Pfam Id: PF08240 Pfam Desc: Alcohol dehydrogenase GroES-like domain
  misc_feature (30)..(90): Pfam Id: PF08240 Pfam Desc: Alcohol dehydrogenase GroES-like domain
  misc_feature (158)..(224): Pfam Id: PF00107 Pfam Desc: Zinc-binding dehydrogenase
  misc_feature (1)..(338): NCBI GI: 149209129 Blast Desc: MGCH7_ch7g57 [Magnaporthe grisea 70-15] gi|86196012|gb|EAQ70650.1| MGCH7_ch7g57 [Magnaporthe grisea 70-15]
  misc_feature (1)..(338): NCBI GI: 145614929 Blast Desc: MGG_09632 [Magnaporthe grisea 70-15] gi|145021827|gb|EDK05904.1| MGG_09632 [Magnaporthe grisea 70-15]
  misc_feature (1)..(338): NCBI GI: 159125418 Blast Desc: oxidoreductase, zinc-binding dehydrogenase family superfamily [Aspergillus fumigatus A1163]
  misc_feature (1)..(338): NCBI GI: 70993624 Blast Desc: oxidoreductase, zinc-binding dehydrogenase family superfamily [Aspergillus fumigatus Af293] gi|66849293|gb|EAL89621.1| oxidoreductase, zinc-binding family
  misc_feature (1)..(338): NCBI GI: 119500206 Blast Desc: oxidoreductase, zinc-binding dehydrogenase family superfamily [Neosartorya fischeri NRRL 181] gi|119415025|gb|EAW24963.1| oxidoreductase, zinc-binding family
  misc_feature (1)..(337): NCBI GI: 242760830 Blast Desc: oxidoreductase, zinc-binding dehydrogenase family superfamily [Talaromyces stipitatus ATCC 10500] gi|218723263|gb|EED22680.1| oxidoreductase, zinc-binding family
  misc_feature (1)..(337): NCBI GI: 212539169 Blast Desc: oxidoreductase, zinc-binding dehydrogenase family superfamily [Penicillium marneffei ATCC 18224] gi|210069482|gb|EEA23573.1| oxidoreductase, zinc-binding family
  misc_feature (1)..(337): NCBI GI: 145253561 Blast Desc: An17g00640 [Aspergillus niger] gi|134083861|emb|CAK42992.1| protein product [Aspergillus niger]
  misc_feature (3)..(337): NCBI GI: 212527480 Blast Desc: zinc-binding oxidoreductase CipB [Penicillium marneffei ATCC 18224] gi|210073295|gb|EEA27382.1| zinc-binding oxidoreductase CipB [Penicillium marneffei ATCC 18224]
  misc_feature (3)..(337): NCBI GI: 145241714 Blast Desc: An09g01880 [Aspergillus niger] gi|134078043|emb|CAK40126.1| protein product [Aspergillus niger]
MAPTNTAAWYPSNKAPTLEVGPAPYPSPNADEIIVKVAIAAFNPVDYKIQNLGQDLFPFLKFPYVGGSDISGTVVEVGEGVNRFQPGDRVLGATLPLQSRTAAYQHYAAVPAALATKLPNDVSFEDAAVIPACFATAVVALYDHLKLSHPTVPKASSNGKAVFISAGASSVGSNAIQLAVASGYEVFTTSSPSNFAHCEKLGARVFDYHSATVAQDIKDAFKGKECAGGFAVTDTSAELVFDVVSSLGGKLVALTLPYSEDAVPKGVSARFIHATEIVQVGLADAFFDKFLTEALAKKQFALEPKPELVGKGLESVQAAFDRQKAGGVSRKKLVISLE

SEQ ID NO: 27000 - DNA, 718 bp, Muscodor strobelii
  misc_feature: SGI EST ID NO. CUFF.63664.0
  misc_feature: Variant of the nucleotide sequence at SEQ ID NO 26998
gtctttatcagcgccggcgcttcgagcgtaggaagcaacgccatccagcttgcagtagcctccggttacgaagtcttcactacgtcttctccgtctaacttcgcgcattgcgagaaactcggcgcaagagtgttcgattaccactctgctaccgtagcgcaggacatcaaagacgcattcaagggcaaagagtgtgctggaggtttcgcagtgactgatactagtgccgaactcgtcttcgacgtcgtatctagtctaggtggtaaactcgtcgcgcttactctcccatattctgaggacgcagtgccgaagggtgtgagcgctagatttatacatgctactgaaattgtccaagttggtctggcggatgcgttcttcgataagttccttactgaggctttggcgaagaagcaatttgcgcttgagcctaagccggagcttgttgggaagggcctggagtctgttcaagctgcgttcgataggcagaaggctggtggtgtttcgcgtaagaagttagttatttctctcgagtaagacttggaaatgccagaaatgtcaattggcttctcgtctgaaggtacatagcttgcttacctgtcatcaacaagttgcaaggggttattaagtatcaaacgaagggactttagtcgaagtgatatgatgagtatcagagcaacactaatatgcatttacaatgtacagaataactatattccgg

SEQ ID NO: 27001 - DNA, 1839 bp, Muscodor strobelii
  misc_feature: SGI cDNA ID NO. 569242
  misc_feature: Reduced expression when VOC is produced
  misc_feature: Encodes the peptide sequence at SEQ ID NO 27002
atggatactcccatgaagatggagtcgccggccatggacggatctaccatccccatgccgacgcactcgacacccgagccgggcagcctgacgcctgctgcctcgaccggcaccaagaacagcatgtcgccctcgcccaagtccgccacctcgtcgtccaacattggttcgacttccaagcgcccgccgcgcaagagcaccctcacccagcagcagaagaaccagaagcgccagcgggccacacaggaccagctcaccacgctcgaggtcgagttcaacaagaacccgacgccgaccgccacggtgcgggagaggatagccgaagagatcaacatgaccgaaaggtctgtccagatctggttccagaaccgccgcgccaagatcaagctgctggcgaagaagagtctggagagcggcgaagacatcgactcgatccccgagtccatgcgtgcctatctcgccatgcaggcgatggagtcgggcaagggactcggtggcccctacatgggccgcactggcttgatgccctacggttccatgatgatgaacggcgagcagggcggacagggcaaagtcttgattcaccacttgacttgccgttctctcagcattggcaagtggacgcgcgtgggccagaacacgatggatctcatcgtcttctactcgcccgagaagtgcaccatgacatactacatcaacaacgaccaggccggctacaagatcgagtaccacttcagcgccatcaagaacatctacctcgacaacgccgacggggacagcagcaagctgggcggcattgtgatcgagctcaacagcccgccgcacttcttcatggactcgtcgccgaactcgaacggattcttccagtgtggcgacttcaccgaggagcagcaggcgacccagtgcttcatccatcatctgggcggcaaccccaaggtgttgagcggccagctcgccaagctggtgtctctcgagaccttcgccaaccgacacaaccccaaccccgcccccagccccttcgacatgggccactctctgtctgtgtccgcgccagtgtcacccacgaaccgcccatcctcgcaacccaactttgctcagccccacgttgggatgtaccaggagtcacaatggggaatcagcccgatgcaccacggcatgcggggccctggccacaagcgccagcgcagtcgctccgtgccgacggctgtcgacttctccatgttccagaaccccatgccctcgttctacatccagcatcccggcgagagccaagcgcatccccatcagcctcccatctatgcacccgtgccccagcagcctcaaggcatgaacgctggatcccacttgcgcatagatacccaggccagctaccacggaatgaatcttcgcccctatcctctgtcggctaccactgcgccttccgactacgcgagccccaactacttcgcgccaggtgctgaaaacactcccctgcccgttcacaccccatacacgggcaacttcttgtcaccaatgccacagatcccccctccaccctcaccgctgtcgttcggtgggagccaacatggcgaccctgctatcgtagaacagtcgcctcccctcgctctgatgcagcgcccagcctcgacagatatgtaccctatcggagagtcggccatctcagacgacggacacggtctccacgagatgtactcgaagcacaccatcaatctcccgatgcatccccactcgccagcttacggcgagccgggccaggccgaactggacatgaactcgctcgttcatttcgatcctgtggatccatcaagcatgtcgcccgaacacatgcctcatccgtag

SEQ ID NO: 27002 - protein, 612 aa, Muscodor strobelii
  misc_feature: SGI Peptide ID NO. 569242
  misc_feature (76)..(130): Pfam Id: PF00046 Pfam Desc: Homeobox domain
  misc_feature (10)..(607): NCBI GI: 145602508 Blast Desc: MGG_04853 [Magnaporthe grisea 70-15] gi|145010923|gb|EDJ95579.1| MGG_04853 [Magnaporthe grisea 70-15]
  misc_feature (14)..(611): NCBI GI: 46132980 Blast Desc: FG09019.1 [Gibberella zeae PH-1]
  misc_feature (23)..(611): NCBI GI: 256727883 Blast Desc: NECHADRAFT_46180 [Nectria haematococca mpVI 77-13-4]
  misc_feature (60)..(610): NCBI GI: 154299382 Blast Desc: BC1G_10953 [Botryotinia fuckeliana B05.10] gi|150857295|gb|EDN32487.1| BC1G_10953 [Botryotinia fuckeliana B05.10]
  misc_feature (60)..(610): NCBI GI: 156042169 Blast Desc: SS1G_11635 [Sclerotinia sclerotiorum 1980] gi|154696018|gb|EDN95756.1| SS1G_11635 [Sclerotinia sclerotiorum 1980]
  misc_feature (5)..(611): NCBI GI: 85102414 Blast Desc: NCU03593 [Neurospora crassa OR74A] gi|28922864|gb|EAA32084.1| NCU03593 [Neurospora crassa OR74A] gi|38566786|emb|CAE76096.1| homeoprotein [Neurospora crassa]
  misc_feature (32)..(607): NCBI GI: 116198845 Blast Desc: CHGG_07578 [Chaetomium globosum CBS 148.51] gi|88178857|gb|EAQ86325.1| CHGG_07578 [Chaetomium globosum CBS 148.51]
  misc_feature (57)..(607): NCBI GI: 171692989 Blast Desc: protein product [Podospora anserina] gi|11322493|emb|CAC16792.1| homeoprotein [Podospora anserina] gi|170946443|emb|CAP73244.1| protein product [Podospora anserina]
  misc_feature (43)..(608): NCBI GI: 169625507 Blast Desc: SNOG_16027 [Phaeosphaeria nodorum SN15] gi|111055486|gb|EAT76606.1| SNOG_16027 [Phaeosphaeria nodorum SN15]
  misc_feature (34)..(608): NCBI GI: 189199994 Blast Desc: homeoprotein [Pyrenophora tritici-repentis Pt-1C-BFP] gi|187983433|gb|EDU48921.1| homeoprotein [Pyrenophora tritici-repentis Pt-1C-BFP]
  misc_feature: Useful for introducing or modulating the production of volatile compounds
MDTPMKMESPAMDGSTIPMPTHSTPEPGSLTPAASTGTKNSMSPSPKSATSSSNIGSTSKRPPRKSTLTQQQKNQKRQRATQDQLTTLEVEFNKNPTPTATVRERIAEEINMTERSVQIWFQNRRAKIKLLAKKSLESGEDIDSIPESMRAYLAMQAMESGKGLGGPYMGRTGLMPYGSMMMNGEQGGQGKVLIHHLTCRSLSIGKWTRVGQNTMDLIVFYSPEKCTMTYYINNDQAGYKIEYHFSAIKNIYLDNADGDSSKLGGIVIELNSPPHFFMDSSPNSNGFFQCGDFTEEQQATQCFIHHLGGNPKVLSGQLAKLVSLETFANRHNPNPAPSPFDMGHSLSVSAPVSPTNRPSSQPNFAQPHVGMYQESQWGISPMHHGMRGPGHKRQRSRSVPTAVDFSMFQNPMPSFYIQHPGESQAHPHQPPIYAPVPQQPQGMNAGSHLRIDTQASYHGMNLRPYPLSATTAPSDYASPNYFAPGAENTPLPVHTPYTGNFLSPMPQIPPPPSPLSFGGSQHGDPAIVEQSPPLALMQRPASTDMYPIGESAISDDGHGLHEMYSKHTINLPMHPHSPAYGEPGQAELDMNSLVHFDPVDPSSMSPEHMPHP

SEQ ID NO: 27003 - DNA, 3538 bp, Muscodor strobelii
  misc_feature: SGI EST ID NO. CUFF.64380.2
  misc_feature: Variant of the nucleotide sequence at SEQ ID NO 27001
ctcgcctgctctgtttttttccctttcccatctttcgtccatcaccgcctgtatcgtcgaccttctttcggccattcgtcaccgttttttcttttcccttttctcacccacattcctttatttttgccttcgtagctacacggacaccgtcactccttccgggtccattttcattcctttaggctttaacactcacaaaacaacgtcctccgacacgcccgacgcgctcttcaaacggctcaaacggctctgactaaccatagcccgccccttgcagcacccatcggatcacatactttgatagataacttcgaccaactcgagggagcccgctgccgccgacgacagcgtcgtgtccacgtgcatcacgactctcgcatttgatatcctcgtcccgtcgttttcgtggcggacctggaacgacactccttagcatccacgcttccagatatttctcactctccttcgcttccgaccgaaccgcgccacccggttccgtcgccggatcacagccatccaacgctgtcccggcttaagccaaacggttatttccaaccgcttttatttattccaactggataaatcatagatacacaccgcacccctcctgtcttctctcgagatccccgcgatggatactcccatgaagatggagtcgccggccatggacggatctaccatccccatgccgacgcactcgacacccgagccgggcagcctgacgcctgctgcctcgaccggcaccaagaacagcatgtcgccctcgcccaagtccgccacctcgtcgtccaacattggttcgacttccaagcgcccgccgcgcaagagcaccctcacccagcagcagaagaaccagaagcgccagcgggccacacaggaccagctcaccacgctcgaggtcgagttcaacaagaacccgacgccgaccgccacggtgcgggagaggatagccgaagagatcaacatgaccgaaaggtctgtccagatctggttccagaaccgccgcgccaagatcaagctgctggcgaagaagagtctggagagcggcgaagacatcgactcgatccccgagtccatgcgtgcctatctcgccatgcaggcgatggagtcgggcaagggactcggtggcccctacatgggccgcactggcttgatgccctacggttccatgatgatgaacggcgagcagggcggacagggcaaagtcttgattcaccacttgacttgccgttctctcagcattggcaagtggacgcgcgtgggccagaacacgatggatctcatcgtcttctactcgcccgagaagtgcaccatgacatactacatcaacaacgaccaggccggctacaagatcgagtaccacttcagcgccatcaagaacatctacctcgacaacgccgacggggacagcagcaagctgggcggcattgtgatcgagctcaacagcccgccgcacttcttcatggactcgtcgccgaactcgaacggattcttccagtgtggcgacttcaccgaggagcagcaggcgacccagtgcttcatccatcatctgggcggcaaccccaaggtgttgagcggccagctcgccaagctggtgtctctcgagaccttcgccaaccgacacaaccccaaccccgcccccagccccttcgacatgggccactctctgtctgtgtccgcgccagtgtcacccacgaaccgcccatcctcgcaacccaactttgctcagccccacgttgggatgtaccaggagtcacaatggggaatcagcccgatgcaccacggcatgcggggccctggccacaagcgccagcgcagtcgctccgtgccgacggctgtcgacttctccatgttccagaaccccatgccctcgttctacatccagcatcccggcgagagccaagcgcatccccatcagcctcccatctatgcacccgtgccccagcagcctcaaggcatgaacgctggatcccacttgcgcatagatacccaggccagctaccacggaatgaatcttcgcccctatcctctgtcggctaccactgcgccttccgactacgcgagccccaactacttcgcgccaggtgctgaaaacactcccctgcccgttcacaccccatacacgggcaacttcttgtcaccaatgccacagatcccccctccaccctcaccgctgtcgttcggtgggagccaacatggcgaccctgctatcgtagaacagtcgcctcccctcgctctgatgcagcgcccagcctcgacagatatgtaccctatcggagagtcggccatctcagacgacggacacggtctccacgagatgtactcgaagcacaccatcaatctcccgatgcatccccactcgccagcttacggcgagccgggccaggccgaactggacatgaactcgctcgttcatttcgatcctgtggatccatcaagcatgtcgcccgaacacatgcctcatccgtagctggcatgaatcgtcttttcggcatagcatatccgcagccttcttatgaatctgatgatgaggctttatgccgttgttttctgtccagtcccactggtgtacatatctggcctgttcttagttgattcaggctcttggctggcgttggggataccatatacctcttgatttcatggctctttcttactgtgtttgaagctggtatatctgagcttggttgttggagattcttctacttctcgttctgtcacatcgaaatctactctacccgcgacctcaacaacgcagcaccttaattcggcatttgattgcacgtgtctggcacagcgtttctatcattgattttactcaactcgactattactgctactcgtacgcgcttgggatcacaaaataatcaggacccatgcctacaactaatactgctattctcgcgatctattcctccctcaggctatcttgtgccctttctcagctctcatttctgtcgcatttacggaattagcgatgtcatatcaggctcgaggtggactaaaacacgatgaatatggagaaggcccaggtggctacagatctctggatattaatatttaactggagctgctggtcatttcagcagcaggtgctgataggggtcatcctttactgtctttttctttccttttgggtcgggacgtgtttggattctcggagaacagtaatgattgatacctcaaaatagatggagctggtttgttgcgcggctgcttgttggtcacctagggcccttgttttacagacaataccgctcgtagggcggaagctctctgcggtatcaggacataggcttgactgtacaatgtgcgctcggacatccgctctatggaccaaaaggatggagttctctccatatgattttcttgtcacgatttacggcaaggggtcatagaatatcacgcccttatctaaagcttttaaaatccaaagaccttcttgccatgcgagtgatgtgactgattgaggatgcattgtgtcttcgttttgacattactggcgaatcattactagagatcgtgaagaacagagccc

SEQ ID NO: 27004 - DNA, 462 bp, Muscodor strobelii
  misc_feature: SGI cDNA ID NO. 569243
  misc_feature: Encodes the peptide sequence at SEQ ID NO 27005
atgtctgggtcaccatctatgactctggaggagtgggacgaatatgtagaaactaggagcgccaggtggggttttgaggagcttttctacctcaatgatggcgcggaacgaacgattggtatactgtctcatgtattcccttacatgaacgtcgaaactctgaagcgtgaatcatggcatctctttgagcatcgtacccagtttgtgccttacctcctccaggatagtccggtgctcgcacttctacgtgttgtggtcaacttctttaagagcctgacagagagaactgcacttcttgtagcagactcgtctcccggtgcattgagtcttgacggtaagattgaagacctggaagcgttggtgtgcgatgattatgaggagatgaatcgtgacttgaaaaagaatgctgaggagaaggggattgactaccatgagctgttcaattattatgcaatggggtag

SEQ ID NO: 27005 - protein, 153 aa, Muscodor strobelii
  misc_feature: SGI Peptide ID NO. 569243
MSGSPSMTLEEWDEYVETRSARWGFEELFYLNDGAERTIGILSHVFPYMNVETLKRESWHLFEHRTQFVPYLLQDSPVLALLRVVVNFFKSLTERTALLVADSSPGALSLDGKIEDLEALVCDDYEEMNRDLKKNAEEKGIDYHELFNYYAMG

SEQ ID NO: 27006 - DNA, 1077 bp, Muscodor strobelii
  misc_feature: SGI cDNA ID NO. 569244
  misc_feature: Encodes the peptide sequence at SEQ ID NO 27007
atggttcccaagatccttgtcgctggtgccgcaggctacattggtggctcggttctctccgatttcatcgcaaattcaaatgacctcataaaagctgagaatctcatcggcttagttcgctcggatgagcaagctaaggctttgtctagcaagggcatcaacgtcctccagctcgatgcaacagacgaggaggctcttgcaaaggcagtcctggagaacgaagttgacatcgtgatcaactcaaccgcttccctcgacccagctcctctgctgtcactcgtccgagctctcggcaagcgccatgcttcgacgtatcagccgacatatttcatccaaacttcaggaactcagacgatgtgtcacgataccggatacccagatatcgaagttcgagacgacgatcccttgctcttccagaaagagaagatggcgcctgccttcttccctcgacaggccaatgtcgctgcaatcgaagaagcgaagaagctcggcgttacgagtttcgtgatcgctgtgccacttgcgttcggtaaaggcacaggatactggaataaaatctccttccagctccctgtaatgatcaacgccatcgcgcacttgaagaaggcatacaagttcgaagaaagaagtagctggcccgcagttcacatatcagatctcacagtattctaccggcttctcgtggagaagatcctgtccaactcgccgatcccaagcgacgagcaaggccgctatttcgccgtcgctcatcgtcttgactggtgggatgttcttgatcaattcgccgctatcatgcacaagcgtggtcttgtcgacgagccaaaggccgtagtctggccaagcgaggaagcagctgatgcagcgttcaaggcaccacctggctgggctaaaattgggtttagcaatgggaccctggcgatccccgtgaagagagagttgctggggtgggagccgaaatgggatcagaagcgcttcatggacagccttgaggacgaggtacgggatgcattggactctgatctctctaagagcggcatttataagatgatcaacgccgtcgcgggaaaaacaacttga

SEQ ID NO: 27007 - protein, 358 aa, Muscodor strobelii
  misc_feature: SGI Peptide ID NO. 569244
  misc_feature (5)..(80): Pfam Id: PF01370 Pfam Desc: NAD dependent epimerase/dehydratase family
  misc_feature (5)..(69): Pfam Id: PF02254 Pfam Desc: TrkA-N domain
  misc_feature (1)..(347): NCBI GI: 256724265 Blast Desc: NECHADRAFT_97613 [Nectria haematococca mpVI 77-13-4]
  misc_feature (1)..(346): NCBI GI: 116214431 Blast Desc: CHGG_11056 [Chaetomium globosum CBS 148.51] gi|88175411|gb|EAQ82880.1| CHGG_11056 [Chaetomium globosum CBS 148.51]
  misc_feature (1)..(347): NCBI GI: 46115436 Blast Desc: FG03560.1 [Gibberella zeae PH-1]
  misc_feature (2)..(337): NCBI GI: 46111867 Blast Desc: FG02815.1 [Gibberella zeae PH-1]
  misc_feature (1)..(333): NCBI GI: 242823456 Blast Desc: conserved [Talaromyces stipitatus ATCC 10500] gi|218712993|gb|EED12418.1| conserved [Talaromyces stipitatus ATCC 10500]
  misc_feature (1)..(344): NCBI GI: 119487610 Blast Desc: NFIA_030730 [Neosartorya fischeri NRRL 181] gi|119410694|gb|EAW20640.1| conserved [Neosartorya fischeri NRRL 181]
  misc_feature (1)..(341): NCBI GI: 169623506 Blast Desc: SNOG_14995 [Phaeosphaeria nodorum SN15] gi|111056418|gb|EAT77538.1| SNOG_14995 [Phaeosphaeria nodorum SN15]
  misc_feature (1)..(339): NCBI GI: 238502221 Blast Desc: conserved [Aspergillus flavus NRRL3357] gi|220691154|gb|EED47502.1| conserved [Aspergillus flavus NRRL3357]
  misc_feature (4)..(333): NCBI GI: 67904330 Blast Desc: AN9152.2 [Aspergillus nidulans FGSC A4] gi|40742795|gb|EAA61985.1| AN9152.2 [Aspergillus nidulans FGSC A4] gi|259485428|tpe|CBF82442.1| TPA: conserved [Aspergillus FGSC
  misc_feature (4)..(333): NCBI GI: 145247692 Blast Desc: An12g10490 [Aspergillus niger] gi|134080837|emb|CAK41396.1| protein product [Aspergillus niger]
MVPKILVAGAAGYIGGSVLSDFIANSNDLIKAENLIGLVRSDEQAKALSSKGINVLQLDATDEEALAKAVLENEVDIVINSTASLDPAPLLSLVRALGKRHASTYQPTYFIQTSGTQTMCHDTGYPDIEVRDDDPLLFQKEKMAPAFFPRQANVAAIEEAKKLGVTSFVIAVPLAFGKGTGYWNKISFQLPVMINAIAHLKKAYKFEERSSWPAVHISDLTVFYRLLVEKILSNSPIPSDEQGRYFAVAHRLDWWDVLDQFAAIMHKRGLVDEPKAVVWPSEEAADAAFKAPPGWAKIGFSNGTLAIPVKRELLGWEPKWDQKRFMDSLEDEVRDALDSDLSKSGIYKMINAVAGKTT

SEQ ID NO: 27008 - DNA, 521 bp, Muscodor strobelii
  misc_feature: SGI EST ID NO. CUFF.63696.0
  misc_feature: Variant of the nucleotide sequence at SEQ ID NO 27006
gcaccacctggctgggctaaaattgggtttagcaatgggaccctggcgatccccgtgaagagagagttgctggggtgggagccgaaatgggatcagaagcgcttcatggacagccttgaggacgaggtacgggatgcattggactctgatctctctaagagcggcatttataagatgatcaacgccgtcgcgggaaaaacaacttgatgcatacgaatatctgcaaccaatgtgagcgatgttgatttagctgctccataactacacaaaatttggcgttgtacagctaacatttcactcaatcaccatccccccacaaatcagcattcaattcgttagaaaacattacgaaagcaattttttgtttctatatatctcaataacagcttgcaattcgttcgaaactcatttttggctctggagtttgtacatttatgacttcgcgtcgacaatttgctcgtaaaagctaccctacaatcaatcctcaacaccattttctccatcatccccagactcaaaac

SEQ ID NO: 27009 - DNA, 867 bp, Muscodor strobelii
  misc_feature: SGI cDNA ID NO. 569245
  misc_feature: Elevated expression when VOC is produced
  misc_feature: Encodes the peptide sequence at SEQ ID NO 27010
atgttgttcaagtcgctccttgcttccgccctgttggccaccacggccacagctggcaagttcaactaccgcgaggctgctgccaatggtaccagactctgtggtactcccgagcccagacatgaccagatcgccgagactctggccatgctcgagaaggaacgcatcgctaaggccaatggcgaggtctctaaggctgccgctggtttcaacgtcaaactctacttccacgtcgttgctgcctctacctctgtctccgacggctacctgacccagcaaatgattaatgaccagttggctgtcatgaacgactcctacggccctcacggcatcagcttcacattggtcagcactgactatactgtcaacgccaactgggctgccgacggagacgagcaagctatgaagaaggccctccgtaagggtacctactccgacctcaacatctacttcctcggcaacctcggcggtggtttgctcggctactgctacttccccgagtccagccacgcttcgggctctaccaacttcatcttggatggctgcagcatccttgcccagtccgttcctggcggctccgccgccccttacaacctgggtggcaccgccgtccacgaatccggtcactggatgaacttgtaccacaccttccagggtggctgcagcggctccggcgacatggtggacgacactcccccagaggcctctgctgcctctggctgccctaccggccgtgacacgtgctccggtggcggcgtggaccccatccacaactacatggactacactgacgatgattgctacactgagttcaccgctgggcagcagacccgtatgtacagcgcttggtccacctaccgtagttaa

SEQ ID NO: 27010 - protein, 288 aa, Muscodor strobelii
  misc_feature: SGI Peptide ID NO. 569245
  misc_feature (26)..(288): NCBI GI: 119180007 Blast Desc: CIMG_08674 [Coccidioides immitis RS] gi|33323431|gb|AAQ07436.1| metalloprotease 1 precursor [Coccidioides posadasii] gi|240110235|gb|EER28394.1| 1 precursor
  misc_feature (1)..(288): NCBI GI: 261352606 Blast Desc: metalloprotease [Verticillium albo-atrum VaMs.102]
  misc_feature (34)..(288): NCBI GI: 85085015 Blast Desc: NCU07200 [Neurospora crassa OR74A] gi|28918516|gb|EAA28189.1| NCU07200 [Neurospora crassa OR74A] gi|28950215|emb|CAD71082.1| related to metalloprotease MEP1
  misc_feature (34)..(287): NCBI GI: 171676591 Blast Desc: protein product [Podospora anserina] gi|170936362|emb|CAP61020.1| protein product [Podospora anserina]
  misc_feature (34)..(288): NCBI GI: 39945842 Blast Desc: MGG_08041 [Magnaporthe grisea 70-15] gi|145019277|gb|EDK03505.1| MGG_08041 [Magnaporthe grisea 70-15]
  misc_feature (34)..(287): NCBI GI: 256724473 Blast Desc: NECHADRAFT_98075 [Nectria haematococca mpVI 77-13-4]
  misc_feature (12)..(288): NCBI GI: 258564494 Blast Desc: metalloprotease 1 [Uncinocarpus reesii 1704] gi|237908499|gb|EEP82900.1| metalloprotease 1 [Uncinocarpus reesii 1704]
  misc_feature (34)..(288): NCBI GI: 46102648 Blast Desc: FG00028.1 [Gibberella zeae PH-1]
  misc_feature (58)..(288): NCBI GI: 258576093 Blast Desc: metalloprotease 1 [Uncinocarpus reesii 1704] gi|237902494|gb|EEP76895.1| metalloprotease 1 [Uncinocarpus reesii 1704]
  misc_feature (1)..(287): NCBI GI: 169845975 Blast Desc: CC1G_09593 [Coprinopsis cinerea okayama7#130] gi|116509177|gb|EAU92072.1| CC1G_09593 [Coprinopsis cinerea okayama7#130]
  misc_feature (131)..(287): SWISSPROT Homolog: EC 3.4.24.79 Pappalysin-1
  misc_feature: Useful for introducing or modulating the production of volatile compounds
MLFKSLLASALLATTATAGKFNYREAAANGTRLCGTPEPRHDQIAETLAMLEKERIAKANGEVSKAAAGFNVKLYFHVVAASTSVSDGYLTQQMINDQLAVMNDSYGPHGISFTLVSTDYTVNANWAADGDEQAMKKALRKGTYSDLNIYFLGNLGGGLLGYCYFPESSHASGSTNFILDGCSILAQSVPGGSAAPYNLGGTAVHESGHWMNLYHTFQGGCSGSGDMVDDTPPEASAASGCPTGRDTCSGGGVDPIHNYMDYTDDDCYTEFTAGQQTRMYSAWSTYRS

SEQ ID NO: 27011 - DNA, 3979 bp, Muscodor strobelii
  misc_feature: SGI EST ID NO. CUFF.63704.0
  misc_feature: Variant of the nucleotide sequence at SEQ ID NO 27009
tggaaagccacaatgatatttcttagtctgaactacaagaagctgctcagttttgccacactcgagaccaaaacagtacacaatgggggatattggatccttaagatcagggcacacgacattcggctaggttacagtctatcttgcatcttgacttaataacgagacgacaatagcgattacacgcatatatacatacatatgcctttatctgtgtccttttaaggtaacgctcaatagaaagtttagactcgctctgatgtttaggttatcgcggttcaactgtgaattctcctgttcgaccagtgtcgttttcctcgtttggcttcatggatgcgtccgaggagggaaggttaagattgatcagtcacatatgacaactgtcacaaagcaacatgagatgtttttccagcgagaacctttgctttgaagaggccgaagtaattaattgacatcgcttccgtcgagatggccggctcaatcgagatggatatatcggcagtgtcaatttctgttgcctagaagccaatatcacaccattggtccctgcatacggtcgtctagatacgagctgcaagacgtgaatggaaggcgattgattcgctgacatggaatcctctcccccttctagtttccagccactgctgtcatcggatgcttcagcgcctgcgcatacgatagctcatgcaaggtggtgatacccgagatcctgctagttgatgaggtatcgatgtaacctgggcgaggatatatcgccggcctccgacatgaaatacgagccgtacctgatctgatcttgcgagctgcccatcgcaaactatccagctcgccagcatcagagctcttgggaccttgggcaacttggcaatcgagtaaagccgatgtggggaaaaagccaagaaaaagccaagagtcggggaggccacaacaggcaattgccttgtccttatatagtcgataagcttatggggcatgtcctgccaagccatccgtcatcttggcgcgcgtttcattccctgcccaagccctgccttcttatcacttgcatacgttgatggcagctaaagctgggtcttcgccttgaagtaaattcaaatagccaaccagcgactagatgggaaacctcctttcctgcacctaaaccccatcgccttaaaaggaagttcgacgacatgacaactcctaggatccccaatggtccgtgccagctcgccggtcagggttcacggcagtcggaatgtgaattttggagcgattggtcgaatgccgcccgcggcggaatatttctagttcttacgcgggtctgcgttcgtaagactgagtgtcgatctcatgctcatgttgtccatcgacccagaggtgttacctcaggagaaacctcttgtatgacaggaagactgccagccatcgtccaatcctcagcgagatccagatattgatgagtggacatggcgtctcttatttccactgcgtttctagaatggcttctcgatgactcgtacctatattgaattgcaatcacaaatatcttgccaagactgcatctcctggtgaggcaagtgatcatcagcaaatgatcgactgccaagccatttcgcacagcaagcttcctctttcatgcccttgggcccctccaagagacctctagggcacccggacaacgatatcgctcccactttgctcctcgcaattgcttccaacttgtcagcacagcccaccgacgtaacctaccatccaacagacgccggttcgccgcccaaaagttggcagagttgtccctgacagccatcacatctcctatgtgtgcccctcgctcacgactaccaggaagatggcccaattggctggcattggccaagccgccgttgccaggccgtgccacttgaatccgcatggattcttgtctaagcggctgatgccttgaaaacggcaggtcgtttatacgggctgtcgacagcgcttgctgacttgttgccactccgataagagaggctcggatgactctggggttcaaggcttggcaatggagacgaagctgagattgcagcggcgagctctcaagtataaagaagaggttgatcatcgcctcaaactcacttctcatcaccccatccgcctcatcctctcatcagctcttcacgcagtcctcattctttagctcccagacaaaatgttgttcaagtcgctccttgcttccgccctgttggccaccacggccacagctggcaagttcaactaccgcgaggctgctgccaatggtaccagactctgtggtactcccgagcccagacatgaccagatcgccgagactctggccatgctcgagaaggaacgcatcgctaaggccaatggcgaggtctctaaggctgccgctggtttcaacgtcaaactctacttccacgtcgttgctgcctctacctctgtctccgacggctacctgacccagcaaatgattaatgaccagttggctgtcatgaacgactcctacggccctcacggcatcagcttcacattggtcagcactgactatactgtcaacgccaactgggctgccgacggagacgagcaagctatgaagaaggccctccgtaagggtacctactccgacctcaacatctacttcctcggcaacctcggcggtggtttgctcggctactgctacttccccgagtccagccacgcttcgggctctaccaacttcatcttggatggctgcagcatccttgcccagtccgttcctggcggctccgccgccccttacaacctgggtggcaccgccgtccacgaatccggtcactggatgaacttgtaccacaccttccagggtggctgcagcggctccggcgacatggtggacgacactcccccagaggcctctgctgcctctggctgccctaccggccgtgacacgtgctccggtggcggcgtggaccccatccacaactacatggactacactgacgatgattgctacactgagttcaccgctgggcagcagacccgtatgtacagcgcttggtccacctaccgtagttaaactgtataggtaagttggaatttagtactgcattcaaaggcgtctgggatagggcatgaggtagcgaaccaaatgaagacttcgtgatagattagccagctgtgttaactatacgaggaaaagcttgatgagatgaacaacttcaaactccttttcttgcccagtgacaatcaatctgccgcgcgggtgttcgtgttttgcaaagacgtaaactactttggtttgtacatgaaattaggaaaatatttacgtaatgggattagaaccactaccgaccgcaacttctccttgtcgatcgccaattttgaatggatgcggttgcagcttggcagctaccaggttattggtagagtgtggatggcgactcgggctgcgcgaccagccactcaaggccattgaacccctgacccatttttttctcgcaggatttagttgccatctgcttggcattaaccttctcagttggacctatgttttctggctaattgtccccaactgcgtgaaagcagtggcttcaaaggagtgggctgaagttgagtccttcgtgaaatcggaataccagtcccattcattccgcagccgacctgaacgcaggcagagactgtgtgaatataccggatctttccagattccactctgaacgcatgactgtcgggcacaggcgcatttccctgcgatcgatccaggcccggaaatcctaggaaaatatctaccacccccatctcctgatcaatcacgtatctgcggtcggtgacaacaagaccggagggcattccagccgctgtgcaagagtctccagtcctattcagggtcgcggtagaggctcctccttcgagacgagagcacgggacgccgaacggcacaacaacgctcgtgtcattgaatcgattgaagtaggcatcaccagctgccttgatgacgtctctcgagtcttgtttttct

SEQ ID NO: 27012 - DNA, 921 bp, Muscodor strobelii
  misc_feature: SGI cDNA ID NO. 569246
  misc_feature: Encodes the peptide sequence at SEQ ID NO 27013
atgaagttcttccaagttgtgggcttcgtagccgcagtatccgctgcgtgcgatcgagcactcctccaaggggtagcgaacaagtaccttgctgcgcaaactgagggtgcaagcaattattttgccaattctacaacgacaggttttaaatataccgaaaatggtgtggcactgggactagctcagagcgtcttaacagagcccatcaagatggatcataatcggactatcgttgacatagtggcatgctcaacgttcacggaaatcatagcagcctcaaacatccatcaatatgtgattggtacccgcatggagttcaacagtaaccatcaggtgtcgctcatggagtcgatcgtgacagatcgtggagattgggcattcaacgctacaggttatctctattgggactctttagaaaattgggcaccgattccggcagaaaaacaagactcgagagacgtcatcaaggcagctggtgatgcctacttcaatcgattcaatgacacgagcgttgttgtgccgttcggcgtcccgtgctctcgtctcgaaggaggagcctctaccgcgaccctgaataggactggagactcttgcacagcggctggaatgccctccggtcttgttgtcaccgaccgcagatacgtgattgatcaggagatgggggtggtagatattttcctaggatttccgggcctggatcgatcgcagggaaatgcgcctgtgcccgacagtcatgcgttcagagtggaatctggaaagatccggtatattcacacagtctctgcctgcgttcaggtcggctgcggaatgaatgggactggtattccgatttcacgaaggactcaacttcagcccactcctttgaagccactgctttcacgcagttggggacaattagccagaaaacataggtccaactga

SEQ ID NO: 27013 - protein, 306 aa, Muscodor strobelii
  misc_feature: SGI Peptide ID NO. 569246
  misc_feature (7)..(276): NCBI GI: 116193927 Blast Desc: CHGG_06681 [Chaetomium globosum CBS 148.51] gi|88182594|gb|EAQ90062.1| CHGG_06681 [Chaetomium globosum CBS 148.51]
  misc_feature (10)..(280): NCBI GI: 169600761 Blast Desc: SNOG_03229 [Phaeosphaeria nodorum SN15] gi|160705508|gb|EAT89960.2| SNOG_03229 [Phaeosphaeria nodorum SN15]
  misc_feature (1)..(250): NCBI GI: 189192232 Blast Desc: conserved [Pyrenophora tritici-repentis Pt-1C-BFP] gi|187974061|gb|EDU41560.1| conserved [Pyrenophora tritici-repentis Pt-1C-BFP]
  misc_feature (9)..(268): NCBI GI: 189194003 Blast Desc: conserved [Pyrenophora tritici-repentis Pt-1C-BFP] gi|187978904|gb|EDU45530.1| conserved [Pyrenophora tritici-repentis Pt-1C-BFP]
  misc_feature (15)..(279): NCBI GI: 171688232 Blast Desc: protein product [Podospora anserina] gi|170944078|emb|CAP70188.1| protein product [Podospora anserina]
  misc_feature (17)..(261): NCBI GI: 169869949 Blast Desc: CC1G_13257 [Coprinopsis cinerea okayama7#130] gi|116497398|gb|EAU80293.1| CC1G_13257 [Coprinopsis cinerea okayama7#130]
  misc_feature (12)..(261): NCBI GI: 169854321 Blast Desc: CC1G_01512 [Coprinopsis cinerea okayama7#130] gi|116504970|gb|EAU87865.1| CC1G_01512 [Coprinopsis cinerea okayama7#130]
  misc_feature (14)..(256): NCBI GI: 169601696 Blast Desc: SNOG_03720 [Phaeosphaeria nodorum SN15] gi|111067805|gb|EAT88925.1| SNOG_03720 [Phaeosphaeria nodorum SN15]
  misc_feature (17)..(261): NCBI GI: 169854317 Blast Desc: CC1G_01510 [Coprinopsis cinerea okayama7#130] gi|116504968|gb|EAU87863.1| CC1G_01510 [Coprinopsis cinerea okayama7#130]
  misc_feature (15)..(261): NCBI GI: 169854319 Blast Desc: CC1G_01511 [Coprinopsis cinerea okayama7#130] gi|116504969|gb|EAU87864.1| CC1G_01511 [Coprinopsis cinerea okayama7#130]
MKFFQVVGFVAAVSAACDRALLQGVANKYLAAQTEGASNYFANSTTTGFKYTENGVALGLAQSVLTEPIKMDHNRTIVDIVACSTFTEIIAASNIHQYVIGTRMEFNSNHQVSLMESIVTDRGDWAFNATGYLYWDSLENWAPIPAEKQDSRDVIKAAGDAYFNRFNDTSVVVPFGVPCSRLEGGASTATLNRTGDSCTAAGMPSGLVVTDRRYVIDQEMGVVDIFLGFPGLDRSQGNAPVPDSHAFRVESGKIRYIHTVSACVQVGCGMNGTGIPISRRTQLQPTPLKPLLSRSWGQLARKHRSN

SEQ ID NO: 27014 - DNA, 323 bp, Muscodor strobelii
  misc_feature: SGI EST ID NO. CUFF.63707.0
  misc_feature: Variant of the nucleotide sequence at SEQ ID NO 27012
aaaaacattatcctgcttcgccatgaagttcttccaagttgtgggcttcgtagccgcagtatccgctgcgtgcgatcgagcactcctccaaggggtagcgaacaagtaccttgctgcgcaaactgagggtgcaagcaattattttgccaattctacaacgacaggttttaaatataccgaaaatggtgtggcactgggactagctcagagcgtcttaacagagcccatcaagatggatcataatcggactatcgttgacatagtggcatgctcaacgttcacggaaatcatagcagcctcaaacatccatcaatatgtgattg

SEQ ID NO: 27015 - DNA, 1302 bp, Muscodor strobelii
  misc_feature: SGI cDNA ID NO. 569247
  misc_feature: Encodes the peptide sequence at SEQ ID NO 27016
atggcatcgtctcaaacgtcctgggttgagatctcgccgtctagtcctttctcgctggccaacattcccttcggcatcatctcaactaagtcggacccgacccatcgaccagcagttgcaataggagagtactctttagatctgaagacattcacgcaagaaaatgggttcgccgatttgcccgagttgtcgaaccatctcaccgtcttctcagaaccgaccttgaatgccttcgcggcgctagggagaagcgtgcacacaactgttagaggatatctacaggccgtcctgaccgataagggatcttttgctaaagtgcttcaatcagacaaggcgctccgcgagaaggttatgatccctcttgcagatatccaaaaccatcttcctctaaaaatcggcgactacactgatttctacgcgagtacaaatcatgcatacaatgttggagttctgtttaggggtcccgaaaacgcccttcagcctaattataagcatttaccagttgcatatcacggtcgggctagcagtgtagtcatctctggaacaccgattcgacgtccctggggtcagattctggagaatccagcagtgaaggagccgtcacttcttccatgcaagaagcttgatctagagctagagtacgccgccttcatctgtacgccaaacactttaggatctccaattcaaatcaaagatgccgagaagcatatcttcggctatgtgcttatgattgattggagtgcgcgagacatacaaagttgggagtatgtgccgctgggtccctttctatctaagaacctaggaacgactgtgagccattgggtcgtccttagcgacgctatcgagccattcaagtcaagtggcctgcaaaacgacaagaagcttctaccatacctgcaggaaaagacaagcaaaaatgtactgaacttcgatctcgaggttgagctgacaaccgccgagggtgaacgatccgttatatcgaagacgaatgcctctaatttgctgtggtcatggccgcagatgatcgctcatcatacaatcactggctgcaatctgcaaacgggggatctacttggctcaggaactatttctgggactgagaacgggtcggaaggaagtctactagagcagtctcaaggtttcaaggtctcagtagctgttgcaaatggtgttgagcgcaaagctctcgaggatggcgacaccgtgctcattcgcggtgctgctggaccagatggagcccgcgttggttttggggattgtttcgggaagatactgccagcgttggacctattccgaaaatga

SEQ ID NO: 27016 - protein, 433 aa, Muscodor strobelii
  misc_feature: SGI Peptide ID NO. 569247
  misc_feature (7)..(129): Pfam Id: PF09298 Pfam Desc: Domain of function (DUF1969)
  misc_feature (156)..(371): Pfam Id: PF01557 Pfam Desc: Fumarylacetoacetate (FAA) hydrolase family
  misc_feature (7)..(432): NCBI GI: 256723865 Blast Desc: NECHADRAFT_67874 [Nectria haematococca mpVI 77-13-4]
  misc_feature (7)..(430): NCBI GI: 2832727 Blast Desc: fumarylacetoacetate hydrolase [Emericella nidulans]
  misc_feature (7)..(430): NCBI GI: 1130507 Blast Desc: fumarylacetoacetate hydrolase [Emericella nidulans]
  misc_feature (7)..(432): NCBI GI: 46111939 Blast Desc: FG02851.1 [Gibberella zeae PH-1]
  misc_feature (7)..(430): NCBI GI: 67522879 Blast Desc: AN1896.2 [Aspergillus nidulans FGSC A4] gi|238054384|sp|Q00770.3|FAAA_EMENI RecName: Full=Fumarylacetoacetase; Short=FAA; AltName: hydrolase; AltName:
  misc_feature (7)..(430): NCBI GI: 121710294 Blast Desc: fumarylacetoacetate hydrolase FahA [Aspergillus clavatus NRRL 1] gi|119400913|gb|EAW11337.1| fumarylacetoacetate hydrolase FahA [Aspergillus clavatus NRRL 1]
  misc_feature (7)..(430): NCBI GI: 119480053 Blast Desc: fumarylacetoacetate hydrolase FahA [Neosartorya fischeri NRRL 181] gi|119408209|gb|EAW18158.1| fumarylacetoacetate hydrolase FahA [Neosartorya fischeri NRRL
  misc_feature (7)..(430): NCBI GI: 70989411 Blast Desc: fumarylacetoacetate hydrolase FahA [Aspergillus fumigatus Af293] gi|66847186|gb|EAL87517.1| fumarylacetoacetate hydrolase FahA [Aspergillus fumigatus Af293] fumarylacetoacetate
  misc_feature (7)..(430): NCBI GI: 169769911 Blast Desc: [Aspergillus oryzae RIB40] gi|238487760|ref|XP_002375118.1| fumarylacetoacetate hydrolase FahA [Aspergillus flavus NRRL3357] gi|83767284|dbj|BAE57423.1|
  misc_feature (7)..(430): NCBI GI: 255932349 Blast Desc: Pc12g09030 [Penicillium chrysogenum Wisconsin 54-1255] gi|211582350|emb|CAP80530.1| Pc12g09030 [Penicillium chrysogenum Wisconsin 54-1255]
  misc_feature (7)..(430): SWISSPROT Homolog: EC 3.7.1.2 Fumarylacetoacetase
MASSQTSWVEISPSSPFSLANIPFGIISTKSDPTHRPAVAIGEYSLDLKTFTQENGFADLPELSNHLTVFSEPTLNAFAALGRSVHTTVRGYLQAVLTDKGSFAKVLQSDKALREKVMIPLADIQNHLPLKIGDYTDFYASTNHAYNVGVLFRGPENALQPNYKHLPVAYHGRASSVVISGTPIRRPWGQILENPAVKEPSLLPCKKLDLELEYAAFICTPNTLGSPIQIKDAEKHIFGYVLMIDWSARDIQSWEYVPLGPFLSKNLGTTVSHWVVLSDAIEPFKSSGLQNDKKLLPYLQEKTSKNVLNFDLEVELTTAEGERSVISKTNASNLLWSWPQMIAHHTITGCNLQTGDLLGSGTISGTENGSEGSLLEQSQGFKVSVAVANGVERKALEDGDTVLIRGAAGPDGARVGFGDCFGKILPALDLFRK

SEQ ID NO: 27017 - DNA, 2448 bp, Muscodor strobelii
  misc_feature: SGI EST ID NO. CUFF.63833.0
  misc_feature: Variant of the nucleotide sequence at SEQ ID NO 27015
gtgggatcgatatcgaattcggatcggcgcaatggtttgtgatagtgattagcatcttattctcagtatcaatttgttcgttcttgatcgacctcccagcggctggccttcgcttgtggaacctaaactaatctacgacatcgaacgctcgcatttgacggtttcttacaataactactccttacgtacaagtggataactccttgactgggtttatgatggcatcgtctcaaacgtcctgggttgagatctcgccgtctagtcctttctcgctggccaacattcccttcggcatcatctcaactaagtcggacccgacccatcgaccagcagttgcaataggagagtactctttagatctgaagacattcacgcaagaaaatgggttcgccgatttgcccgagttgtcgaaccatctcaccgtcttctcagaaccgaccttgaatgccttcgcggcgctagggagaagcgtgcacacaactgttagaggatatctacaggccgtcctgaccgataagggatcttttgctaaagtgcttcaatcagacaaggcgctccgcgagaaggttatgatccctcttgcagatatccaaaaccatcttcctctaaaaatcggcgactacactgatttctacgcgagtacaaatcatgcatacaatgttggagttctgtttaggggtcccgaaaacgcccttcagcctaattataagcatttaccagttgcatatcacggtcgggctagcagtgtagtcatctctggaacaccgattcgacgtccctggggtcagattctggagaatccagcagtgaaggagccgtcacttcttccatgcaagaagcttgatctagagctagagtacgccgccttcatctgtacgccaaacactttaggatctccaattcaaatcaaagatgccgagaagcatatcttcggctatgtgcttatgattgattggagtgcgcgagacatacaaagttgggagtatgtgccgctgggtccctttctatctaagaacctaggaacgactgtgagccattgggtcgtccttagcgacgctatcgagccattcaagtcaagtggcctgcaaaacgacaagaagcttctaccatacctgcaggaaaagacaagcaaaaatgtactgaacttcgatctcgaggttgagctgacaaccgccgagggtgaacgatccgttatatcgaagacgaatgcctctaatttgctgtggtcatggccgcagatgatcgctcatcatacaatcactggctgcaatctgcaaacgggggatctacttggctcaggaactatttctgggactgagaacgggtcggaaggaagtctactagagcagtctcaaggtttcaaggtctcagtagctgttgcaaatggtgttgagcgcaaagctctcgaggatggcgacaccgtgctcattcgcggtgctgctggaccagatggagcccgcgttggttttggggattgtttcgggaagatactgccagcgttggacctattccgaaaatgaagtcttaacacttcggcctatgaaactacttctcttcacaagtaatattcagaacaattttgctgaacttcgttgattctagagtaagttgctcaaatgcagggttgcgatcaccagttatgtcagtcgataaacgcaactcaaaatatctcgtattcaagcgcctcatttatgtccctgcaagcgatatcttctcgatcgcctcaacctcttagctcggaaggtgtgtcaggttggttctgccaatgaccttccgcaacagccggcagaaccgaaagcttctcgtataccttcatgatcgttggaaatctctgcatgtcgaccccaaaccgctgtgcgccccagatagccggaaccaatgttacatccgccagcgtgatctggtctccaaccgaatagacgccggcaaccttggctgctgtcaattcgtacgccgtgagtccttcggtcataagctcttttgcccatgcggctcggtcggcaccgagaacccccactcgatttagaatgcggagattcgtgaccggctggatgtcacatgctacaatgttcacaagtgtccgaactgtagcccgaagctttatatcactcggaaggagtggagtcgcatcagagtgcgtctcttcgagaaactcaagcgctgctactgactggccgatgcgaaacgcaataccgtcttgtgtggcgacaagcagtggtacagacccggatggatttaactctttatacgcgctggcatgatgctcgtgtttaagtaggttaattggatgaagcttgtaagtgatccctttcatattgagagcgatccttaaccgcgcggagcaggatgaacgacaatagctgaaaagctcaaatgtggtagccatttcgatggatatctaagccaatgtcggacaattgatcgtactgataagatacgaatggtgac

SEQ ID NO: 27018 - DNA, 663 bp, Muscodor strobelii
  misc_feature: SGI cDNA ID NO. 569248
  misc_feature: Elevated expression when VOC is produced
  misc_feature: Encodes the peptide sequence at SEQ ID NO 27019
atggctaccacatttgagcttttcagctattgtcgttcatcctgctccgcgcggttaaggatcgctctcaatatgaaagggatcacttacaagcttcatccaattaacctacttaaacacgagcatcatgccagcgcgtataaagagttaaatccatccgggtctgtaccactgcttgtcgccacacaagacggtattgcgtttcgcatcggccagtcagtagcagcgcttgagtttctcgaagagacgcactctgatgcgactccactccttccgagtgatataaagcttcgggctacagttcggacacttgtgaacattgtagcatgtgacatccagccggtcacgaatctccgcattctaaatcgagtgggggttctcggtgccgaccgagccgcatgggcaaaagagcttatgaccgaaggactcacggcgtacgaattgacagcagccaaggttgccggcgtctattcggttggagaccagatcacgctggcggatgtaacattggttccggctatctggggcgcacagcggtttggggtcgacatgcagagatttccaacgatcatgaaggtatacgagaagctttcggttctgccggctgttgcggaaggtcattggcagaaccaacctgacacaccttccgagctaagaggttga

SEQ ID NO: 27019 - protein, 220 aa, Muscodor strobelii
  misc_feature: SGI Peptide ID NO. 569248
  misc_feature (112)..(201): Pfam Id: PF00043 Pfam Desc: Glutathione S-transferase, C-terminal domain
  misc_feature (3)..(82): Pfam Id: PF02798 Pfam Desc: Glutathione S-transferase, N-terminal domain
  misc_feature (157)..(201): Pfam Id: PF00043 Pfam Desc: Glutathione S-transferase, C-terminal domain
  misc_feature (4)..(219): NCBI GI: 145243374 Blast Desc: An11g02160 [Aspergillus niger] gi|134078891|emb|CAK40576.1| protein product [Aspergillus niger]
  misc_feature (3)..(220): NCBI GI: 256723958 Blast Desc: NECHADRAFT_67879 [Nectria haematococca mpVI 77-13-4]
  misc_feature (2)..(220): NCBI GI: 46111941 Blast Desc: FG02852.1 [Gibberella zeae PH-1]
  misc_feature (5)..(220): NCBI GI: 154282309 Blast Desc: maleylacetoacetate isomerase [Ajellomyces capsulatus NAm1] gi|150410130|gb|EDN05518.1| maleylacetoacetate isomerase [Ajellomyces capsulatus NAm1]
  misc_feature (5)..(220): NCBI GI: 225561293 Blast Desc: maleylacetoacetate isomerase MaiA [Ajellomyces capsulatus G186AR]
  misc_feature (7)..(219): NCBI GI: 70989413 Blast Desc: maleylacetoacetate isomerase MaiA [Aspergillus fumigatus Af293] gi|66847187|gb|EAL87518.1| maleylacetoacetate isomerase MaiA [Aspergillus fumigatus Af293] maleylacetoacetate
  misc_feature (5)..(218): NCBI GI: 261192559 Blast Desc: maleylacetoacetate isomerase [Ajellomyces dermatitidis SLH14081] gi|239589168|gb|EEQ71811.1| maleylacetoacetate isomerase [Ajellomyces dermatitidis SLH14081] maleylacetoacetate
  misc_feature (2)..(220): NCBI GI: 258575085 Blast Desc: maleylacetoacetate isomerase [Uncinocarpus reesii 1704] gi|237901990|gb|EEP76391.1| maleylacetoacetate isomerase [Uncinocarpus reesii 1704]
  misc_feature (7)..(219): NCBI GI: 121710292 Blast Desc: maleylacetoacetate isomerase MaiA [Aspergillus clavatus NRRL 1] gi|119400912|gb|EAW11336.1| maleylacetoacetate isomerase MaiA [Aspergillus clavatus NRRL 1]
  misc_feature (7)..(219): NCBI GI: 115399028 Blast Desc: maleylacetoacetate isomerase [Aspergillus terreus NIH2624] gi|114191986|gb|EAU33686.1| maleylacetoacetate isomerase [Aspergillus terreus NIH2624]
  misc_feature (7)..(219): SWISSPROT Homolog: EC 5.2.1.2 Maleylacetoacetate isomerase
  misc_feature: Useful for introducing or modulating the production of volatile compounds
MATTFELFSYCRSSCSARLRIALNMKGITYKLHPINLLKHEHHASAYKELNPSGSVPLLVATQDGIAFRIGQSVAALEFLEETHSDATPLLPSDIKLRATVRTLVNIVACDIQPVTNLRILNRVGVLGADRAAWAKELMTEGLTAYELTAAKVAGVYSVGDQITLADVTLVPAIWGAQRFGVDMQRFPTIMKVYEKLSVLPAVAEGHWQNQPDTPSELRG

SEQ ID NO: 27020 - DNA, 2508 bp, Muscodor strobelii
  misc_feature: SGI EST ID NO. CUFF.63833.1
  misc_feature: Variant of the nucleotide sequence at SEQ ID NO 27018
gtcaccattcgtatcttatcagtacgatcaattgtccgacattggcttagatatccatcgaaatggctaccacatttgagcttttcagctattgtcgttcatcctgctccgcgcggttaaggatcgctctcaatatgaaagggatcacttacaagcttcatccaattaacctacttaaacacgagcatcatgccagcgcgtataaagagttaaatccatccgggtctgtaccactgcttgtcgccacacaagacggtattgcgtttcgcatcggccagtcagtagcagcgcttgagtttctcgaagagacgcactctgatgcgactccactccttccgagtgatataaagcttcgggctacagttcggacacttgtgaacattgtagcatgtgacatccagccggtcacgaatctccgcattctaaatcgagtgggggttctcggtgccgaccgagccgcatgggcaaaagagcttatgaccgaaggactcacggcgtacgaattgacagcagccaaggttgccggcgtctattcggttggagaccagatcacgctggcggatgtaacattggttccggctatctggggcgcacagcggtttggggtcgacatgcagagatttccaacgatcatgaaggtatacgagaagctttcggttctgccggctgttgcggaaggtcattggcagaaccaacctgacacaccttccgagctaagaggttgaggcgatcgagaagatatcgcttgcagggacataaatgaggcgcttgaatacgagatattttgagttgcgtttatcgactgacataactggtgatcgcaaccctgcatttgagcaacttactctagaatcaacgaagttcagcaaaattgttctgaatattacttgtgaagagaagtagtttcataggccgaagtgttaagacttcattttcggaataggtccaacgctggcagtatcttcccgaaacaatccccaaaaccaacgcgggctccatctggtccagcagcaccgcgaatgagcacggtgtcgccatcctcgagagctttgcgctcaacaccatttgcaacagctactgagaccttgaaaccttgagactgctctagtagacttccttccgacccgttctcagtcccagaaatagttcctgagccaagtagatcccccgtttgcagattgcagccagtgattgtatgatgagcgatcatctgcggccatgaccacagcaaattagaggcattcgtcttcgatataacggatcgttcaccctcggcggctaaagcaattgttagctctaatttacatacgggctactacgaagcaaaagtggactcacttgtcagctcaacctcgagatcgaagttcagtacatttttgcttgtcttttcctgcaggtatggtagaagcttcttgtcgttttgcaggccacttgacttgaatggctcgatagcgtcgctaaggacgacccaatggctcacagtcgttcctaggttcttagatagaaagggacccagcggcacatactcccaactttgtatgtctcgcgcactccaatcaatcataagcacatagccgaagatatgcttctcggcatctttgatttgaattggagatcctaaagtgtttggcgtacagatgaaggcggcgtactctagctctagatcaagcttcttgcatggaagaagtgacggctccttcactgctggattctccagaatctgaccccagggacgtcgaatcggtgttccagagatgactacactgctagcccgaccgtgatatgcaactggtaaatgcttataattaggctgaagggcgttttcgggacccctaaacagaactccaacattgtatgcatgatttgtactcgcgtagaaatcagtgtagtcgccgatttttagaggaagatggttttggatatctgcaagagggatcataaccttctcgcggagcgccttgtctgattgaagcactttagcaaaagatcccttatcggtcaggacggcctgtagatatcctctaacagttgtgtgcacgcttctccctagcgccgcgaaggcattcaaggtcggttctgagaagacggtgagatggttcgacaactcgggcaaatcggcgaacccattttcttgcgtgaatgtcttcagatctaaagagtactctcctattgcaactgctggtcgatgggtcgggtccgacttagttgagatgatgccgaagggaatgttggccagcgagaaaggactagacggcgagatctcaacccaggacgtttgagacgatgccatcataaacccagtcaaggagttatccacttgtacgtaaggagtagttattgtaagaaaccgtcaaatgcgagcgttcgatgtcgtagattagtttaggttccacaagcgaaggccagccgctgggaggtcgatcaagaacgaacaaattgatactgagaataagatgctaatcactatcacaaaccattgcgccgatccgaattcgatatcgatcccac

SEQ ID NO: 27021 - DNA, 249 bp, Muscodor strobelii
  misc_feature: SGI cDNA ID NO. 569249
  misc_feature: Elevated expression when VOC is produced
  misc_feature: Encodes the peptide sequence at SEQ ID NO 27022
atgaccgaaggactcacggcgtacgaattgacagcagccaaggttgccggcgtctattcggttggagaccagatcacgctggcggatgtaacattggttccggctatctggggcgcacagcggtttggggtcgacatgcagagatttccaacgatcatgaaggtatacgagaagctttcggttctgccggctgttgcggaaggtcattggcagaaccaacctgacacaccttccgagctaagaggttga

SEQ ID NO: 27022 - protein, 82 aa, Muscodor strobelii
  misc_feature: SGI Peptide ID NO. 569249
  misc_feature (19)..(63): Pfam Id: PF00043 Pfam Desc: Glutathione S-transferase, C-terminal domain
  misc_feature (1)..(82): NCBI GI: 256723958 Blast Desc: NECHADRAFT_67879 [Nectria haematococca mpVI 77-13-4]
  misc_feature (1)..(82): NCBI GI: 46111941 Blast Desc: FG02852.1 [Gibberella zeae PH-1]
  misc_feature (4)..(81): NCBI GI: 212529488 Blast Desc: maleylacetoacetate isomerase MaiA [Penicillium marneffei ATCC 18224] gi|212529490|ref|XP_002144902.1| maleylacetoacetate isomerase MaiA [Penicillium marneffei ATCC
  misc_feature (3)..(81): NCBI GI: 121710292 Blast Desc: maleylacetoacetate isomerase MaiA [Aspergillus clavatus NRRL 1] gi|119400912|gb|EAW11336.1| maleylacetoacetate isomerase MaiA [Aspergillus clavatus NRRL 1]
  misc_feature (4)..(81): NCBI GI: 242763003 Blast Desc: fumarylacetoacetate hydrolase FahA [Talaromyces stipitatus ATCC 10500] gi|218723687|gb|EED23104.1| fumarylacetoacetate hydrolase FahA [Talaromyces stipitatus ATCC
  misc_feature (1)..(81): NCBI GI: 70989413 Blast Desc: maleylacetoacetate isomerase MaiA [Aspergillus fumigatus Af293] gi|66847187|gb|EAL87518.1| maleylacetoacetate isomerase MaiA [Aspergillus fumigatus Af293] maleylacetoacetate
  misc_feature (1)..(81): NCBI GI: 119480055 Blast Desc: maleylacetoacetate isomerase MaiA [Neosartorya fischeri NRRL 181] gi|119408210|gb|EAW18159.1| maleylacetoacetate isomerase MaiA [Neosartorya fischeri NRRL 181]
  misc_feature (1)..(82): NCBI GI: 240274387 Blast Desc: maleylacetoacetate isomerase MaiA [Ajellomyces capsulatus H143]
  misc_feature (4)..(81): NCBI GI: 67522877 Blast Desc: MAAI_EMENI Maleylacetoacetate isomerase (MAAI) [Aspergillus nidulans FGSC A4] gi|3914021|sp|O43123.1|MAAI_EMENI RecName: Full=Maleylacetoacetate isomerase; Short=MAAI isomerase
  misc_feature (3)..(81): NCBI GI: 145243374 Blast Desc: An11g02160 [Aspergillus niger] gi|134078891|emb|CAK40576.1| protein product [Aspergillus niger]
  misc_feature (4)..(81): SWISSPROT Homolog: EC 5.2.1.2 Maleylacetoacetate isomerase
  misc_feature: Useful for introducing or modulating the production of volatile compounds
MTEGLTAYELTAAKVAGVYSVGDQITLADVTLVPAIWGAQRFGVDMQRFPTIMKVYEKLSVLPAVAEGHWQNQPDTPSELRG

SEQ ID NO: 27023 - DNA, 2508 bp, Muscodor strobelii; identical to SEQ ID NO: 27020
  misc_feature: SGI EST ID NO. CUFF.63833.1
  misc_feature: Variant of the nucleotide sequence at SEQ ID NO 27021

SEQ ID NO: 27024 - DNA, 2112 bp, Muscodor strobelii
  misc_feature: SGI cDNA ID NO. 569250
  misc_feature: Elevated expression when VOC is produced
  misc_feature: Encodes the peptide sequence at SEQ ID NO 27025
atgggctgcctgtggagcagaccagagccagctccgcgtactctatatgaatactcggagagcctacccacgggtcgtatacgccttctagaatgtcagggcagcatcgacaattggtttatctcacttttccgacgccgcctacactacaagttgatcacggcagaattgcgcgatagccccgagttcatcgccgtgtcatacatgtggggttccagcatctgtaccaaaactatttttattggagatgcacatattttgcccatcacggagagtgcgaatgagtgtttgaacatcctatctaactacaaatatctttggatcgattccatatgtatcaatcagaaggataaggaagagaaatccaagcaagttggcttcataggcgcgatatacagccacgctgccgaggttgttggcatactagggaattccactagcgagatcgactgggcctatggcacagtgttcgatggacccctgcggctatccaaagagtacggacggcttccacaacgcgaaagacgggagacagaaagacgccttcttggacagaagtcgttattttcttatggaacgctgagttcatacgccaatgaaagactatctttcgtcttcgtgatggccaatcagcttgaaatccattccagggcgatcagaatactccgtcatccttactggaggcgcgtctggattttacaggaacttgcactcgcgaaaaaggttacagtgtatcatgatggcttcttcgttggctggcggacgctattaaatagaatcgagagtctagtggagctcgaagaagatctcaccctgctcaattatgcccaatggcgtcaagatggggtctatttttacacactcgcggatttcatcgcaaggtaccaatctctattcgtagggtgtcccaagatacagaatatttttggcaacgagagtcgtgaaaattacatgcgaaaccttcagctcttacgtcaaattgaacaacttagatacaatcgaaaacggaccataggcgatcttcttattaacaccacttgctccttggcaacggatcccagagacaaagtgtttgccctgcttggccttgtatcggatgggcatataatcccaaagccggccaaccccatgatcacgcctaactatggcaaatcactccaggacgtctatacagaaactaccctggccttgattgaattgggcgactataccacacttcttctgggtgctggcattggatgggacccgaaaaatcgtggcatgccgtcttgggtagtagactgggaaagaacaccccagctcttcctccatagtaatgatcaccacagctcgaatagactggacaatttctgggcgggtggtacaaatgaacctacagaggtagataagcagcacttcgtcgccatcagccccgataagatcatgggcaggtttttaccctttgacacgattatattcataagctccgtgatcagacccgactcgacctcttggttagtggaatgcttaaatgaaatccgtttacttgtgcccaagcaatattcccagggatccacatatccatttactccggccgatttgcacgaagccctttggcgggttttattagacgttcctggactcgggaatcgtaagggcaataagtgcagtccttcctgtgccgtgcaaactgacgcctttgctcccggttttgttgaattcaatggggaagagcatctttgtcgcgagttggtggacaaggccttccgcgcatgggttagcctggagccgccgacttttccaaggtaccatgagctcagaagaagttttcaggatgcattatcgcgctgccagtctaatggctctcgccttgctgttactacacaaggctatttaggtacagttccgccacaaacggcccttggcgatgagatcatggttcatttcgggtgtccattgcctgtcatagtcagaaaggcacctgatcaaagtctcaatctaggatttgctcacgttcatcggcgtctcgttggtaaagcacactttctcggcatgatgagagctgaatgggcggaaatagttggcgttaaagagaggatcgcccgcgaaggtctcaacgtcgtattatcatag

SEQ ID NO: 27025 - protein, 703 aa, Muscodor strobelii
  misc_feature: SGI Peptide ID NO. 569250
  misc_feature (63)..(235): Pfam Id: PF06985 Pfam Desc: Heterokaryon incompatibility protein (HET)
  misc_feature (102)..(136): Pfam Id: PF06985 Pfam Desc: Heterokaryon incompatibility protein (HET)
  misc_feature (23)..(685): NCBI GI: 6578961 Blast Desc: heterokaryon incompatibility protein [Neurospora crassa]
  misc_feature (17)..(446): NCBI GI: 169777885 Blast Desc: [Aspergillus oryzae RIB40] gi|83772145|dbj|BAE62275.1| protein product [Aspergillus oryzae]
  misc_feature (48)..(438): NCBI GI: 145245097 Blast Desc: An11g08520 [Aspergillus niger] gi|134079510|emb|CAK46042.1| protein product [Aspergillus niger]
  misc_feature (21)..(685): NCBI GI: 30315956 Blast Desc: HET6_NEUCR RecName: Full=Heterokaryon incompatibility protein 6, OR allele; Short=Het-6(OR) gi|6578941|gb|AAF18141.1| heterokaryon incompatibility protein [Neurospora crassa] protein
  misc_feature (49)..(696): NCBI GI: 39976177 Blast Desc: MGG_05985 [Magnaporthe grisea 70-15] gi|145011741|gb|EDJ96397.1| MGG_05985 [Magnaporthe grisea 70-15]
  misc_feature (44)..(703): NCBI GI: 169617620 Blast Desc: SNOG_11993 [Phaeosphaeria nodorum SN15] gi|111059285|gb|EAT80405.1| SNOG_11993 [Phaeosphaeria nodorum SN15]
  misc_feature (55)..(673): NCBI GI: 145234110 Blast Desc: An02g12950 [Aspergillus niger] gi|134057368|emb|CAK37923.1| protein product [Aspergillus niger]
  misc_feature (48)..(679): NCBI GI: 256721216 Blast Desc: NECHADRAFT_101059 [Nectria haematococca mpVI 77-13-4]
  misc_feature (41)..(682): NCBI GI: 189190762 Blast Desc: conserved [Pyrenophora tritici-repentis Pt-1C-BFP] gi|187973326|gb|EDU40825.1| conserved [Pyrenophora tritici-repentis Pt-1C-BFP]
  misc_feature (68)..(428): NCBI GI: 238495120 Blast Desc: conserved [Aspergillus flavus NRRL3357] gi|220695446|gb|EED51789.1| conserved [Aspergillus flavus NRRL3357]
  misc_feature: Useful for introducing or modulating the production of volatile compounds
MGCLWSRPEPAPRTLYEYSESLPTGRIRLLECQGSIDNWFISLFRRRLHYKLITAELRDSPEFIAVSYMWGSSICTKTIFIGDAHILPITESANECLNILSNYKYLWIDSICINQKDKEEKSKQVGFIGAIYSHAAEVVGILGNSTSEIDWAYGTVFDGPLRLSKEYGRLPQRERRETERRLLGQKSLFSYGTLSSYANERLSFVFVMANQLEIHSRAIRILRHPYWRRVWILQELALAKKVTVYHDGFFVGWRTLLNRIESLVELEEDLTLLNYAQWRQDGVYFYTLADFIARYQSLFVGCPKIQNIFGNESRENYMRNLQLLRQIEQLRYNRKRTIGDLLINTTCSLATDPRDKVFALLGLVSDGHIIPKPANPMITPNYGKSLQDVYTETTLALIELGDYTTLLLGAGIGWDPKNRGMPSWVVDWERTPQLFLHSNDHHSSNRLDNFWAGGTNEPTEVDKQHFVAISPDKIMGRFLPFDTIIFISSVIRPDSTSWLVECLNEIRLLVPKQYSQGSTYPFTPADLHEALWRVLLDVPGLGNRKGNKCSPSCAVQTDAFAPGFVEFNGEEHLCRELVDKAFRAWVSLEPPTFPRYHELRRSFQDALSRCQSNGSRLAVTTQGYLGTVPPQTALGDEIMVHFGCPLPVIVRKAPDQSLNLGFAHVHRRLVGKAHFLGMMRAEWAEIVGVKERIAREGLNVVLS

SEQ ID NO: 27026 - DNA, 3354 bp, Muscodor strobelii
  misc_feature: SGI EST ID NO. CUFF.63910.1
  misc_feature: Variant of the nucleotide sequence at SEQ ID NO 27024
aaaaaacttaacaacaactccttgcaattcgtcttcgcacagcttaacgtgcttcatctaggccatcgacagtatctgctcctaacgggagataatgccctcgctgcaattatgacatagagctctaggtccctgtaagatacttgccccgcttctgctacaggtaactagaggaataccctgcccatcatcaataacccttcgcactccccacatgaagacatggactgcaacggagtcatactgaacatcacatagggtggtacttgtgcgcatcaaccatatttgaatctagtctcggaaagcgaaatttaatgttatcagctggttattcaagtgctgtctgcgaccaagtgataacaattttcgctcgcgcattgatcacagtcaagctcaagcgatcgcctacacttacaactcttgacactgtcacttacggtagctatcaatcgcatatccatgtatcaagccacccatcttgctccctggctgtcaagtcttcatcacagagaatcaccgggctgttcagcttaacgtcctcggctaggcatagaatcgttcaattaaggagacaccgagcattgaacaggttacatgtcccaaatgtggtggtcaacctaagaaataggcgctagtcacatgacattgattgctcatcgaatgctcgatcccgccaggtgttcaattcgccatcttacttttacttatactatcagcccgtcaatcactggtgccaaatatgggctgcctgtggagcagaccagagccagctccgcgtactctatatgaatactcggagagcctacccacgggtcgtatacgccttctagaatgtcagggcagcatcgacaattggtttatctcacttttccgacgccgcctacactacaagttgatcacggcagaattgcgcgatagccccgagttcatcgccgtgtcatacatgtggggttccagcatctgtaccaaaactatttttattggagatgcacatattttgcccatcacggagagtgcgaatgagtgtttgaacatcctatctaactacaaatatctttggatcgattccatatgtatcaatcagaaggataaggaagagaaatccaagcaagttggcttcataggcgcgatatacagccacgctgccgaggttgttggcatactagggaattccactagcgagatcgactgggcctatggcacagtgttcgatggacccctgcggctatccaaagagtacggacggcttccacaacgcgaaagacgggagacagaaagacgccttcttggacagaagtcgttattttcttatggaacgctgagttcatacgccaatgaaagactatctttcgtcttcgtgatggccaatcagcttgaaatccattccagggcgatcagaatactccgtcatccttactggaggcgcgtctggattttacaggaacttgcactcgcgaaaaaggttacagtgtatcatgatggcttcttcgttggctggcggacgctattaaatagaatcgagagtctagtggagctcgaagaagatctcaccctgctcaattatgcccaatggcgtcaagatggggtctatttttacacactcgcggatttcatcgcaaggtaccaatctctattcgtagggtgtcccaagatacagaatatttttggcaacgagagtcgtgaaaattacatgcgaaaccttcagctcttacgtcaaattgaacaacttagatacaatcgaaaacggaccataggcgatcttcttattaacaccacttgctccttggcaacggatcccagagacaaagtgtttgccctgcttggccttgtatcggatgggcatataatcccaaagccggccaaccccatgatcacgcctaactatggcaaatcactccaggacgtctatacagaaactaccctggccttgattgaattgggcgactataccacacttcttctgggtgctggcattggatgggacccgaaaaatcgtggcatgccgtcttgggtagtagactgggaaagaacaccccagctcttcctccatagtaatgatcaccacagctcgaatagactggacaatttctgggcgggtggtacaaatgaacctacagaggtagataagcagcacttcgtcgccatcagccccgataagatcatgggcaggtttttaccctttgacacgattatattcataagctccgtgatcagacccgactcgacctcttggttagtggaatgcttaaatgaaatccgtttacttgtgcccaagcaatattcccagggatccacatatccatttactccggccgatttgcacgaagccctttggcgggttttattagacgttcctggactcgggaatcgtaagggcaataagtgcagtccttcctgtgccgtgcaaactgacgcctttgctcccggttttgttgaattcaatggggaagagcatctttgtcgcgagttggtggacaaggccttccgcgcatgggttagcctggagccgccgacttttccaaggtaccatgagctcagaagaagttttcaggatgcattatcgcgctgccagtctaatggctctcgccttgctgttactacacaaggctatttaggtacagttccgccacaaacggcccttggcgatgagatcatggttcatttcgggtgtccattgcctgtcatagtcagaaaggcacctgatcaaagtctcaatctaggatttgctcacgttcatcggcgtctcgttggtaaagcacactttctcggcatgatgagagctgaatgggcggaaatagttggcgttaaagagaggatcgcccgcgaaggtctcaacgtcgtattatcatagtttcaagtcaagctttcacaatgtctaacactgaactttgatagtttccccatagtcgatagactattagggtccagcgactcggtatgcacgaagttaaggtgctataccacacacaaactatccgatatactatccgaacaattggaatttgacaactccgattcgacttttgtcagctcgtttcacgttttgggttcgcatgtgggttgtattcgtactaatagtccagtgtcacactagaatgccgcttggcgtgatagctcatgttcatgcatggtaaacctctcggtgcagagctgatcaggggccgacggtctagaatctggttatgttattataagtacaggttcttccaatatcccgtgcagagcctcatgctatgcctcgtcgacacatatggtctaatccggcgttggtcttctaaaaacgacgccaatccagtcgcatcagcatgctgagtataaattcatgtttttgaacatcgtcctcaagtatttcag

SEQ ID NO: 27027 - DNA, 2919 bp, Muscodor strobelii
  misc_feature: SGI cDNA ID NO. 569251
  misc_feature: Encodes the peptide sequence at SEQ ID NO 27028
atggattccctcaagttttacctttgtggagatgaattcctgggaccctcagtcactacgggttgtcagcgcgactttgatttcacagtccaatttgaggagctcatcttagctatactgccgactgctctatttctccttctcacgccattccgtgctttcagacttctgaggcgaaagattagagttagaagaaatggcctttacattgcaaaactgataaccatcggagcctataccggtctccagctcgctttattggttcaatgggcactcccgcacaatcgaaatgccgtgtcgattgcatcgactgctctctcgctcgtgtccggattatcgctagcgttgctgtcacatctggagcacgcaaagtcaatccgtccctcattcctaattagcttttacctgctcattacagtattgctagatgccgcgcgcacaagaacacgttggcttgtggagtacgacaatggagcagcggcgacattgagcgcttccctaggtatcaagatagtccttcttgttctcgaggcaatcggcaagcggcgactgttagcaggggttgatcgcgagtgctctactgaaagtaccagcagtcttttcgatcgcggccttttcttctggctcaaccctttgcttctctctgggtttgggcatgtactcgcagtcgcagacttgccagcaattaacgagaaacttgattcgagtgagctgcatgagagcctttcgaacacatggaagcgctgcaatcggaacagaaaccatgctctcgcaatagcgacagtgcgggcatttcggtgggaggtagtctacatcgcgctacccaagctggcttacattgcgctgagtctcacccaacccttcctaatacaagaagccgtggcattcgtcaagaatgatggaacaagagacgatgatagtactggatatggcctcattggtgctttcgcattgatctacatcagtctcgcggtcactctgggatggtcttcgcatctgacgtaccggcttatgactatgatgcgtgggagtcttatctcagttatctatcaaaagatgatggaggcgaagatgacaaagtcgaacgaatcacccgctgttactctcatgggaacagacgtgcagcgaatcgcggaaaccttctggtacctcttgatcgaagcaataccggcgctgatccaagtccctatcgctacgtacttactttatcgccaactgggcactgtctttgtagttctacttattctatcaattgccggcacggcactctctggtgtgttggccaataaaacttcacgcaggcaaaaacggtggattgaagctactcagcggcggatcaaccttacctcggatattctcagctcgatgaaaaacacgaagatgctggggttatcgagtcagatgtttgagatgatacaggagctgcgagagaacgaaattgctgtatccaagaaatatcggcgaacccaaagctataatatcacacttgccaatgctcccgaatcacttgccaagcttcttttgttcggcgcctacgcgattattgcgagtatcaatggaacaagtggcctcaacgtgtcgcaagctgtctcttcgcttgcactcatattcttggtctcttaccccctcgctaatattctgattgcaataccattaggttggagcgcgcttggatgcttccagaggattcaggactttctgaacgtatcttctcctgcagatctccgcctggtttcaacgatgagccgagatggctcacaagacgaatacggcattaaatctgatgaaccacgacttaaaaagacccaggagcatgtcgtgcttgagaatacaagcttcggttggtcacaatctgcccagaatcttgtgtctggggccaatgctcgaatcgattctggagccaagctcacgatcctgatcggcccagtaggatgtggaaagtcaccattcttgcaaggaatactaggtgaaacaccttatacatcagggtccatagaattgtcatcttcgcgtatcgcttattgcagtcaaacgccgtggattatgagtgggacagttcgagctaacatagtcggcgagacaaatttcgagagaaactggtaccaagcagtcataagagcatgcgccctagaaatcgacatcaacaagctaccctctggggactccaccattgttggaagtaagggtgtcaagttaagtggtggacagaaacagcggctttcccttgcaagagccctatatgcgcagaaatcaataattgtcctcgacgacatcttcagtggtcttgactcagctaccgaggatttcatcttccagcacgttttcggtgagaatggcattcttgggaagacagggacactggtcattcttgcaacacattcaattaagaggctaccccaagccgacttcgtacatgtgatgaaccaagagggccggattgtcgaacaagggccgttctccgacctaaacatcccggggagctacattcacagtctggaaatcgccactgttgagagtagtgacagcgaagatagtgaggaaagtactgtcaaagatgataaggcccgagctatgggtgctccacaatcacagagcgtagactctagtcgtcaaactggtgattgggctacttacaagtactacatcaagtcacttggcgctttcagcctcctgggcttcgtgcttctcacggtggtcaatgtagccgcgaatggcattcaagttgtgtggttgaattggtgggcgtcgagcaacgaacgcggagaacctccaagaaccggttactggctcggacttttcgcagcgtttggcgttatagagatatttggactggtcgcgtcaatttcgtacgcaaaatatgtccgttcgattagtctagcattgctaaagagtctcataggcatctttatgtccgagtga

SEQ ID NO: 27028 - protein, 972 aa, Muscodor strobelii
  misc_feature: SGI Peptide ID NO. 569251
  misc_feature (634)..(811): Pfam Id: PF00005 Pfam Desc: ABC transporter
  misc_feature (269)..(543): Pfam Id: PF00664 Pfam Desc: ABC transporter transmembrane region
  misc_feature (1)..(954): NCBI GI: 256731444 Blast Desc: NECHADRAFT_96302 [Nectria haematococca mpVI 77-13-4]
  misc_feature (9)..(949): NCBI GI: 46123527 Blast Desc: FG06141.1 [Gibberella zeae PH-1]
  misc_feature (9)..(948): NCBI GI: 238495032 Blast Desc: ABC transporter, [Aspergillus flavus NRRL3357] gi|220695402|gb|EED51745.1| ABC transporter, [Aspergillus flavus NRRL3357]
  misc_feature (1)..(971): NCBI GI: 119175968 Blast Desc: CIMG_09753 [Coccidioides immitis RS]
  misc_feature (1)..(971): NCBI GI: 240108805 Blast Desc: multidrug resistance protein MDR, [Coccidioides posadasii C735 delta SOWgp]
  misc_feature (9)..(945): NCBI GI: 212543171 Blast Desc: multidrug resistance-associated protein, [Penicillium marneffei ATCC 18224] gi|210066647|gb|EEA20740.1| multidrug resistance-associated protein, [Penicillium marneffei ATCC 18224]
  misc_feature (22)..(945): NCBI GI: 119495913 Blast Desc: ABC multidrug transporter, [Neosartorya fischeri NRRL 181] gi|119412894|gb|EAW22835.1| ABC multidrug transporter, [Neosartorya fischeri NRRL 181]
  misc_feature (22)..(945): NCBI GI: 121701919 Blast Desc: ABC multidrug transporter, [Aspergillus clavatus NRRL 1] gi|119397367|gb|EAW07798.1| ABC multidrug transporter, [Aspergillus clavatus NRRL 1]
  misc_feature (22)..(945): NCBI GI: 238498512 Blast Desc: ABC multidrug transporter, [Aspergillus flavus NRRL3357] gi|220693765|gb|EED50110.1| ABC multidrug transporter, [Aspergillus flavus NRRL3357]
  misc_feature (22)..(945): NCBI GI: 146322566 Blast Desc: ABC multidrug transporter [Aspergillus fumigatus Af293] gi|129557731|gb|EAL90367.2| ABC multidrug transporter, [Aspergillus fumigatus Af293] gi|159131160|gb|EDP56273.1| ABC
  misc_feature (196)..(832): SWISSPROT Homolog: EC 3.6.3.44 Xenobiotic-transporting ATPase
MDSLKFYLCGDEFLGPSVTTGCQRDFDFTVQFEELILAILPTALFLLLTPFRAFRLLRRKIRVRRNGLYIAKLITIGAYTGLQLALLVQWALPHNRNAVSIASTALSLVSGLSLALLSHLEHAKSIRPSFLISFYLLITVLLDAARTRTRWLVEYDNGAAATLSASLGIKIVLLVLEAIGKRRLLAGVDRECSTESTSSLFDRGLFFWLNPLLLSGFGHVLAVADLPAINEKLDSSELHESLSNTWKRCNRNRNHALAIATVRAFRWEVVYIALPKLAYIALSLTQPFLIQEAVAFVKNDGTRDDDSTGYGLIGAFALIYISLAVTLGWSSHLTYRLMTMMRGSLISVIYQKMMEAKMTKSNESPAVTLMGTDVQRIAETFWYLLIEAIPALIQVPIATYLLYRQLGTVFVVLLILSIAGTALSGVLANKTSRRQKRWIEATQRRINLTSDILSSMKNTKMLGLSSQMFEMIQELRENEIAVSKKYRRTQSYNITLANAPESLAKLLLFGAYAIIASINGTSGLNVSQAVSSLALIFLVSYPLANILIAIPLGWSALGCFQRIQDFLNVSSPADLRLVSTMSRDGSQDEYGIKSDEPRLKKTQEHVVLENTSFGWSQSAQNLVSGANARIDSGAKLTILIGPVGCGKSPFLQGILGETPYTSGSIELSSSRIAYCSQTPWIMSGTVRANIVGETNFERNWYQAVIRACALEIDINKLPSGDSTIVGSKGVKLSGGQKQRLSLARALYAQKSIIVLDDIFSGLDSATEDFIFQHVFGENGILGKTGTLVILATHSIKRLPQADFVHVMNQEGRIVEQGPFSDLNIPGSYIHSLEIATVESSDSEDSEESTVKDDKARAMGAPQSQSVDSSRQTGDWATYKYYIKSLGAFSLLGFVLLTVVNVAANGIQVVWLNWWASSNERGEPPRTGYWLGLFAAFGVIEIFGLVASISYAKYVRSISLALLKSLIGIFMSE

SEQ ID NO: 27029 - DNA, 7155 bp, Muscodor strobelii
  misc_feature: SGI EST ID NO. CUFF.63741.0
  misc_feature: Variant of the nucleotide sequence at SEQ ID NO 27027
ttttttgataggaggaaatggacgttagccaatcttgcgaaaagcccgatagtctgccttgcaggcaccatcgaggcagcaacttgcgcagcgaaagccagcgccagcactcttgcgcatggctagtttgccggatgaagtcttgctcaagctcaagaaaggggggggaaccgtacttttattcactgtggttgtctgcgaaaagctccacaccaagcgggttccagcgccttgcaagtggcggtgatactggtatgttctcgcatggtgacaatgcaagagagttgaacttggctactctggctcctttgctgcgccgcttgttgaatgcagatactaccggtacagaatactgacagaactgaggaacctcgccattcaccctattgaagtttcatctcattggccactgcgtcaagcttatttaggagtcttttcgaaagcttcttaacgcgccacgacgagcgttagatgccatggccatctcgccatgactaccaacttgaaatgaagggtcgactgactcaccatcgtaagctgttccttgaaactcatatatgtgtcgactggaaaataaagacatcgcctatcgtagaacatatctgggacttctcattttttttaaggaagatggaaagcatctatgtatcgtcctgatcagattacctggtttctaccatcgtctgatgttgattgctggcgtggataagggaatctggcaacggtcgggatttggaggacacgcgacatgcctcgatgaacaatgtaagcacggctcttcgacttcgcacgacgaaccagtatgacgtgccgttattcaaatgtagttatcggattaattgtgtcgtttatttagacatggagagcctgtgaactcaaaccctccgtgagctgcaggcgggcacggtgggagtcaaaatgaatggcaccatcgaataccacaacgtatacgatttcgaatagaacagcgaataatgtcttgatggtaacccagaactctgacggaatttatttaagaaattctataacaaatgttgattagtttcgttttatatagataatgtcgtaaggccgtattgctggtacaattagatgttggtatatgtaaatgtatcacctattttaattctggccaggcggggtcatattggtaaggtcagtcatccaaccaagcaaccccaccaatgatcctttgtgcatactggtcagcactgtcgatgtcacccaaactatgaagtcattcgatgagatttcttagagatacgaagcatgatccaattgacaagtcatgacttcacttcatctggcaaacacactttacaccgactttattttcaacatcccctgctaaatagctggaataggcagtagcccgaaccccgacctcaatacattccgattaggcagacatccttgcttatcttctataaactcacgataaatatgtggttcaaagattgcggcgcaagacagcactcattcttaagcgattcgattccataagcgaatagtgctaatatgtcaaagtgtgaagttacgggaccctaatgctctaggctgttgacaaccttaatatggattccctcaagttttacctttgtggagatgaattcctgggaccctcagtcactacgggttgtcagcgcgactttgatttcacagtccaatttgaggagctcatcttagctatactgccgactgctctatttctccttctcacgccattccgtgctttcagacttctgaggcgaaagattagagttagaagaaatggcctttacattgcaaaactgataaccatcggagcctataccggtctccagctcgctttattggttcaatgggcactcccgcacaatcgaaatgccgtgtcgattgcatcgactgctctctcgctcgtgtccggattatcgctagcgttgctgtcacatctggagcacgcaaagtcaatccgtccctcattcctaattagcttttacctgctcattacagtattgctagatgccgcgcgcacaagaacacgttggcttgtggagtacgacaatggagcagcggcgacattgagcgcttccctaggtatcaagatagtccttcttgttctcgaggcaatcggcaagcggcgactgttagcaggggttgatcgcgagtgctctactgaaagtaccagcagtcttttcgatcgcggccttttcttctggctcaaccctttgcttctctctgggtttgggcatgtactcgcagtcgcagacttgccagcaattaacgagaaacttgattcgagtgagctgcatgagagcctttcgaacacatggaagcgctgcaatcggaacagaaaccatgctctcgcaatagcgacagtgcgggcatttcggtgggaggtagtctacatcgcgctacccaagctggcttacattgcgctgagtctcacccaacccttcctaatacaagaagccgtggcattcgtcaagaatgatggaacaagagacgatgatagtactggatatggcctcattggtgctttcgcattgatctacatcagtctcgcggtcactctgggatggtcttcgcatctgacgtaccggcttatgactatgatgcgtgggagtcttatctcagttatctatcaaaagatgatggaggcgaagatgacaaagtcgaacgaatcacccgctgttactctcatgggaacagacgtgcagcgaatcgcggaaaccttctggtacctcttgatcgaagcaataccggcgctgatccaagtccctatcgctacgtacttactttatcgccaactgggcactgtctttgtagttctacttattctatcaattgccggcacggcactctctggtgtgttggccaataaaacttcacgcaggcaaaaacggtggattgaagctactcagcggcggatcaaccttacctcggatattctcagctcgatgaaaaacacgaagatgctggggttatcgagtcagatgtttgagatgatacaggagctgcgagagaacgaaattgctgtatccaagaaatatcggcgaacccaaagctataatatcacacttgccaatgctcccgaatcacttgccaagcttcttttgttcggcgcctacgcgattattgcgagtatcaatggaacaagtggcctcaacgtgtcgcaagctgtctcttcgcttgcactcatattcttggtctcttaccccctcgctaatattctgattgcaataccattaggttggagcgcgcttggatgcttccagaggattcaggactttctgaacgtatcttctcctgcagatctccgcctggtttcaacgatgagccgagatggctcacaagacgaatacggcattaaatctgatgaaccacgacttaaaaagacccaggagcatgtcgtgcttgagaatacaagcttcggttggtcacaatctgcccagaatcttgtgtctggggccaatgctcgaatcgattctggagccaagctcacgatcctgatcggcccagtaggatgtggaaagtcaccattcttgcaaggaatactaggtgaaacaccttatacatcagggtccatagaattgtcatcttcgcgtatcgcttattgcagtcaaacgccgtggattatgagtgggacagttcgagctaacatagtcggcgagacaaatttcgagagaaactggtaccaagcagtcataagagcatgcgccctagaaatcgacatcaacaagctaccctctggggactccaccattgttggaagtaagggtgtcaagttaagtggtggacagaaacagcggcttgtaatttacccccgatggaagcacgttgaatgctcatgttaataatctctagtcccttgcaagagccctatatgcgcagaaatcaataattgtcctcgacgacatcttcagtggtcttgactcagctaccgaggatttcatcttccagcacgttttcggtgagaatggcattcttgggaagacagggacactggtcattcttgcaacacattcaattaagaggctaccccaagccgacttcgtacatgtgatgaaccaagagggccggattgtcgaacaagggccgttctccgacctaaacatcccggggagctacattcacagtctggaaatcgccactgttgagagtagtgacagcgaagatagtgaggaaagtactgtcaaagatgataaggcccgagctatgggtgctccacaatcacagagcgtagactctagtcgtcaaactggtgattgggctacttacaagtactacatcaagtcacttggcgctttcagcctcctgggcttcgtgcttctcacggtggtcaatgtagccgcgaatggcattcaagttgtgtggttgaattggtgggcgtcgagcaacgaacgcggagaacctccaagaaccggttactggctcggacttttcgcagcgtttggcgttatagagatatttggactggtcgcgtcaatttcgtacgcaaaatatgtccgttcgattagtctagcattgctaaagagtctcataggcatctttatgtccgagtgattccatcgtcaggaaacaagcttcacaagtcgattttgaccgctgccttcagagcgcctatgtctttcatatctagaacggagaccggagtcctcgtcaatagatttagtcaggatctccgacttgcagacatggacctacctcgagccttgatcaattgttgttttcaactgggccaatgcgttgtcacgacaatcttggccgtgacagcagttggatacttcgctgctgttctcccggtcattattgcggttctatatctagttcaacgtttctacttacgcacctctcgccagctgcgtcttcttgagctggaaacaactgcacccctcttctcgcatttcctcgagtctctggatggattatcgactattcgcgcattcggatggacagaagaatacgtctcgaagaacgccaaactactaaacgaatcccaaaagccatactacctccttctttgtattcaaaggtggcttgtccttgtcctcgacttgatcgttgccggcctcgcaattctcattgtgggattggcagtgggacttcgcacgaaaattagccctggtcttcttggtatcgcattagctcaacttacgagcttgtcgcttgctctcacccaattgatccagttttggactttgctcgagacatccgtaggcgcaattgcgcgtatccgtgatttctcgcaagacacaccaacagagcttgcggcaggagagatgaatgaagctccctcgaattggccgtctcgtggtgaactgaggttcgagtgtgtgtctgctcgatatgatgatgatacgccgccagtcttgaaagacgtaagtttcgaactagatggcggttcaaagattggtattgtgggaagaactggaagcgggaagagttcattggtacagaccatcttacgaatgattgaaatcacaggagggcgggttgttatcgatggcgtagatttggcgatactctccggatccgttgttcgcgaaaagatcgtcacattgacacaagacccatttctcttcccagcatcaatacgagtcaacattgaccctatgggagttttgacagatgaagatatagctattgcccttcaaaaggtcaatctttggaacgttctaaaggaaaaaacggcaggcgacaatccatctacgaaagatgtgcttgacacatcaattaccacagacatcctctctcacggccaacgccagcttttctgtctcgcccgtgctctactcaaacctggcaagattttaatacttgatgagcctactagcagcgtcgattcgaaaacggatgctcaaatgcaagaaatcattcgtactgaattcgcagatcacacgatcattatgattgcccatcgcctatcaagtctgctagatttcgacagcgttctcgtctttgagcaaggttcgcttgttgagactggtagtcctactgacttactcaacgatacagaaagtcacttcgcgaagatgtatcatggaaccaaaagaaagagccgggccattcaagatacttagagcctgaacaatatttagcgcctgaataatcgtacatctattgaattaacctatcactgacagcttaattcacaatctcgacttccatcatccgctcaaggtgcaccctatgcgactgagagacgaagaaaggcctcttcctaactggtccaggcctgacggttacaggcagtgccacatcagctaggaaatgaggcaacgtgaacttcccaagctttccatcccattgcatttcaatcgttctgcctcctatcgaccatgacgaaccacgtgtatgcacgctaggcttcctcttcgcttcttccactttatttcgaagcctcagcgcacgctttgccgcctcttttgctgccggagtctccgtcagtgcgctggttcgcgcagttgccgcagcagtgtaggcgtcatatgcgtcgctataatgattgagcgctagcaagatatggcccttatagagattgcacgttgagagtggtgccaactctgggtcacaagcatctgggtccttggccaaggtcagtgcctcggtgacaattgcaagagcttcggcgtactcgtgcttggagcggtggtgacgcgcgctctgtataagggatacagtgcgctgaaggagcgtgttgatttctagtaatgtctcgtgtttctcttccgcgctaagatcaaaggtgttttgttcggcaagcattttggagatagaaacggagatatacgcgatgaagctacgaatgattattaatgattagtcttcaatgttcaataacacagagaaagtatcgaccagaggttgagatacagatttcttaggattttttgtaatgatttaaaggatcgtattcgttgtctgattgtgccgcgctatcaacctgtctatattagcgtcgccacggcggcgtcgagaacaaagaatactcccaacaatacctcatggaccagctctagaacggtgtgaaagattgacaaaggcgttaaatttcgatgcgaggattgttcctttatgacttctgaatgcaagtgcacttatgagctagtgagggtcaatgggtcttcagttgccgaaaagtttggagttcccagaacacgtcatcgcattcaa

SEQ ID NO: 27030 - DNA, 4383 bp, Muscodor strobelii
  misc_feature: SGI cDNA ID NO. 569252
  misc_feature: Encodes the peptide sequence at SEQ ID NO 27031
atggattccctcaagttttacctttgtggagatgaattcctgggaccctcagtcactacgggttgtcagcgcgactttgatttcacagtccaatttgaggagctcatcttagctatactgccgactgctctatttctccttctcacgccattccgtgctttcagacttctgaggcgaaagattagagttagaagaaatggcctttacattgcaaaactgataaccatcggagcctataccggtctccagctcgctttattggttcaatgggcactcccgcacaatcgaaatgccgtgtcgattgcatcgactgctctctcgctcgtgtccggattatcgctagcgttgctgtcacatctggagcacgcaaagtcaatccgtccctcattcctaattagcttttacctgctcattacagtattgctagatgccgcgcgcacaagaacacgttggcttgtggagtacgacaatggagcagcggcgacattgagcgcttccctaggtatcaagatagtccttcttgttctcgaggcaatcggcaagcggcgactgttagcaggggttgatcgcgagtgctctactgaaagtaccagcagtcttttcgatcgcggccttttcttctggctcaaccctttgcttctctctgggtttgggcatgtactcgcagtcgcagacttgccagcaattaacgagaaacttgattcgagtgagctgcatgagagcctttcgaacacatggaagcgctgcaatcggaacagaaaccatgctctcgcaatagcgacagtgcgggcatttcggtgggaggtagtctacatcgcgctacccaagctggcttacattgcgctgagtctcacccaacccttcctaatacaagaagccgtggcattcgtcaagaatgatggaacaagagacgatgatagtactggatatggcctcattggtgctttcgcattgatctacatcagtctcgcggtcactctgggatggtcttcgcatctgacgtaccggcttatgactatgatgcgtgggagtcttatctcagttatctatcaaaagatgatggaggcgaagatgacaaagtcgaacgaatcacccgctgttactctcatgggaacagacgtgcagcgaatcgcggaaaccttctggtacctcttgatcgaagcaataccggcgctgatccaagtccctatcgctacgtacttactttatcgccaactgggcactgtctttgtagttctacttattctatcaattgccggcacggcactctctggtgtgttggccaataaaacttcacgcaggcaaaaacggtggattgaagctactcagcggcggatcaaccttacctcggatattctcagctcgatgaaaaacacgaagatgctggggttatcgagtcagatgtttgagatgatacaggagctgcgagagaacgaaattgctgtatccaagaaatatcggcgaacccaaagctataatatcacacttgccaatgctcccgaatcacttgccaagcttcttttgttcggcgcctacgcgattattgcgagtatcaatggaacaagtggcctcaacgtgtcgcaagctgtctcttcgcttgcactcatattcttggtctcttaccccctcgctaatattctgattgcaataccattaggttggagcgcgcttggatgcttccagaggattcaggactttctgaacgtatcttctcctgcagatctccgcctggtttcaacgatgagccgagatggctcacaagacgaatacggcattaaatctgatgaaccacgacttaaaaagacccaggagcatgtcgtgcttgagaatacaagcttcggttggtcacaatctgcccagaatcttgtgtctggggccaatgctcgaatcgattctggagccaagctcacgatcctgatcggcccagtaggatgtggaaagtcaccattcttgcaaggaatactaggtgaaacaccttatacatcagggtccatagaattgtcatcttcgcgtatcgcttattgcagtcaaacgccgtggattatgagtgggacagttcgagctaacatagtcggcgagacaaatttcgagagaaactggtaccaagcagtcataagagcatgcgccctagaaatcgacatcaacaagctaccctctggggactccaccattgttggaagtaagggtgtcaagttaagtggtggacagaaacagcggctttcccttgcaagagccctatatgcgcagaaatcaataattgtcctcgacgacatcttcagtggtcttgactcagctaccgaggatttcatcttccagcacgttttcggtgagaatggcattcttgggaagacagggacactggtcattcttgcaacacattcaattaagaggctaccccaagccgacttcgtacatgtgatgaaccaagagggccggattgtcgaacaagggccgttctccgacctaaacatcccggggagctacattcacagtctggaaatcgccactgttgagagtagtgacagcgaagatagtgaggaaagtactgtcaaagatgataaggcccgagctatgggtgctccacaatcacagagcgtagactctagtcgtcaaactggtgattgggctacttacaagtactacatcaagtcacttggcgctttcagcctcctgggcttcgtgcttctcacggtggtcaatgtagccgcgaatggcattcaagttgtgtggttgaattggtgggcgtcgagcaacgaacgcggagaacctccaagaaccggttactggctcggacttttcgcagcgtttggcgttatagagatatttggactggtcgcgtcaatttcgcatctttatgtccgagtgattccatcgtcaggaaacaagcttcacaagtcgattttgaccgctgccttcagagcgcctatgtctttcatatctagaacggagaccggagtcctcgtcaatagatttagtcaggatctccgacttgcagacatggacctacctcgagccttgatcaattgttgttttcaactgggccaatgcgttgtcacgacaatcttggccgtgacagcagttggatacttcgctgctgttctcccggtcattattgcggttctatatctagttcaacgtttctacttacgcacctctcgccagctgcgtcttcttgagctggaaacaactgcacccctcttctcgcatttcctcgagtctctggatggattatcgactattcgcgcattcggatggacagaagaatacgtctcgaagaacgccaaactactaaacgaatcccaaaagccatactacctccttctttgtattcaaaggtggcttgtccttgtcctcgacttgatcgttgccggcctcgcaattctcattgtgggattggcagtgggacttcgcacgaaaattagccctggtcttcttggtatcgcattagctcaacttacgagcttgtcgcttgctctcacccaattgatccagttttggactttgctcgagacatccgtaggcgcaattgcgcgtatccgtgatttctcgcaagacacaccaacagagcttgcggcaggagagatgaatgaagctccctcgaattggccgtctcgtggtgaactgaggttcgagtgtgtgtctgctcgatatgatgatgatacgccgccagtcttgaaagacgtaagtttcgaactagatggcggttcaaagattggtattgtgggaagaactggaagcgggaagagttcattggtacagaccatcttacgaatgattgaaatcacaggagggcgggttgttatcgatggcgtagatttggcgatactctccggatccgttgttcgcgaaaagatcgtcacattgacacaagacccatttctcttcccagcatcaatacgagtcaacattgaccctatgggagttttgacagatgaagatatagctattgcccttcaaaaggtcaatctttggaacgttctaaaggaaaaaacggcaggcgacaatccatctacgaaagatgtgcttgacacatcaattaccacagacatcctctctcacggccaacgccagcttttctgtctcgcccgtgctctactcaaacctggcaagattttaatacttgatgagcctactagcagcgtcgattcgaaaacggatgctcaaatgcaagaaatcattcgtactgaattcgcagatcacacgatcattatgattgcccatcgcctatcaagtctgctagatttcgacagcgttctcgtctttgagcaaggttcgcttgttgagactggtagtcctactgacttactcaacgatacagaaagtcacttcgcgaagatgtatcatggaaccaaaagaaagagccgggccattcaagatacttag

SEQ ID NO: 27031 - protein, 1460 aa, Muscodor strobelii
  misc_feature: SGI Peptide ID NO. 569252
  misc_feature (890)..(1159): Pfam Id: PF00664 Pfam Desc: ABC transporter transmembrane region
  misc_feature (269)..(543): Pfam Id: PF00664 Pfam Desc: ABC transporter transmembrane region
  misc_feature (1235)..(1424): Pfam Id: PF00005 Pfam Desc: ABC transporter
  misc_feature (634)..(811): Pfam Id: PF00005 Pfam Desc: ABC transporter
  misc_feature (1)..(1456): NCBI GI: 256731444 Blast Desc: NECHADRAFT_96302 [Nectria haematococca mpVI 77-13-4]
  misc_feature (9)..(1446): NCBI GI: 238495032 Blast Desc: ABC transporter, [Aspergillus flavus NRRL3357] gi|220695402|gb|EED51745.1| ABC transporter, [Aspergillus flavus NRRL3357]
  misc_feature (1)..(1455): NCBI GI: 46123527 Blast Desc: FG06141.1 [Gibberella zeae PH-1]
  misc_feature (1)..(1450): NCBI GI: 119175968 Blast Desc: CIMG_09753 [Coccidioides immitis RS]
  misc_feature (1)..(1450): NCBI GI: 240108805 Blast Desc: multidrug resistance protein MDR, [Coccidioides posadasii C735 delta SOWgp]
  misc_feature (22)..(1447): NCBI GI: 121701919 Blast Desc: ABC multidrug transporter, [Aspergillus clavatus NRRL 1] gi|119397367|gb|EAW07798.1| ABC multidrug transporter, [Aspergillus clavatus NRRL 1]
  misc_feature (22)..(1447): NCBI GI: 119495913 Blast Desc: ABC multidrug transporter, [Neosartorya fischeri NRRL 181] gi|119412894|gb|EAW22835.1| ABC multidrug transporter, [Neosartorya fischeri NRRL 181]
  misc_feature (9)..(1447): NCBI GI: 212543171 Blast Desc: multidrug resistance-associated protein, [Penicillium marneffei ATCC 18224] gi|210066647|gb|EEA20740.1| multidrug resistance-associated protein, [Penicillium marneffei ATCC 18224]
  misc_feature (22)..(1447): NCBI GI: 145239405 Blast Desc: An08g02330 [Aspergillus niger] gi|134076859|emb|CAK48227.1| protein product [Aspergillus niger]
  misc_feature (22)..(1447): NCBI GI: 146322566 Blast Desc: ABC multidrug transporter [Aspergillus fumigatus Af293] gi|129557731|gb|EAL90367.2| ABC multidrug transporter, [Aspergillus fumigatus Af293] gi|159131160|gb|EDP56273.1| ABC
  misc_feature (206)..(1446): SWISSPROT Homolog: EC 3.6.3.44 Xenobiotic-transporting ATPase
MDSLKFYLCGDEFLGPSVTTGCQRDFDFTVQFEELILAILPTALFLLLTPFRAFRLLRRKIRVRRNGLYIAKLITIGAYTGLQLALLVQWALPHNRNAVSIASTALSLVSGLSLALLSHLEHAKSIRPSFLISFYLLITVLLDAARTRTRWLVEYDNGAAATLSASLGIKIVLLVLEAIGKRRLLAGVDRECSTESTSSLFDRGLFFWLNPLLLSGFGHVLAVADLPAINEKLDSSELHESLSNTWKRCNRNRNHALAIATVRAFRWEVVYIALPKLAYIALSLTQPFLIQEAVAFVKNDGTRDDDSTGYGLIGAFALIYISLAVTLGWSSHLTYRLMTMMRGSLISVIYQKMMEAKMTKSNESPAVTLMGTDVQRIAETFWYLLIEAIPALIQVPIATYLLYRQLGTVFVVLLILSIAGTALSGVLANKTSRRQKRWIEATQRRINLTSDILSSMKNTKMLGLSSQMFEMIQELRENEIAVSKKYRRTQSYNITLANAPESLAKLLLFGAYAIIASINGTSGLNVSQAVSSLALIFLVSYPLANILIAIPLGWSALGCFQRIQDFLNVSSPADLRLVSTMSRDGSQDEYGIKSDEPRLKKTQEHVVLENTSFGWSQSAQNLVSGANARIDSGAKLTILIGPVGCGKSPFLQGILGETPYTSGSIELSSSRIAYCSQTPWIMSGTVRANIVGETNFERNWYQAVIRACALEIDINKLPSGDSTIVGSKGVKLSGGQKQRLSLARALYAQKSIIVLDDIFSGLDSATEDFIFQHVFGENGILGKTGTLVILATHSIKRLPQADFVHVMNQEGRIVEQGPFSDLNIPGSYIHSLEIATVESSDSEDSEESTVKDDKARAMGAPQSQSVDSSRQTGDWATYKYYIKSLGAFSLLGFVLLTVVNVAANGIQVVWLNWWASSNERGEPPRTGYWLGLFAAFGVIEIFGLVASISHLYVRVIPSSGNKLHKSILTAAFRAPMSFISRTETGVLVNRFSQDLRLADMDLPRALINCCFQLGQCVVTTILAVTAVGYFAAVLPVIIAVLYLVQRFYLRTSRQLRLLELETTAPLFSHFLESLDGLSTIRAFGWTEEYVSKNAKLLNESQKPYYLLLCIQRWLVLVLDLIVAGLAILIVGLAVGLRTKISPGLLGIALAQLTSLSLALTQLIQFWTLLETSVGAIARIRDFSQDTPTELAAGEMNEAPSNWPSRGELRFECVSARYDDDTPPVLKDVSFELDGGSKIGIVGRTGSGKSSLVQTILRMIEITGGRVVIDGVDLAILSGSVVREKIVTLTQDPFLFPASIRVNIDPMGVLTDEDIAIALQKVNLWNVLKEKTAGDNPSTKDVLDTSITTDILSHGQRQLFCLARALLKPGKILILDEPTSSVDSKTDAQMQEIIRTEFADHTIIMIAHRLSSLLDFDSVLVFEQGSLVETGSPTDLLNDTESHFAKMYHGTKRKSRAIQDT

SEQ ID NO: 27032 - DNA, 7155 bp, Muscodor strobelii; identical to SEQ ID NO: 27029
  misc_feature: SGI EST ID NO. CUFF.63741.0
  misc_feature: Variant of the nucleotide sequence at SEQ ID NO 27030

SEQ ID NO: 27033 - DNA, 1458 bp, Muscodor strobelii
  misc_feature: SGI cDNA ID NO. 569253
  misc_feature: Elevated expression when VOC is produced
  misc_feature: Encodes the peptide sequence at SEQ ID NO 27034
atgtctttcatatctagaacggagaccggagtcctcgtcaatagatttagtcaggatctccgacttgcagacatggacctacctcgagccttgatcaattgttgttttcaactgggccaatgcgttgtcacgacaatcttggccgtgacagcagttggatacttcgctgctgttctcccggtcattattgcggttctatatctagttcaacgtttctacttacgcacctctcgccagctgcgtcttcttgagctggaaacaactgcacccctcttctcgcatttcctcgagtctctggatggattatcgactattcgcgcattcggatggacagaagaatacgtctcgaagaacgccaaactactaaacgaatcccaaaagccatactacctccttctttgtattcaaaggtggcttgtccttgtcctcgacttgatcgttgccggcctcgcaattctcattgtgggattggcagtgggacttcgcacgaaaattagccctggtcttcttggtatcgcattagctcaacttacgagcttgtcgcttgctctcacccaattgatccagttttggactttgctcgagacatccgtaggcgcaattgcgcgtatccgtgatttctcgcaagacacaccaacagagcttgcggcaggagagatgaatgaagctccctcgaattggccgtctcgtggtgaactgaggttcgagtgtgtgtctgctcgatatgatgatgatacgccgccagtcttgaaagacgtaagtttcgaactagatggcggttcaaagattggtattgtgggaagaactggaagcgggaagagttcattggtacagaccatcttacgaatgattgaaatcacaggagggcgggttgttatcgatggcgtagatttggcgatactctccggatccgttgttcgcgaaaagatcgtcacattgacacaagacccatttctcttcccagcatcaatacgagtcaacattgaccctatgggagttttgacagatgaagatatagctattgcccttcaaaaggtcaatctttggaacgttctaaaggaaaaaacggcaggcgacaatccatctacgaaagatgtgcttgacacatcaattaccacagacatcctctctcacggccaacgccagcttttctgtctcgcccgtgctctactcaaacctggcaagattttaatacttgatgagcctactagcagcgtcgattcgaaaacggatgctcaaatgcaagaaatcattcgtactgaattcgcagatcacacgatcattatgattgcccatcgcctatcaagtctgctagatttcgacagcgttctcgtctttgagcaaggttcgcttgttgagactggtagtcctactgacttactcaacgatacagaaagtcacttcgcgaagatgtatcatggaaccaaaagaaagagccgggccattcaagatacttag

SEQ ID NO: 27034 - protein, 485 aa, Muscodor strobelii
  misc_feature: SGI Peptide ID NO. 569253
  misc_feature (260)..(449): Pfam Id: PF00005 Pfam Desc: ABC transporter
  misc_feature (1)..(184): Pfam Id: PF00664 Pfam Desc: ABC transporter transmembrane region
  misc_feature (1)..(471): NCBI GI: 238495032 Blast Desc: ABC transporter, [Aspergillus flavus NRRL3357] gi|220695402|gb|EED51745.1| ABC transporter, [Aspergillus flavus NRRL3357]
  misc_feature (15)..(481): NCBI GI: 256731444 Blast Desc: NECHADRAFT_96302 [Nectria haematococca mpVI 77-13-4]
  misc_feature (1)..(472): NCBI GI: 145239405 Blast Desc: An08g02330 [Aspergillus niger] gi|134076859|emb|CAK48227.1| protein product [Aspergillus niger]
  misc_feature (15)..(478): NCBI GI: 46123527 Blast Desc: FG06141.1 [Gibberella zeae PH-1]
  misc_feature (1)..(475): NCBI GI: 238840447 Blast Desc: ABC transporter [Microsporum canis CBS 113480]
  misc_feature (1)..(475): NCBI GI: 119175968 Blast Desc: CIMG_09753 [Coccidioides immitis RS]
  misc_feature (1)..(472): NCBI GI: 121701919 Blast Desc: ABC multidrug transporter, [Aspergillus clavatus NRRL 1] gi|119397367|gb|EAW07798.1| ABC multidrug transporter, [Aspergillus clavatus NRRL 1]
  misc_feature (1)..(475): NCBI GI: 240108805 Blast Desc: multidrug resistance protein MDR, [Coccidioides posadasii C735 delta SOWgp]
  misc_feature (1)..(479): NCBI GI: 255954729 Blast Desc: Pc21g10850 [Penicillium chrysogenum Wisconsin 54-1255] gi|211589828|emb|CAP95982.1| Pc21g10850 [Penicillium chrysogenum Wisconsin 54-1255]
  misc_feature (1)..(474): NCBI GI: 121704122 Blast Desc: ABC transporter, [Aspergillus clavatus NRRL 1] gi|119398469|gb|EAW08899.1| ABC transporter, [Aspergillus clavatus NRRL 1]
  misc_feature (1)..(484): SWISSPROT Homolog: EC 3.6.3.44 Xenobiotic-transporting ATPase
  misc_feature: Useful for introducing or modulating the production of volatile compounds
MSFISRTETGVLVNRFSQDLRLADMDLPRALINCCFQLGQCVVTTILAVTAVGYFAAVLPVIIAVLYLVQRFYLRTSRQLRLLELETTAPLFSHFLESLDGLSTIRAFGWTEEYVSKNAKLLNESQKPYYLLLCIQRWLVLVLDLIVAGLAILIVGLAVGLRTKISPGLLGIALAQLTSLSLALTQLIQFWTLLETSVGAIARIRDFSQDTPTELAAGEMNEAPSNWPSRGELRFECVSARYDDDTPPVLKDVSFELDGGSKIGIVGRTGSGKSSLVQTILRMIEITGGRVVIDGVDLAILSGSVVREKIVTLTQDPFLFPASIRVNIDPMGVLTDEDIAIALQKVNLWNVLKEKTAGDNPSTKDVLDTSITTDILSHGQRQLFCLARALLKPGKILILDEPTSSVDSKTDAQMQEIIRTEFADHTIIMIAHRLSSLLDFDSVLVFEQGSLVETGSPTDLLNDTESHFAKMYHGTKRKSRAIQDT

SEQ ID NO: 27035 - DNA, 7155 bp, Muscodor strobelii; identical to SEQ ID NO: 27029
  misc_feature: SGI EST ID NO. CUFF.63741.0
  misc_feature: Variant of the nucleotide sequence at SEQ ID NO 27033

SEQ ID NO: 27036 - DNA, 3732 bp, Muscodor strobelii
  misc_feature: SGI cDNA ID NO. 569254
  misc_feature: Encodes the peptide sequence at SEQ ID NO 27037
atgtactcgcagtcgcagacttgccagcaattaacgagaaacttgattcgagtgagctgcatgagagcctttcgaacacatggaagcgctgtaggcaatcggaacagaaaccatgctctcgcaatagcgacagtgcgggcatttcggtgggaggtagtctacatcgcgctacccaagctggcttacattgcgctgagtctcacccaacccttcctaatacaagaagccgtggcattcgtcaagaatgatggaacaagagacgatgatagtactggatatggcctcattggtgctttcgcattgatctacatcagtctcgcggtcactctgggatggtcttcgcatctgacgtaccggcttatgactatgatgcgtgggagtcttatctcagttatctatcaaaagatgatggaggcgaagatgacaaagtcgaacgaatcacccgctgttactctcatgggaacagacgtgcagcgaatcgcggaaaccttctggtacctcttgatcgaagcaataccggcgctgatccaagtccctatcgctacgtacttactttatcgccaactgggcactgtctttgtagttctacttattctatcaattgccggcacggcactctctggtgtgttggccaataaaacttcacgcaggcaaaaacggtggattgaagctactcagcggcggatcaaccttacctcggatattctcagctcgatgaaaaacacgaagatgctggggttatcgagtcagatgtttgagatgatacaggagctgcgagagaacgaaattgctgtatccaagaaatatcggcgaacccaaagctataatatcacacttgccaatgctcccgaatcacttgccaagcttcttttgttcggcgcctacgcgattattgcgagtatcaatggaacaagtggcctcaacgtgtcgcaagctgtctcttcgcttgcactcatattcttggtctcttaccccctcgctaatattctgattgcaataccattaggttggagcgcgcttggatgcttccagaggattcaggactttctgaacgtatcttctcctgcagatctccgcctggtttcaacgatgagccgagatggctcacaagacgaatacggcattaaatctgatgaaccacgacttaaaaagacccaggagcatgtcgtgcttgagaatacaagcttcggttggtcacaatctgcccagaatcttgtgtctggggccaatgctcgaatcgattctggagccaagctcacgatcctgatcggcccagtaggatgtggaaagtcaccattcttgcaaggaatactaggtgaaacaccttatacatcagggtccatagaattgtcatcttcgcgtatcgcttattgcagtcaaacgccgtggattatgagtgggacagttcgagctaacatagtcggcgagacaaatttcgagagaaactggtaccaagcagtcataagagcatgcgccctagaaatcgacatcaacaagctaccctctggggactccaccattgttggaagtaagggtgtcaagttaagtggtggacagaaacagcggctttcccttgcaagagccctatatgcgcagaaatcaataattgtcctcgacgacatcttcagtggtcttgactcagctaccgaggatttcatcttccagcacgttttcggtgagaatggcattcttgggaagacagggacactggtcattcttgcaacacattcaattaagaggctaccccaagccgacttcgtacatgtgatgaaccaagagggccggattgtcgaacaagggccgttctccgacctaaacatcccggggagctacattcacagtctggaaatcgccactgttgagagtagtgacagcgaagatagtgaggaaagtactgtcaaagatgataaggcccgagctatgggtgctccacaatcacagagcgtagactctagtcgtcaaactggtgattgggctacttacaagtactacatcaagtcacttggcgctttcagcctcctgggcttcgtgcttctcacggtggtcaatgtagccgcgaatggcattcaagttgtgtggttgaattggtgggcgtcgagcaacgaacgcggagaacctccaagaaccggttactggctcggacttttcgcagcgtttggcgttatagagatatttggactggtcgcgtcaatttcgcatctttatgtccgagtgattccatcgtcaggaaacaagcttcacaagtcgattttgaccgctgccttcagagcgcctatgtctttcatatctagaacggagaccggagtcctcgtcaatagatttagtcaggatctccgacttgcagacatggacctacctcgagccttgatcaattgttgttttcaactgggccaatgcgttgtcacgacaatcttggccgtgacagcagttggatacttcgctgctgttctcccggtcattattgcggttctatatctagttcaacgtttctacttacgcacctctcgccagctgcgtcttcttgagctggaaacaactgcacccctcttctcgcatttcctcgagtctctggatggattatcgactattcgcgcattcggatggacagaagaatacgtctcgaagaacgccaaactactaaacgaatcccaaaagccatactacctccttctttgtattcaaaggtggcttgtccttgtcctcgacttgatcgttgccggcctcgcaattctcattgtgggattggcagtgggacttcgcacgaaaattagccctggtcttcttggtatcgcattagctcaacttacgagcttgtcgcttgctctcacccaattgatccagttttggactttgctcgagacatccgtaggcgcaattgcgcgtatccgtgatttctcgcaagacacaccaacagagcttgcggcaggagagatgaatgaagctccctcgaattggccgtctcgtggtgaactgaggttcgagtgtgtgtctgctcgatatgatgatgatacgccgccagtcttgaaagacgtaagtttcgaactagatggcggttcaaagattggtattgtgggaagaactggaagcgggaagagttcattggtacagaccatcttacgaatgattgaaatcacaggagggcgggttgttatcgatggcgtagatttggcgatactctccggatccgttgttcgcgaaaagatcgtcacattgacacaagacccatttctcttcccagcatcaatacgagtcaacattgaccctatgggagttttgacagatgaagatatagctattgcccttcaaaaggtcaatctttggaacgttctaaaggaaaaaacggcaggcgacaatccatctacgaaagatgtgcttgacacatcaattaccacagacatcctctctcacggccaacgccagcttttctgtctcgcccgtgctctactcaaacctggcaagattttaatacttgatgagcctactagcagcgtcgattcgaaaacggatgctcaaatgcaagaaatcattcgtactgaattcgcagatcacacgatcattatgattgcccatcgcctatcaagtctgctagatttcgacagcgttctcgtctttgagcaaggttcgcttgttgagactggtagtcctactgacttactcaacgatacagaaagtcacttcgcgaagatgtatcatggaaccaaaagaaagagccgggccattcaagatacttag

SEQ ID NO: 27037 - protein, 1243 aa, Muscodor strobelii
  misc_feature: SGI Peptide ID NO. 569254
  misc_feature (673)..(942): Pfam Id: PF00664 Pfam Desc: ABC transporter transmembrane region
  misc_feature (52)..(326): Pfam Id: PF00664 Pfam Desc: ABC transporter transmembrane region
  misc_feature (1018)..(1207): Pfam Id: PF00005 Pfam Desc: ABC transporter
  misc_feature (417)..(594): Pfam Id: PF00005 Pfam Desc: ABC transporter
  misc_feature (32)..(1237): NCBI GI: 255954729 Blast Desc: Pc21g10850 [Penicillium chrysogenum Wisconsin 54-1255] gi|211589828|emb|CAP95982.1| Pc21g10850 [Penicillium chrysogenum Wisconsin 54-1255]
  misc_feature (31)..(1238): NCBI GI: 145252926 Blast Desc: An16g06740 [Aspergillus niger] gi|134083532|emb|CAK42924.1| protein product [Aspergillus niger]
  misc_feature (33)..(1231): NCBI GI: 169623207 Blast Desc: SNOG_14836 [Phaeosphaeria nodorum SN15] gi|111056568|gb|EAT77688.1| SNOG_14836 [Phaeosphaeria nodorum SN15]
  misc_feature (33)..(1230): NCBI GI: 259489801 Blast Desc: TPA: ABC multidrug transporter (Eurofung) [Aspergillus nidulans FGSC A4]
  misc_feature (27)..(1234): NCBI GI: 67901784 Blast Desc: AN7879.2 [Aspergillus nidulans FGSC A4] gi|40740343|gb|EAA59533.1| AN7879.2 [Aspergillus nidulans FGSC A4] gi|259480626|tpe|CBF73441.1| TPA: ABC transporter (Eurofung)
  misc_feature (37)..(1231): NCBI GI: 212536286 Blast Desc: multidrug resistance-associated protein, [Penicillium marneffei ATCC 18224] gi|210070698|gb|EEA24788.1| multidrug resistance-associated protein, [Penicillium marneffei ATCC 18224]
  misc_feature (38)..(1232): NCBI GI: 242796555 Blast Desc: multidrug resistance protein, [Talaromyces stipitatus ATCC 10500] gi|218719411|gb|EED18831.1| multidrug resistance protein, [Talaromyces stipitatus ATCC 10500]
  misc_feature (31)..(1236): NCBI GI: 238844704 Blast Desc: ABC transporter [Microsporum canis CBS 113480]
  misc_feature (33)..(1231): NCBI GI: 238845944 Blast Desc: ABC transporter [Microsporum canis CBS 113480]
  misc_feature (4)..(1230): NCBI GI: 145241682 Blast Desc: An09g01700 [Aspergillus niger] gi|134078026|emb|CAK49091.1| protein product [Aspergillus niger]
  misc_feature (49)..(1229): SWISSPROT Homolog: EC 3.6.3.44 Xenobiotic-transporting ATPase
MYSQSQTCQQLTRNLIRVSCMRAFRTHGSAVGNRNRNHALAIATVRAFRWEVVYIALPKLAYIALSLTQPFLIQEAVAFVKNDGTRDDDSTGYGLIGAFALIYISLAVTLGWSSHLTYRLMTMMRGSLISVIYQKMMEAKMTKSNESPAVTLMGTDVQRIAETFWYLLIEAIPALIQVPIATYLLYRQLGTVFVVLLILSIAGTALSGVLANKTSRRQKRWIEATQRRINLTSDILSSMKNTKMLGLSSQMFEMIQELRENEIAVSKKYRRTQSYNITLANAPESLAKLLLFGAYAIIASINGTSGLNVSQAVSSLALIFLVSYPLANILIAIPLGWSALGCFQRIQDFLNVSSPADLRLVSTMSRDGSQDEYGIKSDEPRLKKTQEHVVLENTSFGWSQSAQNLVSGANARIDSGAKLTILIGPVGCGKSPFLQGILGETPYTSGSIELSSSRIAYCSQTPWIMSGTVRANIVGETNFERNWYQAVIRACALEIDINKLPSGDSTIVGSKGVKLSGGQKQRLSLARALYAQKSIIVLDDIFSGLDSATEDFIFQHVFGENGILGKTGTLVILATHSIKRLPQADFVHVMNQEGRIVEQGPFSDLNIPGSYIHSLEIATVESSDSEDSEESTVKDDKARAMGAPQSQSVDSSRQTGDWATYKYYIKSLGAFSLLGFVLLTVVNVAANGIQVVWLNWWASSNERGEPPRTGYWLGLFAAFGVIEIFGLVASISHLYVRVIPSSGNKLHKSILTAAFRAPMSFISRTETGVLVNRFSQDLRLADMDLPRALINCCFQLGQCVVTTILAVTAVGYFAAVLPVIIAVLYLVQRFYLRTSRQLRLLELETTAPLFSHFLESLDGLSTIRAFGWTEEYVSKNAKLLNESQKPYYLLLCIQRWLVLVLDLIVAGLAILIVGLAVGLRTKISPGLLGIALAQLTSLSLALTQLIQFWTLLETSVGAIARIRDFSQDTPTELAAGEMNEAPSNWPSRGELRFECVSARYDDDTPPVLKDVSFELDGGSKIGIVGRTGSGKSSLVQTILRMIEITGGRVVIDGVDLAILSGSVVREKIVTLTQDPFLFPASIRVNIDPMGVLTDEDIAIALQKVNLWNVLKEKTAGDNPSTKDVLDTSITTDILSHGQRQLFCLARALLKPGKILILDEPTSSVDSKTDAQMQEIIRTEFADHTIIMIAHRLSSLLDFDSVLVFEQGSLVETGSPTDLLNDTESHFAKMYHGTKRKSRAIQDT

SEQ ID NO: 27038 - DNA, 7155 bp, Muscodor strobelii; identical to SEQ ID NO: 27029
  misc_feature: SGI EST ID NO. CUFF.63741.0
  misc_feature: Variant of the nucleotide sequence at SEQ ID NO 27036

SEQ ID NO: 27039 - DNA, 621 bp, Muscodor strobelii
  misc_feature: SGI cDNA ID NO. 569255
  misc_feature: Elevated expression when VOC is produced
  misc_feature: Encodes the peptide sequence at SEQ ID NO 27040
atgcttgccgaacaaaacacctttgatcttagcgcggaagagaaacacgagacattactagaaatcaacacgctccttcagcgcactgtatcccttatacagagcgcgcgtcaccaccgctccaagcacgagtacgccgaagctcttgcaattgtcaccgaggcactgaccttggccaaggacccagatgcttgtgacccagagttggcaccactctcaacgtgcaatctctataagggccatatcttgctagcgctcaatcattatagcgacgcatatgacgcctacactgctgcggcaactgcgcgaaccagcgcactgacggagactccggcagcaaaagaggcggcaaagcgtgcgctgaggcttcgaaataaagtggaagaagcgaagaggaagcctagcgtgcatacacgtggttcgtcatggtcgataggaggcagaacgattgaaatgcaatgggatggaaagcttgggaagttcacgttgcctcatttcctagctgatgtggcactgcctgtaaccgtcaggcctggaccagttaggaagaggcctttcttcgtctctcagtcgcatagggtgcaccttgagcggatgatggaagtcgagattgtgaattaa

SEQ ID NO: 27040 - protein, 206 aa, Muscodor strobelii
  misc_feature: SGI Peptide ID NO. 569255
  misc_feature: Useful for introducing or modulating the production of volatile compounds
MLAEQNTFDLSAEEKHETLLEINTLLQRTVSLIQSARHHRSKHEYAEALAIVTEALTLAKDPDACDPELAPLSTCNLYKGHILLALNHYSDAYDAYTAAATARTSALTETPAAKEAAKRALRLRNKVEEAKRKPSVHTRGSSWSIGGRTIEMQWDGKLGKFTLPHFLADVALPVTVRPGPVRKRPFFVSQSHRVHLERMMEVEIVN

SEQ ID NO: 27041 - DNA, 2611 bp, Muscodor strobelii
  misc_feature: SGI EST ID NO. CUFF.63741.4
  misc_feature: Variant of the nucleotide sequence at SEQ ID NO 27039
ttgaatgcgatgacgtgttctgggaactccaaacttttcggcaactgaagacccattgaccctcactagctcataagtgcacttgcattcagaagtcataaaggaacaatcctcgcatcgaaatttaacgcctttgtcaatctttcacaccgttctagagctggtccatgaggtattgttgggagtattctttgttctcgacgccgccgtggcgacgctaatatagacaggttgatagcgcggcacaatcagacaacgaatacgatcctttaaatcattacaaaaaatcctaagaaatctgtatctcaacctctggtcgatactttctctgtgttattgaacattgaagactaatcattaataatcattcgtagcttcatcgcgtatatctccgtttctatctccaaaatgcttgccgaacaaaacacctttgatcttagcgcggaagagaaacacgagacattactagaaatcaacacgctccttcagcgcactgtatcccttatacagagcgcgcgtcaccaccgctccaagcacgagtacgccgaagctcttgcaattgtcaccgaggcactgaccttggccaaggacccagatgcttgtgacccagagttggcaccactctcaacgtgcaatctctataagggccatatcttgctagcgctcaatcattatagcgacgcatatgacgcctacactgctgcggcaactgcgcgaaccagcgcactgacggagactccggcagcaaaagaggcggcaaagcgtgcgctgaggcttcgaaataaagtggaagaagcgaagaggaagcctagcgtgcatacacgtggttcgtcatggtcgataggaggcagaacgattgaaatgcaatgggatggaaagcttgggaagttcacgttgcctcatttcctagctgatgtggcactgcctgtaaccgtcaggcctggaccagttaggaagaggcctttcttcgtctctcagtcgcatagggtgcaccttgagcggatgatggaagtcgagattgtgaattaagctgtcagtgataggttaattcaatagatgtacgattattcaggcgctaaatattgttcaggctctaagtatcttgaatggcccggctctttcttttggttccatgatacatcttcgcgaagtgactttctgtatcgttgagtaagtcagtaggactaccagtctcaacaagcgaaccttgctcaaagacgagaacgctgtcgaaatctagcagacttgataggcgatgggcaatcataatgatcgtgtgatctgcgaattcagtacgaatgatttcttgcatttgagcatccgttttcgaatcgacgctagattcacagtcctagttaaagacacgccccaacaacaatgctatgtattgtgtcacgtacctgctagtaggctcatcaagtattaaaatcttgccaggtttgagtagagcacgggcgagacagaaaagctggcgttggccgtgagagaggatgtctgtggtaattgatgtgtcaagcacatctttcgtagatggattgtcgcctgccgttttttcctttagaacgttccaaagattgaccttttgaagggcaatagctatatcttcatctgtcaaaactcccatagggtcaatgttgactcgtattgatgctgggaagagaaatgggtcttgtgtcaatgtgacgatcttttcgcgaacaacggatccggagagtatcgccaaatctacgccatcgataacaacccgccctcctgtgatttcaatcattcgtaagatggtctgtaccaatgaactcttcccgctagtactttgtcagtttcttctgcatgctggttatattgcattggtgaatgcacaccttccagttcttcccacaataccaatctttgaaccgccatctagttcgaaacttacgtctttcaagactggcggcgtatcatcatcatatcgagcagacacacactcgaacctcagttcaccacgagacggccaattcgagggagcttcattcatctctcctgccgcaagctctgttggtgtgtcttgcgagaaatcacggatacgcgcaattgcgcctacggatgtctcgagcaaagtccaaaactggatcaattgggtgagagcaagcgacaagctcgtaagttgagctaatgcgataccaagaagaccagggctaattttcgtgcgaagtcccactgccaatcccacaatgagaattgcgaggccggcaacgatcaagtcgaggacaaggacaagccacctttgaatacaaagaaggaggtagtatggcttttgggattcgtttagtagtttggcgttcttcgagacgtattcttctgtccatccgaatgcgcgaatagtcgataatccatccagagactcgaggaaatgcgagaagaggggtgcagttgtttccagcctgtctcaagaattagctgggctacagtacacattcgaaatcatgcttcgtcgcactcaagaagacgcagctggcgagaggtgcgtaagtagaaacgttgaactagatatagaaccgcaataatgaccgggagaacagcagcgaagtatccaactgctgtcacggccaagattgtcgtgacaacgcattgg

SEQ ID NO: 27042 - DNA, 1998 bp, Muscodor strobelii
  misc_feature: SGI cDNA ID NO. 569256
  misc_feature: Encodes the peptide sequence at SEQ ID NO 27043
atgcgttccacgttactactagcagctataagctgtctccaatccacaacatacgctattccgcgaccgcgaccacttacaccaagagcagcagcagatccctatgagggctatgtcttcgcctacttcacaggctcttctacctccggagaaaacatattcctcgctgcgagtaacgggaacaatgccttggactggagcgagcttaacggaggtcaagcggtgctcaaatctaccaaagggaccaaagggcttcgcgacccgttcatcatacgttctgtagacggtgagaaattctggatcttagctacggatctctccattggatcaggcacgtcatgggatgctgctgtccgtaaaggaagtaggtatctcgagatatgggagtcaagcgatctggtgacatggtccgcgcagcggcatgttctcgtatcgcctgcgacagctggaaatacatgggcacctgaagcctactacgatgatgcgcttggtaaatatgtagtattctgggcttcgtctttgtacgatgcaagcgatatcaatcatacgggaacggcttacaaccacatgttgtacgctacaacgagcgacttcgttactttctccgaggcgcagatctggcaggacgctcgctcatcacgaatcgactcaaccgtcattgaatggaataatgtgtattatcgcttcagcaaagatgagggcgttggtgctacacccacgggctgtagtgacgttattgaggagagcagcgccaatctcacatctcaattgtcgtcatggaaagtggtcagctcatgcattgggaagaatgccggtacgggacagattgagggcccctcaatttttcgctcgaatcctggagatgtaaatggcgagaaattctatcttttcgttgatcgatacacaagcggtggttatgtgcccctggaaacgacagacatagccaaacccagttggaagctatcgagctcgtacaagttgccgactagcccacgtcatgggactgtgatgccgatcaccgcggcagagctgtctcgcgttaaatcttcctacaaagctagcatatctactcgaggattgataaagcgagacagtcctgtgctaaaggggtataatgctgatccaaacatcgcggtctttggaaatacattttacatctatcctacgaccgacgggttccctgattggggcgggaagaccttttactcatggaaatcgaccgatctcgcgacttggacacggtccgcgaagcccttcttaactctgaatgggaccagtggtaatgtgccatgggcgacaggatctgcctgggctcctacaataatcgaacggaatggaaactattatttctacttcagcggccaaaacccaacatacaacagaaagacaatcggcgtcgcggttgctaaatctcctgaaggaccttttactgcgcagtctaaggcaatgattcttaataacgaggctctgacttcaggccaggcaattgattctgctgcgtttctagacccgaagacggggaaatattatctttactggggcaatgggtctccgctgctcgccgaattaagcgacgacatgttgtcaatcaagacttcgactttggctgctcccactggtctgactaatttccgcgaaggctcattcatgatctatcgaaacgggttatatcactttacgtattcaatcgatgacacaaggtcggtcgattaccgagtgggctatgcgactgggtcgtcggctacagggccattcacctataggggtgtaatcttgcagaagaatgaatcgttgggcattccggggacaggtcacaattcaattgtgaacgtacctggaactgacgattggtatatcgcatatcaccgctttgcgattcccaacggtaatgggacaatgcgcgagacgacgcttgatcggctctacttcgataagaatacgggatacattgtgcctgttgttccaaccctggaaagcgtgccgcctttgacaaactga

SEQ ID NO: 27043 - protein, 665 aa, Muscodor strobelii
  misc_feature: SGI Peptide ID NO. 569256
  misc_feature (363)..(648): Pfam Id: PF04616 Pfam Desc: Glycosyl hydrolases family 43
  misc_feature (33)..(664): NCBI GI: 169597407 Blast Desc: SNOG_01489 [Phaeosphaeria nodorum SN15] gi|111070018|gb|EAT91138.1| SNOG_01489 [Phaeosphaeria nodorum SN15]
  misc_feature (33)..(661): NCBI GI: 189209814 Blast Desc: beta-xylosidase (Exo-beta-(1,4)-xylanase) [Pyrenophora tritici-repentis Pt-1C-BFP] gi|187977332|gb|EDU43958.1| beta-xylosidase (Exo-beta-(1,4)-xylanase) [Pyrenophora Pt-1C-BFP]
  misc_feature (33)..(662): NCBI GI: 261353146 Blast Desc: endo-1,4-beta-xylanase [Verticillium albo-atrum VaMs.102]
  misc_feature (28)..(663): NCBI GI: 29832923 Blast Desc: endo-1,4-beta-xylanase [Streptomyces avermitilis MA-4680] gi|29610044|dbj|BAC74092.1| endo-1,4-beta-xylanase, secreted [Streptomyces avermitilis MA-4680]
  misc_feature (30)..(353): NCBI GI: 46116126 Blast Desc: FG03905.1 [Gibberella zeae PH-1] gi|50844268|gb|AAT84256.1| xylanase 18 [Gibberella zeae]
  misc_feature (1)..(347): NCBI GI: 39956551 Blast Desc: MGG_09098 [Magnaporthe grisea 70-15] gi|145016494|gb|EDK00924.1| MGG_09098 [Magnaporthe grisea 70-15]
  misc_feature (34)..(353): NCBI GI: 256722475 Blast Desc: NECHADRAFT_35028 [Nectria haematococca mpVI 77-13-4]
  misc_feature (329)..(662): NCBI GI: 39956551 Blast Desc: MGG_09098 [Magnaporthe grisea 70-15] gi|145016494|gb|EDK00924.1| MGG_09098 [Magnaporthe grisea 70-15]
  misc_feature (28)..(350): NCBI GI: 238059501 Blast Desc: beta-xylosidase [Micromonospora sp. ATCC 39149] gi|237881312|gb|EEP70140.1| beta-xylosidase [Micromonospora sp. ATCC 39149]
  misc_feature (353)..(662): NCBI GI: 46114322 Blast Desc: FG03003.1 [Gibberella zeae PH-1]
MRSTLLLAAISCLQSTTYAIPRPRPLTPRAAADPYEGYVFAYFTGSSTSGENIFLAASNGNNALDWSELNGGQAVLKSTKGTKGLRDPFIIRSVDGEKFWILATDLSIGSGTSWDAAVRKGSRYLEIWESSDLVTWSAQRHVLVSPATAGNTWAPEAYYDDALGKYVVFWASSLYDASDINHTGTAYNHMLYATTSDFVTFSEAQIWQDARSSRIDSTVIEWNNVYYRFSKDEGVGATPTGCSDVIEESSANLTSQLSSWKVVSSCIGKNAGTGQIEGPSIFRSNPGDVNGEKFYLFVDRYTSGGYVPLETTDIAKPSWKLSSSYKLPTSPRHGTVMPITAAELSRVKSSYKASISTRGLIKRDSPVLKGYNADPNIAVFGNTFYIYPTTDGFPDWGGKTFYSWKSTDLATWTRSAKPFLTLNGTSGNVPWATGSAWAPTIIERNGNYYFYFSGQNPTYNRKTIGVAVAKSPEGPFTAQSKAMILNNEALTSGQAIDSAAFLDPKTGKYYLYWGNGSPLLAELSDDMLSIKTSTLAAPTGLTNFREGSFMIYRNGLYHFTYSIDDTRSVDYRVGYATGSSATGPFTYRGVILQKNESLGIPGTGHNSIVNVPGTDDWYIAYHRFAIPNGNGTMRETTLDRLYFDKNTGYIVPVVPTLESVPPLTN

SEQ ID NO: 27044 - DNA, 1098 bp, Muscodor strobelii
  misc_feature: SGI cDNA ID NO. 569257
  misc_feature: Reduced expression when VOC is produced
  misc_feature: Encodes the peptide sequence at SEQ ID NO 27045
atgggtttctttaatcgccgacagcgtgaaggtcccgaccaacacgcaaccaagagccgtcatgtcagcagcagaaattacacaatgaccacccgcccttcgtttggccaatggctcaaagtgacctggattgacattgcgactatggtcgttatgggtgtcatcggtctcggcatttacgaagcacccccagcgccgaaccgatcattcgctgttactttcacttccgatggcgaggtcgtctacccggaatttgcctatcccctacggaaagagatcattccaatctggctcgcggcttttctggcagctgttgtcccgattctggctatccttattatgcaaatccgcgtgcgctcattttgggatgtgaataatggcattattggccttctatattccttgatcaccgctgctgttttccaagtgttcctgaaattcctcatcggtggtttgcgccctcatttcctcgcagtctgcaagcccgacatcacccgtgctaccgccaatagcggaggatacaacgcggctggcttcaaagaaatctattatacgcgtgagatctgcacaggcgacaaagatctcatcgatgactctctcgagtctttcccatccggacatactactgccgcctttgctggattcgtttacttgtatctgtatctgaatgccaagctcaaggtgttctccaactaccaccccgcgatgtggaagctcatcatcacttacatccctattctcggagctgtactgatcggaggtgccttgactattgatgagttccacaattggtacgatgtattcgccggtgccatcatcggcactatttttgctttctcgtcttataggatggtctatgccgcaatctgggactggcgctggaaccacattcccctcaaccgctaccaggcttgcctctacacatatgatggtgttgagctaatggatgccatgtggacgcgcaaggctgggtggggtattggctcgccgtatggcaataagcgcaaccatcatgacaatggtgtccacggttctaacggtactggtaatggcctctcgcgaaaggctgtccccaaccgtggcgatgagatggtttaa

SEQ ID NO: 27045 - protein, 365 aa, Muscodor strobelii
  misc_feature: SGI Peptide ID NO. 569257
  misc_feature (127)..(290): Pfam Id: PF01569 Pfam Desc: PAP2 superfamily
  misc_feature (1)..(365): NCBI GI: 256723639 Blast Desc: NECHADRAFT_72741 [Nectria haematococca mpVI 77-13-4]
  misc_feature (1)..(334): NCBI GI: 85098622 Blast Desc: NCU09692 [Neurospora crassa OR74A] gi|28922150|gb|EAA31403.1| conserved [Neurospora crassa OR74A] gi|28949960|emb|CAD70721.1| related to diacylglycerol phosphatase
  misc_feature (3)..(346): NCBI GI: 171694475 Blast Desc: protein product [Podospora anserina] gi|170947186|emb|CAP73991.1| protein product [Podospora anserina]
  misc_feature (1)..(326): NCBI GI: 154296323 Blast Desc: BC1G_12988 [Botryotinia fuckeliana B05.10] gi|150843446|gb|EDN18639.1| BC1G_12988 [Botryotinia fuckeliana B05.10]
  misc_feature (1)..(365): NCBI GI: 46114556 Blast Desc: FG03120.1 [Gibberella zeae PH-1]
  misc_feature (1)..(326): NCBI GI: 156055770 Blast Desc: SS1G_05237 [Sclerotinia sclerotiorum 1980] gi|154703021|gb|EDO02760.1| SS1G_05237 [Sclerotinia sclerotiorum 1980]
  misc_feature (1)..(323): NCBI GI: 39976171 Blast Desc: MGG_05988 [Magnaporthe grisea 70-15] gi|145011739|gb|EDJ96395.1| MGG_05988 [Magnaporthe grisea 70-15]
  misc_feature (1)..(326): NCBI GI: 169598670 Blast Desc: SNOG_02140 [Phaeosphaeria nodorum SN15] gi|111069232|gb|EAT90352.1| SNOG_02140 [Phaeosphaeria nodorum SN15]
  misc_feature (1)..(345): NCBI GI: 189204554 Blast Desc: phosphatidic acid phosphatase beta [Pyrenophora tritici-repentis Pt-1C-BFP] gi|187985711|gb|EDU51199.1| phosphatidic acid phosphatase beta [Pyrenophora tritici-repentis
  misc_feature (3)..(353): NCBI GI: 39965933 Blast Desc: MGG_09994 [Magnaporthe grisea 70-15] gi|145015380|gb|EDJ99916.1| MGG_09994 [Magnaporthe grisea 70-15]
  misc_feature (99)..(298): SWISSPROT Homolog: EC 3.1.3.4 Phosphatidate phosphatase
  misc_feature: Useful for introducing or modulating the production of volatile compounds
MGFFNRRQREGPDQHATKSRHVSSRNYTMTTRPSFGQWLKVTWIDIATMVVMGVIGLGIYEAPPAPNRSFAVTFTSDGEVVYPEFAYPLRKEIIPIWLAAFLAAVVPILAILIMQIRVRSFWDVNNGIIGLLYSLITAAVFQVFLKFLIGGLRPHFLAVCKPDITRATANSGGYNAAGFKEIYYTREICTGDKDLIDDSLESFPSGHTTAAFAGFVYLYLYLNAKLKVFSNYHPAMWKLIITYIPILGAVLIGGALTIDEFHNWYDVFAGAIIGTIFAFSSYRMVYAAIWDWRWNHIPLNRYQACLYTYDGVELMDAMWTRKAGWGIGSPYGNKRNHHDNGVHGSNGTGNGLSRKAVPNRGDEMV

SEQ ID NO: 27046 - DNA, 1635 bp, Muscodor strobelii
  misc_feature: SGI EST ID NO. CUFF.63990.1
  misc_feature: Variant of the nucleotide sequence at SEQ ID NO 27044
tgaagagctgtgtatcctaataaatatgcattgagggccttgaagtagttttcagcttttattctaccatagctccatccatttttttaatagtgtctgcatacttgcactgctatcttcctgccaaccgcagccggcctgtaccctggcctagaaactgtccatattgccaacctcgagtatctcgaaccgcaaacatgggtttctttaatcgccgacagcgtgaaggtcccgaccaacacgcaaccaagagccgtcatgtcagcagcagaaattacacaatgaccacccgcccttcgtttggccaatggctcaaagtgacctggattgacattgcgactatggtcgttatgggtgtcatcggtctcggcatttacgaagcacccccagcgccgaaccgatcattcgctgttactttcacttccgatggcgaggtcgtctacccggaatttgcctatcccctacggaaagagatcattccaatctggctcgcggcttttctggcagctgttgtcccgattctggctatccttattatgcaaatccgcgtgcgctcattttgggatgtgaataatggcattattggccttctatattccttgatcaccgctgctgttttccaagtgttcctgaaattcctcatcggtggtttgcgccctcatttcctcgcagtctgcaagcccgacatcacccgtgctaccgccaatagcggaggatacaacgcggctggcttcaaagaaatctattatacgcgtgagatctgcacaggcgacaaagatctcatcgatgactctctcgagtctttcccatccggacatactactgccgcctttgctggattcgtttacttgtatctgtatctgaatgccaagctcaaggtgttctccaactaccaccccgcgatgtggaagctcatcatcacttacatccctattctcggagctgtactgatcggaggtgccttgactattgatgagttccacaattggtacgatgtattcgccggtgccatcatcggcactatttttgctttctcgtcttataggatggtctatgccgcaatctgggactggcgctggaaccacattcccctcaaccgctaccaggcttgcctctacacatatgatggtgttgagctaatggatgccatgtggacgcgcaaggctgggtggggtattggctcgccgtatggcaataagcgcaaccatcatgacaatggtgtccacggttctaacggtactggtaatggcctctcgcgaaaggctgtccccaaccgtggcgatgagatggtttaattacccgttgagcgatctaatgagctatgaagtatgactaagccgagtgcacctcttggagcatacggatgttagttgttgttttatcttttccttttattgcgatgataccccattgcgcatgttgtagtggctgagcgatatgacgccggcgcaatggaaggcatgtacgagaggcgttcaggaatacaccgcgatcacctttaaacttaatatgaaaataatatacctctttcaaccctcgctatcgaattgtgttggcgtatgtggttgagactaacaatgaatcaattgtgagtttgtgatggctaatctgtagtcaatatccttggtatctttg

SEQ ID NO: 27047 - DNA, 1572 bp, Muscodor strobelii
  misc_feature: SGI cDNA ID NO. 569258
  misc_feature: Encodes the peptide sequence at SEQ ID NO 27048
atggttcttcaagatctcggtcggcgcatcagcggcgcactccacgatgccacccgcgcgcccaatctcgacgagaaggctttcaaagccatgctcaacgagatatcgggcgccctcctcgaagccgacgtcaacgtcaagcttgtctcgcgcctcaagaactcgatcagcacgaccgtcaatttcaaagacctaccccccgccgtcaacaagaagcgcctaatacagaagaccgtcttcgacgaactcgtcaagctcgtcgacccccacgccgagcccttcaagcccaagaagggcaagtccaacgtcatcatgttcgtcggtctgcagggcgccggaaagacgacgacctgcaccaagctcgcacgacactaccaggccaggggcttccgcgcctgtctcgtctgtgccgacacgttccgggctggtgccttcgaccagctgaaacaaaacgctacgaaagccaagatcccctactacggttcgttaacggagacagatcccgcaaaagtagcgaaggagggcgtggacaagttcaagaaggagagattcgaggtcatcatcgtcgacacgtccggcagacacagacaggaatccgccctcttccaagaaatgatggacatccaagacgctgtgaagcccgacgaaaccatcatggtcctcgacgcctccatcggccaacaagcagagtcccaagccaaagccttcaaagacgccgccgatttcggcgccatcatcatcaccaagaccgacggccacgcgagcggaggtggcgccatctctgcagtcgccgccacacatacgcccatcgtcttcatcggcacaggcgagcatatgttagacctcgagcggttcgcaccgcagcagttcgtaaacaagttattaggcatgggcgacatggccgggctagtagagcacgtgcagagcctgaagctagaccagaaggagacgataaaacacatcacagagggcatattcacgatacgggatctacgcgatcaactgagcaacatcatgaagatggggcccctctccaaaatggccggaatgataccgggcatgtcgaacatgcccggcatggcgggcatggacgacgacgagagcagcgctaggttaaaacgcatgatttacatatgcgacagtatgacggagaaggagctcgatagcgacgggaagatgttcatcgagcagcctacccgcatgacgcgtgttgcgtgcgggagtggggtgagtgtgcgggaggtcgaggatttgttgagtcagcagcggatgatggctggtatggctaagaagatgggcggtagcatgaagaatatgcagaaggcgcagcaggctatggggggcaacaacaaagctgcgcagatggctgctatgcagaaacggctgcagagtatgggagggggtggggcaggtggtatgccggatatggcttcgcttgctaagttgtttggtggtggagggggaggtgggatgcctggcatgcctggtggtatggatatgcagaagatgatggagagtatggggatgggtgggatgatgggtggtggtggtgggcgtggtggtaggaggtag

SEQ ID NO: 27048 - protein, 523 aa, Muscodor strobelii
  misc_feature: SGI Peptide ID NO. 569258
  misc_feature (2)..(88): Pfam Id: PF02881 Pfam Desc: SRP54-type protein, helical bundle domain
  misc_feature (100)..(296): Pfam Id: PF00448 Pfam Desc: SRP54-type protein, GTPase domain
  misc_feature (325)..(429): Pfam Id: PF02978 Pfam Desc: Signal peptide binding domain
  misc_feature (1)..(479): NCBI GI: 39976193 Blast Desc: conserved [Magnaporthe grisea 70-15] gi|145011749|gb|EDJ96405.1| conserved [Magnaporthe grisea 70-15]
  misc_feature (1)..(483): NCBI GI: 171676350 Blast Desc: protein product [Podospora anserina] gi|170936241|emb|CAP60900.1| protein product [Podospora anserina]
  misc_feature (1)..(464): NCBI GI: 85098637 Blast Desc: signal recognition particle 54 kDa protein [Neurospora crassa OR74A] gi|28922154|gb|EAA31407.1| signal recognition particle 54 kDa protein [Neurospora crassa OR74A] signal particle
  misc_feature (1)..(504): NCBI GI: 46130818 Blast Desc: FG08964.1 [Gibberella zeae PH-1]
  misc_feature (1)..(464): NCBI GI: 116200506 Blast Desc: conserved [Chaetomium globosum CBS 148.51] gi|88175512|gb|EAQ82980.1| conserved [Chaetomium globosum CBS 148.51]
  misc_feature (1)..(464): NCBI GI: 261359041 Blast Desc: signal recognition particle 54 kDa protein [Verticillium albo-atrum VaMs.102]
  misc_feature (1)..(479): NCBI GI: 256727833 Blast Desc: [Nectria haematococca mpVI 77-13-4]
  misc_feature (1)..(483): NCBI GI: 156059506 Blast Desc: SS1G_03765 [Sclerotinia sclerotiorum 1980] gi|154701552|gb|EDO01291.1| SS1G_03765 [Sclerotinia sclerotiorum 1980]
  misc_feature (1)..(494): NCBI GI: 169624365 Blast Desc: SNOG_15441 [Phaeosphaeria nodorum SN15] gi|160705155|gb|EAT77106.2| SNOG_15441 [Phaeosphaeria nodorum SN15]
  misc_feature (1)..(461): NCBI GI: 70984902 Blast Desc: signal recognition particle protein SRP54 [Aspergillus fumigatus Af293] gi|66845585|gb|EAL85919.1| signal recognition particle protein SRP54 [Aspergillus fumigatus Af293] signal SRP54
MVLQDLGRRISGALHDATRAPNLDEKAFKAMLNEISGALLEADVNVKLVSRLKNSISTTVNFKDLPPAVNKKRLIQKTVFDELVKLVDPHAEPFKPKKGKSNVIMFVGLQGAGKTTTCTKLARHYQARGFRACLVCADTFRAGAFDQLKQNATKAKIPYYGSLTETDPAKVAKEGVDKFKKERFEVIIVDTSGRHRQESALFQEMMDIQDAVKPDETIMVLDASIGQQAESQAKAFKDAADFGAIIITKTDGHASGGGAISAVAATHTPIVFIGTGEHMLDLERFAPQQFVNKLLGMGDMAGLVEHVQSLKLDQKETIKHITEGIFTIRDLRDQLSNIMKMGPLSKMAGMIPGMSNMPGMAGMDDDESSARLKRMIYICDSMTEKELDSDGKMFIEQPTRMTRVACGSGVSVREVEDLLSQQRMMAGMAKKMGGSMKNMQKAQQAMGGNNKAAQMAAMQKRLQSMGGGGAGGMPDMASLAKLFGGGGGGGMPGMPGGMDMQKMMESMGMGGMMGGGGGRGGRR

SEQ ID NO: 27049 - DNA, 1892 bp, Muscodor strobelii
  misc_feature: SGI EST ID NO. CUFF.63827.1
  misc_feature: Variant of the nucleotide sequence at SEQ ID NO 27047
gtggcttcgatattcgaccatctttctagcatcactcgtctcatcacctatccccgacaacctatcgacgtcgcgcgagtgagagccgctctccgtcgccatggttcttcaagatctcggtcggcgcatcagcggcgcactccacgatgccacccgcgcgcccaatctcgacgagaaggctttcaaagccatgctcaacgagatatcgggcgccctcctcgaagccgacgtcaacgtcaagcttgtctcgcgcctcaagaactcgatcagcacgaccgtcaatttcaaagacctaccccccgccgtcaacaagaagcgcctaatacagaagaccgtcttcgacgaactcgtcaagctcgtcgacccccacgccgagcccttcaagcccaagaagggcaagtccaacgtcatcatgttcgtcggtctgcagggcgccggaaagacgacgacctgcaccaagctcgcacgacactaccaggccaggggcttccgcgcctgtctcgtctgtgccgacacgttccgggctggtgccttcgaccagctgaaacaaaacgctacgaaagccaagatcccctactacggttcgttaacggagacagatcccgcaaaagtagcgaaggagggcgtggacaagttcaagaaggagagattcgaggtcatcatcgtcgacacgtccggcagacacagacaggaatccgccctcttccaagaaatgatggacatccaagacgctgtgaagcccgacgaaaccatcatggtcctcgacgcctccatcggccaacaagcagagtcccaagccaaagccttcaaagacgccgccgatttcggcgccatcatcatcaccaagaccgacggccacgcgagcggaggtggcgccatctctgcagtcgccgccacacatacgcccatcgtcttcatcggcacaggcgagcatatgttagacctcgagcggttcgcaccgcagcagttcgtaaacaagttattaggcatgggcgacatggccgggctagtagagcacgtgcagagcctgaagctagaccagaaggagacgataaaacacatcacagagggcatattcacgatacgggatctacgcgatcaactgagcaacatcatgaagatggggcccctctccaaaatggccggaatgataccgggcatgtcgaacatgcccggcatggcgggcatggacgacgacgagagcagcgctaggttaaaacgcatgatttacatatgcgacagtatgacggagaaggagctcgatagcgacgggaagatgttcatcgagcagcctacccgcatgacgcgtgttgcgtgcgggagtggggtgagtgtgcgggaggtcgaggatttgttgagtcagcagcggatgatggctggtatggctaagaagatgggcggtagcatgaagaatatgcagaaggcgcagcaggctatggggggcaacaacaaagctgcgcagatggctgctatgcagaaacggctgcagagtatgggagggggtggggcaggtggtatgccggatatggcttcgcttgctaagttgtttggtggtggagggggaggtgggatgcctggcatgcctggtggtatggatatgcagaagatgatggagagtatggggatgggtgggatgatgggtggtggtggtgggcgtggtggtaggaggtagcgtagatcaagggctgagtcaaagggaagggtgataagtattttgaatgaaccatggactttgatgaggtatggcatgcattggcgttcggtgggcttgcgaggcaaatatctacgtatatttacattgtggtagagcttaaaattaaaggtattcacgatcactgaggattagtttaagatgtaaagcctggatttagactaagggtagtatgaaaaac

SEQ ID NO: 27050 - DNA, 738 bp, Muscodor strobelii
  misc_feature: SGI cDNA ID NO. 569259
  misc_feature: Encodes the peptide sequence at SEQ ID NO 27051
atgttagacctcgagcggttcgcaccgcagcagttcgtaaacaagttattaggcatgggcgacatggccgggctagtagagcacgtgcagagcctgaagctagaccagaaggagacgataaaacacatcacagagggcatattcacgatacgggatctacgcgatcaactgagcaacatcatgaagatggggcccctctccaaaatggccggaatgataccgggcatgtcgaacatgcccggcatggcgggcatggacgacgacgagagcagcgctaggttaaaacgcatgatttacatatgcgacagtatgacggagaaggagctcgatagcgacgggaagatgttcatcgagcagcctacccgcatgacgcgtgttgcgtgcgggagtggggtgagtgtgcgggaggtcgaggatttgttgagtcagcagcggatgatggctggtatggctaagaagatgggcggtagcatgaagaatatgcagaaggcgcagcaggctatggggggcaacaacaaagctgcgcagatggctgctatgcagaaacggctgcagagtatgggagggggtggggcaggtggtatgccggatatggcttcgcttgctaagttgtttggtggtggagggggaggtgggatgcctggcatgcctggtggtatggatatgcagaagatgatggagagtatggggatgggtgggatgatgggtggtggtggtgggcgtggtggtaggaggtag

SEQ ID NO: 27051 - protein, 245 aa, Muscodor strobelii
  misc_feature: SGI Peptide ID NO. 569259
  misc_feature (47)..(151): Pfam Id: PF02978 Pfam Desc: Signal peptide binding domain
  misc_feature (1)..(201): NCBI GI: 39976193 Blast Desc: conserved [Magnaporthe grisea 70-15] gi|145011749|gb|EDJ96405.1| conserved [Magnaporthe grisea 70-15]
  misc_feature (1)..(226): NCBI GI: 46130818 Blast Desc: FG08964.1 [Gibberella zeae PH-1]
  misc_feature (1)..(205): NCBI GI: 171676350 Blast Desc: protein product [Podospora anserina] gi|170936241|emb|CAP60900.1| protein product [Podospora anserina]
  misc_feature (1)..(201): NCBI GI: 256727833 Blast Desc: [Nectria haematococca mpVI 77-13-4]
  misc_feature (1)..(186): NCBI GI: 261359041 Blast Desc: signal recognition particle 54 kDa protein [Verticillium albo-atrum VaMs.102]
  misc_feature (1)..(186): NCBI GI: 85098637 Blast Desc: signal recognition particle 54 kDa protein [Neurospora crassa OR74A] gi|28922154|gb|EAA31407.1| signal recognition particle 54 kDa protein [Neurospora crassa OR74A] signal particle
  misc_feature (1)..(200): NCBI GI: 154316352 Blast Desc: BC1G_04107 [Botryotinia fuckeliana B05.10] gi|150845907|gb|EDN21100.1| BC1G_04107 [Botryotinia fuckeliana B05.10]
  misc_feature (1)..(186): NCBI GI: 116200506 Blast Desc: conserved [Chaetomium globosum CBS 148.51] gi|88175512|gb|EAQ82980.1| conserved [Chaetomium globosum CBS 148.51]
  misc_feature (1)..(205): NCBI GI: 156059506 Blast Desc: SS1G_03765 [Sclerotinia sclerotiorum 1980] gi|154701552|gb|EDO01291.1| SS1G_03765 [Sclerotinia sclerotiorum 1980]
  misc_feature (1)..(216): NCBI GI: 169624365 Blast Desc: SNOG_15441 [Phaeosphaeria nodorum SN15] gi|160705155|gb|EAT77106.2| SNOG_15441 [Phaeosphaeria nodorum SN15]
MLDLERFAPQQFVNKLLGMGDMAGLVEHVQSLKLDQKETIKHITEGIFTIRDLRDQLSNIMKMGPLSKMAGMIPGMSNMPGMAGMDDDESSARLKRMIYICDSMTEKELDSDGKMFIEQPTRMTRVACGSGVSVREVEDLLSQQRMMAGMAKKMGGSMKNMQKAQQAMGGNNKAAQMAAMQKRLQSMGGGGAGGMPDMASLAKLFGGGGGGGMPGMPGGMDMQKMMESMGMGGMMGGGGGRGGRR

SEQ ID NO: 27052 - DNA, 2013 bp, Muscodor strobelii
  misc_feature: SGI EST ID NO. CUFF.63827.0
  misc_feature: Variant of the nucleotide sequence at SEQ ID NO 27050
gtggcttcgatattcgaccatctttctagcatcactcgtctcatcacctatccccgacaacctatcgacgtcgcgcgagtgagagccgctctccgtcgccatggttcttcaagatctcggtcggcgcatcagcggcgcactccacgatgccacccgcgcgcccaatctcgacgagaaggtacgataccacctaaatcgacactctcccaccccgcagccaagcctaatatcctaatatcgccgccaaagtcatgtacgatggtacacaatgatatatctaactgacacgccacatttaggctttcaaagccatgctcaacgagatatcgggcgccctcctcgaagccgacgtcaacgtcaagcttgtctcgcgcctcaagaactcgatcagcacgaccgtcaatttcaaagacctaccccccgccgtcaacaagaagcgcctaatacagaagaccgtcttcgacgaactcgtcaagctcgtcgacccccacgccgagcccttcaagcccaagaagggcaagtccaacgtcatcatgttcgtcggtctgcagggcgccggaaagacgacgacctgcaccaagctcgcacgacactaccaggccaggggcttccgcgcctgtctcgtctgtgccgacacgttccgggctggtgccttcgaccagctgaaacaaaacgctacgaaagccaagatcccctactacggttcgttaacggagacagatcccgcaaaagtagcgaaggagggcgtggacaagttcaagaaggagagattcgaggtcatcatcgtcgacacgtccggcagacacagacaggaatccgccctcttccaagaaatgatggacatccaagacgctgtgaagcccgacgaaaccatcatggtcctcgacgcctccatcggccaacaagcagagtcccaagccaaagccttcaaagacgccgccgatttcggcgccatcatcatcaccaagaccgacggccacgcgagcggaggtggcgccatctctgcagtcgccgccacacatacgcccatcgtcttcatcggcacaggcgagcatatgttagacctcgagcggttcgcaccgcagcagttcgtaaacaagttattaggcatgggcgacatggccgggctagtagagcacgtgcagagcctgaagctagaccagaaggagacgataaaacacatcacagagggcatattcacgatacgggatctacgcgatcaactgagcaacatcatgaagatggggcccctctccaaaatggccggaatgataccgggcatgtcgaacatgcccggcatggcgggcatggacgacgacgagagcagcgctaggttaaaacgcatgatttacatatgcgacagtatgacggagaaggagctcgatagcgacgggaagatgttcatcgagcagcctacccgcatgacgcgtgttgcgtgcgggagtggggtgagtgtgcgggaggtcgaggatttgttgagtcagcagcggatgatggctggtatggctaagaagatgggcggtagcatgaagaatatgcagaaggcgcagcaggctatggggggcaacaacaaagctgcgcagatggctgctatgcagaaacggctgcagagtatgggagggggtggggcaggtggtatgccggatatggcttcgcttgctaagttgtttggtggtggagggggaggtgggatgcctggcatgcctggtggtatggatatgcagaagatgatggagagtatggggatgggtgggatgatgggtggtggtggtgggcgtggtggtaggaggtagcgtagatcaagggctgagtcaaagggaagggtgataagtattttgaatgaaccatggactttgatgaggtatggcatgcattggcgttcggtgggcttgcgaggcaaatatctacgtatatttacattgtggtagagcttaaaattaaaggtattcacgatcactgaggattagtttaagatgtaaagcctggatttagactaagggtagtatgaaaaac

SEQ ID NO: 27053 - DNA, 3519 bp, Muscodor strobelii
  misc_feature: SGI cDNA ID NO. 569260
  misc_feature: Encodes the peptide sequence at SEQ ID NO 27054
atggagtctcccaactgggaacagcataaggaaaggatcatatatctctacacggtagagagacaaaccattgtcgagatagcatctgttatgaagatcgagcatgcctttgacaaaaccaagcagcagtatgcgtaccaactgaagaaatggaatatcagaaagaatgcgagcgggaagctttggaaacatgtgggcctccgagtccgagaaagagagggtaagaggtccaaagtgctactctatggtaagactatcccagaggagacgtggcgtcgcgaggttcaacgatacgcgagcattcccaccgctagccagtttggaagacgttctcctagcccgatgacgtatgattggcacgttgtccaggttcgaagtccaagcattgtagagttggattgcggatggcctcagaatctgccctggtttcagttccggagctgggtcatgccaagcctagagaaggctatgaataatacaactggcttaaacggtctaacgtcacgccagagacttcgcagcctctacacttcgattccagaagattctgtacgcgaaagaggacaactggagcagacaagtacttcctatggtatggtgacggaattgcttcaagtcattttctaccgtctcgcaaatcatctcaatgaagttgagattgatagcgacgagggggttgcctacgatgacttcgtgcttggcctattcgagaatatgctgcaaagcagctcgcccatgatatccaacctcttatcacaaacaaattcagcggatagagctttcaaagaggccgtctatgggccgcaagtaaagttcatgcgtggtcttgatgaagctgctatcgaccgtgatattgagcttgcgagactcttgttgaaaagaggggcagatacgacatcgttcgaagccgaacacgataataagctaccctcccttctcacattattgacaatcggaggcaataaaataagtgagattgatgacgatgatattactgattttgcgcgaatgttgatcactcatggcgctgagatcaatgagttagggacacgattcgcgcctacgcattccaataagatttgtttgggaatgcctctttcggccgctattgctctcgggaataacgaattggctgacctactaatagaacatatggcaatgcctactgatgtttatgacatcagttgtgcagattgtctggattgggggtggacgagctattatctcgagacggacacccctgcttgggcgctcgtcgacatagcaatgatatttcacaataaagtcatggttgagcgtctcctttctccctatatattggagcctcaatcagcctctatggagtatatgcaacgagcgctcatcacgtcatgcctggttggagacacgagtttgacatctagactgctcagcctggacatcaactggaacggggattgggctcgtggggttacacccctggtggcatcggcgtggaatcaaaatgcaaattttggtgagattattgagaagtgcggtaacctgctcggaccactgcaaggagagaaccaattggtagtgcgagacattgcgcctatacacgcagcggcatacaatggaaatggcgagctggtgcggcgactatttgacctcggaatcgattgcaacgtatgtctggagccaaggatggataagtatgattggattatggaattacatccgcgggacacgtattacacatggccggcgttgcaattgaccccgtgcagtcctctccagatggcgctcgtgaatggtgattccgacaccatcgctttgctattgagagaatcatttgtccacggagacgaaatcactatcgcagtttataacggaaattatagcattgtgccggacttgatcagtcgtggcgcagatatcctctccgttcatggcgatggcaagaccgttcttgaactggttgcgggcgatgcaagcgcgggaagcatcatttccgattacttctcatctggagggagataccgatctttcgctctgtgccgttatgtatcagctttagagaggcacagtgataatatcgatccacgtcagctatccaaaatattggagcaccggcctactggctcaattgacagccacgaagcatcagctattgctaatgccatcgcgcagcagaactggagcctcacatatcatctcctccaggtcttaccccctggcgaatgtcaaacatttattggcgaatgtgaaagacatattgatggagtttgggttttccagcctaactatgactttacttgtgaatcatatcgagattttccggactttcgtggcaaaggaatgtcgttgctcatggcggcctgttacgccaacaacgcgaaattgatagatttcgtatacaagcgtggttatcgttttcacgccgaagactataaatacattcacaaggacagtgacatgtatgtcaacgtacatccctatctttgtgatgaagattggtccgaaactacgtggcactcctggaacggagcgttgctcgccagggctctctggaccggcgaggttgatcaactacaaagtctactaaagcgcagacattccttaaaacttcgtaatcccgatggatattttcttctagaatcggccatcaagaagggggatagacaaattgtcaacattattctcaaagccgacccttgtgtcgcactagaccatcacatgttgagtgaaccttctacatggctcgcggtgcaggatttggccctacgcaggcaactcatggatggagggcttgacctcaaggaaatgagcgtcgaatatggcttggggctcctgaacaaggcggcaagggttggcaaccttgaaacagtccgatatcttctcgattgcggtgtcaatattaatgttgcgccgccagtagcatggaatttcactgtcctcgaatatgctgcagaactgggtagattggacatgatccatttgcttcttgaacgaggtgctgacataggaggacctatgcggccgtactacgttcgagcagtcaaacgggcactacgctatggccatcatgccgttgccgggtacctcaaacgggctggaccttggactcatgaagatcaacgcctctgcaattcacctaaccttcttcacatagacatttgctttcgatatgataaagagacagaagagctattctttgcatactttcatggaagaaagtgggatgacctgcaatggagacgagatcggggctacgtgttcgaagacactcaactcatgcctgaaaacaggttggacactccgtcatctaggtccaacgggctcgagtgggcattaaaagataagaatgctcaatatggaagcacccagggacgaacaacagcacagatgagagatggtcccgttagtgctttatgtggatggcagcaaatcactaccacgcccggccaaaggccagagtccgtgactgcgagcgagctcgtatattctgagaaacggtacgatccgttctttggatatgatggggaaatgacaccttga

SEQ ID NO: 27054 - protein, 1172 aa, Muscodor strobelii
  misc_feature: SGI Peptide ID NO. 569260
  misc_feature (968)..(995): Pfam Id: PF00023 Pfam Desc: Ankyrin repeat
  misc_feature (598)..(1042): NCBI GI: 256730275 Blast Desc: NECHADRAFT_82615 [Nectria haematococca mpVI 77-13-4]
  misc_feature (272)..(1026): NCBI GI: 212532817 Blast Desc: multiple ankyrin repeats single kh domain protein, [Penicillium marneffei ATCC 18224] gi|210071929|gb|EEA26018.1| multiple ankyrin repeats single kh domain protein, [Penicillium
  misc_feature (40)..(146): NCBI GI: 256730275 Blast Desc: NECHADRAFT_82615 [Nectria haematococca mpVI 77-13-4]
  misc_feature (231)..(1032): NCBI GI: 225684431 Blast Desc: conserved [Paracoccidioides brasiliensis Pb03]
  misc_feature (872)..(1032): NCBI GI: 115492243 Blast Desc: [Aspergillus terreus NIH2624] gi|114197609|gb|EAU39309.1| [Aspergillus terreus NIH2624]
  misc_feature (526)..(1032): NCBI GI: 226294082 Blast Desc: [Paracoccidioides brasiliensis Pb18]
  misc_feature (272)..(1015): NCBI GI: 242760147 Blast Desc: Pfs, NACHT and Ankyrin domain protein [Talaromyces stipitatus ATCC 10500] gi|218723125|gb|EED22542.1| Pfs, NACHT and Ankyrin domain protein [Talaromyces stipitatus ATCC 10500]
  misc_feature (1)..(386): NCBI GI: 115492243 Blast Desc: [Aspergillus terreus NIH2624] gi|114197609|gb|EAU39309.1| [Aspergillus terreus NIH2624]
  misc_feature (2)..(101): NCBI GI: 119500700 Blast Desc: Ankyrin repeat protein [Neosartorya fischeri NRRL 181] gi|119415272|gb|EAW25210.1| Ankyrin repeat protein [Neosartorya fischeri NRRL 181]
  misc_feature (6)..(147): NCBI GI: 238843722 Blast Desc: ankyrin repeat protein [Microsporum canis CBS 113480]
MESPNWEQHKERIIYLYTVERQTIVEIASVMKIEHAFDKTKQQYAYQLKKWNIRKNASGKLWKHVGLRVREREGKRSKVLLYGKTIPEETWRREVQRYASIPTASQFGRRSPSPMTYDWHVVQVRSPSIVELDCGWPQNLPWFQFRSWVMPSLEKAMNNTTGLNGLTSRQRLRSLYTSIPEDSVRERGQLEQTSTSYGMVTELLQVIFYRLANHLNEVEIDSDEGVAYDDFVLGLFENMLQSSSPMISNLLSQTNSADRAFKEAVYGPQVKFMRGLDEAAIDRDIELARLLLKRGADTTSFEAEHDNKLPSLLTLLTIGGNKISEIDDDDITDFARMLITHGAEINELGTRFAPTHSNKICLGMPLSAAIALGNNELADLLIEHMAMPTDVYDISCADCLDWGWTSYYLETDTPAWALVDIAMIFHNKVMVERLLSPYILEPQSASMEYMQRALITSCLVGDTSLTSRLLSLDINWNGDWARGVTPLVASAWNQNANFGEIIEKCGNLLGPLQGENQLVVRDIAPIHAAAYNGNGELVRRLFDLGIDCNVCLEPRMDKYDWIMELHPRDTYYTWPALQLTPCSPLQMALVNGDSDTIALLLRESFVHGDEITIAVYNGNYSIVPDLISRGADILSVHGDGKTVLELVAGDASAGSIISDYFSSGGRYRSFALCRYVSALERHSDNIDPRQLSKILEHRPTGSIDSHEASAIANAIAQQNWSLTYHLLQVLPPGECQTFIGECERHIDGVWVFQPNYDFTCESYRDFPDFRGKGMSLLMAACYANNAKLIDFVYKRGYRFHAEDYKYIHKDSDMYVNVHPYLCDEDWSETTWHSWNGALLARALWTGEVDQLQSLLKRRHSLKLRNPDGYFLLESAIKKGDRQIVNIILKADPCVALDHHMLSEPSTWLAVQDLALRRQLMDGGLDLKEMSVEYGLGLLNKAARVGNLETVRYLLDCGVNINVAPPVAWNFTVLEYAAELGRLDMIHLLLERGADIGGPMRPYYVRAVKRALRYGHHAVAGYLKRAGPWTHEDQRLCNSPNLLHIDICFRYDKETEELFFAYFHGRKWDDLQWRRDRGYVFEDTQLMPENRLDTPSSRSNGLEWALKDKNAQYGSTQGRTTAQMRDGPVSALCGWQQITTTPGQRPESVTASELVYSEKRYDPFFGYDGEMTP

SEQ ID NO: 27055 - DNA, 413 bp, Muscodor strobelii
  misc_feature: SGI EST ID NO. CUFF.63745.0
  misc_feature: Variant of the nucleotide sequence at SEQ ID NO 27053
gacattcgctagcgtacggtcgaactcatcacgccactatcatggagtctcccaactgggaacagcataaggaaaggatcatatatctctacacggtagagagacaaaccattgtcgagatagcatctgttatgaagatcgagcatgcctttgacaaaaccaagcagcagtatgcgtaccaactgaagaaatggaatatcagaaagaatgcgagcgggaagctttggaaacatgtgggcctccgagtccgagaaagagagggtaagaggtccaaagtgctactctatggtaagactatcccagaggagacgtggcgtcgcgaggttcaacgatacgcgagcattcccaccgctagccagtttggaagacgttgtaagtcactaagcgaattgtcaatatgaagtgtacaatgc

SEQ ID NO: 27056 - DNA, 714 bp, Muscodor strobelii
  misc_feature: SGI cDNA ID NO. 569261
  misc_feature: Encodes the peptide sequence at SEQ ID NO 27057
atgtacgccagtcgcgaccaacaagggatagttatttttgtccttgaagagttagccattccttacacgatcaactgtatcaagttcgacgatgtcaaaaagaagccacttattgatgtcaaccccaacggccgcgtcccagcaatccaagaccccaacaccggtctgacactctgggagtctggagcaattatcaactacgtgatcgagcagtatgacacaacaaacaagatcagctattcctccttcaaagagaagcatcttctgaaccagtggctccacttccagatgagtggtcaaggcccttattatggtacagcaggctggttccgcattctccaccctgagaaggtcccttcagccattgaccggtataccgagcagaccaagagggttctgggcgtcttagatggctggcttgagggcaagcagtggttggttggagacaagatgacatacgcagatatggcttgggtcccttggaacgagcaagtccacacctcaattggtagttcgttcgaagataaactcagcgggttccccaacgttgaggcttggcacgcccgcatggtggcactgccatcatggcagaagtgtatcgaaacccgcgccaagctgatggatgaccagggtttggattggaatggcatgcccaagggagtgaaaactttccaagagtatgaaaagatgatccaggaaagtaccgacaagtag

SEQ ID NO: 27057 - protein, 237 aa, Muscodor strobelii
  misc_feature: SGI Peptide ID NO. 569261
  misc_feature (102)..(194): Pfam Id: PF00043 Pfam Desc: Glutathione S-transferase, C-terminal domain
  misc_feature (127)..(194): Pfam Id: PF00043 Pfam Desc: Glutathione S-transferase, C-terminal domain
  misc_feature (41)..(70): Pfam Id: PF02798 Pfam Desc: Glutathione S-transferase, N-terminal domain
  misc_feature (12)..(235): NCBI GI: 169605545 Blast Desc: SNOG_05798 [Phaeosphaeria nodorum SN15] gi|111065742|gb|EAT86862.1| SNOG_05798 [Phaeosphaeria nodorum SN15]
  misc_feature (11)..(235): NCBI GI: 240274615 Blast Desc: glutathione transferase [Ajellomyces capsulatus H143]
  misc_feature (11)..(235): NCBI GI: 225561513 Blast Desc: glutathione transferase [Ajellomyces capsulatus G186AR]
  misc_feature (11)..(235): NCBI GI: 154282777 Blast Desc: HCAG_02355 [Ajellomyces capsulatus NAm1] gi|150410364|gb|EDN05752.1| HCAG_02355 [Ajellomyces capsulatus NAm1]
  misc_feature (11)..(231): NCBI GI: 67525595 Blast Desc: AN3255.2 [Aspergillus nidulans FGSC A4] gi|40743974|gb|EAA63156.1| AN3255.2 [Aspergillus nidulans FGSC A4] gi|259485780|tpe|CBF83091.1| TPA: glutathione transferase 1
  misc_feature (11)..(231): NCBI GI: 116203029 Blast Desc: CHGG_09399 [Chaetomium globosum CBS 148.51] gi|88177917|gb|EAQ85385.1| CHGG_09399 [Chaetomium globosum CBS 148.51]
  misc_feature (11)..(237): NCBI GI: 171695582 Blast Desc: protein product [Podospora anserina] gi|170948033|emb|CAP60197.1| protein product [Podospora anserina]
  misc_feature (11)..(236): NCBI GI: 189208264 Blast Desc: glutathione S-transferase II [Pyrenophora tritici-repentis Pt-1C-BFP] gi|187976558|gb|EDU43184.1| glutathione S-transferase II [Pyrenophora tritici-repentis
  misc_feature (11)..(234): NCBI GI: 239612820 Blast Desc: glutathione transferase [Ajellomyces dermatitidis ER-3]
  misc_feature (11)..(234): NCBI GI: 261194418 Blast Desc: glutathione transferase [Ajellomyces dermatitidis SLH14081] gi|239588628|gb|EEQ71271.1| glutathione transferase [Ajellomyces dermatitidis SLH14081]
  misc_feature (11)..(209): SWISSPROT Homolog: EC 2.5.1.18 Glutathione transferase
MYASRDQQGIVIFVLEELAIPYTINCIKFDDVKKKPLIDVNPNGRVPAIQDPNTGLTLWESGAIINYVIEQYDTTNKISYSSFKEKHLLNQWLHFQMSGQGPYYGTAGWFRILHPEKVPSAIDRYTEQTKRVLGVLDGWLEGKQWLVGDKMTYADMAWVPWNEQVHTSIGSSFEDKLSGFPNVEAWHARMVALPSWQKCIETRAKLMDDQGLDWNGMPKGVKTFQEYEKMIQESTDK

SEQ ID NO: 27058 - DNA, 5178 bp, Muscodor strobelii
  misc_feature: SGI cDNA ID NO. 569262
  misc_feature: Encodes the peptide sequence at SEQ ID NO 27059
atgagcgatcctctcaatatcatcgtgaacgagctgatcgagctctccaatgccgttgggatctggaacccgggtgaatatgccaatctcgtctactttctcgccaggaatggtcccgatgcaacagaattccgagagcagagtaacctgccacaagggaatcctggagacctgccgattcacggctataacatcgctggatacgatacatcgtctgctctttcgcgcatcgtactggactgtgttgcaagggctactctgagccttgacactaaattcaagtccagattcagtcaggacggggctgataacgcgtttcaccatatcatgtcacagtttactacgctatgctatcagtcgtaccttgatggttttatggccaaggcaaaattgccatctctacaagagatttcacgcagccacccaaaagctgtagcaccattgctgcgaacagcactcactagccatcagttcatcgttaacgttattaagaacgatatggcccagaagaaccacgttcggagcctttcgcttcttttcatggtcgatgctgttgatagagatgatgacggaggcagtaatctctacagagattgggagttcaaggtccctagtattgacgttatgatatcatggtcgcaagaactatggaggagcgtcggaagcggttccgatatggataccgaagtgaagaagattgtcattttcattggaggcatcgcttcaagcctttttggatctccgggtattgctgataagtctacagctctcgaatctacgcgaggattctattcacgtgctctggagtacgagcgtgatgtggattatgttaataaggtcaagaaagctctcagtactatgacggctgctgacttcaaagactgggaactgatgaagaaacaattcagcgacagctgggtggagaagaacgacgctatatggactgaggcagtccgaggactgatccaggatcgtcacgggggcgagagatattttgatgaatggattactcgatgtcacaaagaggaaaccgattcaagcattcctgccgatgaacgcatcacccgatccactgccagccacgagattgaaggctacttaccgcacggcaccagtatcatcatggcagacggtcaagtcaccacggtcgagtgtctgaaaccgagagacaagttgctttcagggcttcagccagctcgacatgcagtcgtttcagataaggtgcgctcaacacgagctatgacgcgcctggtgggtttcaacaatgagaaaccctgggcatccaccgtgcagatcttccataccactactggtctacgagcggtagatccagaagcggctatgcataggaatccgtggctaacagtccgccctcttgcttgtggccacatcatctacaagctaggcgagaagagagaatatacaatggtggagattacgtcaatggagattacccccgctactatgatagcgacttacgaccttcgcctcaaggataacgacagttcgcaccatgcaaacggctatctcttggctttgcaggacatagcccaatcactgaaagcaatgtcatcgcatcaacagcttacagcattggcttctttgtcggagctacgccccctcttacgtaaatggggcacccagaccatcctgcaccgtttgcagtccgagttacacagcgatggagcagtccaaacagaggcagcttcgatcacaagtttgacttcgaagttgtcttttgctcctgggccccacgccttgtccggtccctacaggtcgctcagtcggctcaacagaaactaccggctcaaatctctgcatggtcaagggattgtctctcataaactaccgaggctaactttagtcgatggaatggtgctaatcgatggcgaggctcaaacaaaagtactcatgaatgagcacaagcgcatcgttggctggagtcgacaacttcgaagcgaacctacacacttcgaacatggccatctgagaatacacaagaatgggagtagcgccacaggtgttcttttcctgtctaacgatgcaaatcccaaagatattcaagctgggaaattgatacatgtctgtgcccacggcccaagccaaaggcgagcaaccacagctcgccaacccgtcacttcatacgatgatggtgacgattttcttgataccgtatgggacatgaagatagatcagaccgaatggcccaagaactctgaacggactgcgccggagaagccactaaattttgggaaaattgcagaaagtacagagacaacatcagaggatgtattcgtctacaaaattcgattcccactgctagacaaactccgggacgccatcaacaagacgctaagccccagagaacagatcgacgagttgtacgaaagccatcaagagattatccaagttccgagacaagggaaacttaccaaaacgatcgtccgttccgttgtgacgctcaagcatgtacctcttttgtctatcatgtctgaccaaggaattgacgcctcctcctcctggcaacgcactttcaagtcgacacttggagatcaggcgcctaccctcccgctactcttccagtccctatattttgagtcgagcgtggatggtaacaattgtttgggagctgcgtatgcgtttgatccggatatgcgagagagcaagggcaagcgctttttactcgtcggaagaaacgaagatgcagataattttgccaatattgttactccacagagagcgaaaatttcgcggctattttccaaggacgcgaacccgttggttcctttcgatcaggatcccaagtttgagccagcgtctattgtatacgcacttcagacacaggagaaaataaccgtccaagacttgattgacttagattataatccctcggcggtacatgaaaagtcgcaagactacatcttcaatgccatggtgtatcacatggatgacgagcagcgaaagttattcaccaagagggacaagaacagcttggagaggaccatgccggctgaactgaagagtcaattgccagacgaagtgaagaagttcctgcgtgcaacttacgcgccggcattcatcgctcagatgattggtaacaactccgattataataaacagctatcgaatgagcaatgggataagatctggtactggtgggctggaaacggagagggctgccttgccaaaagcaaggaatacgtaaccctgaacaagttggcttctcagtgcgccgtcagggatcactttgaactcaatatggaccaaggagatgcgaaattgctggcgcaagatttattgactgaagtcaagcgcactgtgagaatcaaacagtacgtcaaaggtggacatattgccaacgaggtgaacaagatctgcagcctcttcaatgccttggagcccgaaaaagacctcgccaatgaatggtttgacgctatcttgaaggtcctacagagtgacacgagcaaaagcgctcttgggaaacaggtcaaggaagaaacagccaaggatcacatctacgataccatgaaagttttcatagagaagcttctagatcagaacagcgaattaactggtgaagtggctgaccaactcatcgaggacctccgggagtttgaaaagcagcagggtattgataagacaaggaccgcccaggagcaggctaacgacattatgcaaaagatgaatcttttacccgaagagcttgccaaactgctccaagttgcagcgcctatcgcaaaaaagctgtctggtacccgactgttccagtttgccagtacaatcgtcgagaaatccctcgagaagctcaagaatctccctcctatcttcacaaagatcgccagatttattggaaaactgtcggttgtaggatatctgttcatccaaagcctgagtgtagtgggagccctcttgaattggaaggatatgaatgatagccagaaatcccaggccgtcttgcagacaatgaaggtcatcgtcgaagcagtttccaaagggcttgaaaagtggcaagcgtggagtaacgcatctgggaccgaggcggagcaggcgaccgcttcgatggtcctggacgagagtctcgagaaagtttcgctcagcgaagacaacctagctatcaccgttgcggacagagatccgacgtggagcaaagagggcggcgtgaagtttaccgtcagtgagcgagtgaagcagatcgagatcatatctatcgaggagattccggaaaacgacttagagacgtggagcgagccaattgcggagaagcccgagcatttaccaccgggacctgtgtcagaagaaactgctgcggagctcagcctcagcgcaaagaccctgcgaggtctcagtgtcgctctcggtgccggcgtcgcagctgccatggccttctctttggtacacgaatggaaggacttgaccaccgctggcaagatcatcaatacactcaccgtcatagttcaaattctgtccgtgctaatcgagggggtcacacttcttgtggacgtgggcctaatcgcctcgtccgcgttcacggccgctatccctatcgtcggcgccgttctagccgcgataggagtagtattgatgatcttgagcatctgcggcattcagctctacaaagaacccgagaccccggaccctgtcaagcacttcatcagtaacgagattgtgaagcttatcgagaaatggccatcgccgccagaatcgcagctggtctatgagacagacaagccgtctgtcagtggcgacacttctttggtcataacagccaaaaacaagacggccaaggacatctcccttgtctattctcagatgacgatctacagtggcgacacagaacagtgcctcttcacggaagacagcttcaacaatgtcaacctcggaggaacacacgacggcagcgtcgccgtggacaaaggcagcgagaaactcgacttctccctgctcacacatcgcgttggcgacaaccctgcttcctacgtcttcaacctctcgttcaagggcctcaagagcaccgacaacccacaagcatacctggagctcaaggctaacgagaagattagcagtacttggaagggtcatgcgagcacgaaggggaagtcgaccattattgagatcgtggagatgttgaccaatatggacaagacgcataagcttttgactgttcttaagacatcttag

SEQ ID NO: 27059 - protein, 1725 aa, Muscodor strobelii
  misc_feature: SGI Peptide ID NO. 569262
  misc_feature (55)..(1716): NCBI GI: 121711759 Blast Desc: ACLA_008290 [Aspergillus clavatus NRRL 1] gi|119401646|gb|EAW12069.1| ACLA_008290 [Aspergillus clavatus NRRL 1]
  misc_feature (594)..(1707): NCBI GI: 156053203 Blast Desc: [Sclerotinia sclerotiorum 1980] gi|154704547|gb|EDO04286.1| [Sclerotinia sclerotiorum 1980]
  misc_feature (27)..(1277): NCBI GI: 145228417 Blast Desc: An01g00730 [Aspergillus niger] gi|134054605|emb|CAK32617.1| [truncated ORF] [Aspergillus niger]
  misc_feature (338)..(560): NCBI GI: 256728192 Blast Desc: [Nectria haematococca mpVI 77-13-4]
  misc_feature (642)..(1079): NCBI GI: 116198515 Blast Desc: [Chaetomium globosum CBS 148.51] gi|88178692|gb|EAQ86160.1| [Chaetomium globosum CBS 148.51]
  misc_feature (1479)..(1624): NCBI GI: 145228419 Blast Desc: An01g00740 [Aspergillus niger] gi|134054607|emb|CAK43452.1| [truncated ORF] [Aspergillus niger]
MSDPLNIIVNELIELSNAVGIWNPGEYANLVYFLARNGPDATEFREQSNLPQGNPGDLPIHGYNIAGYDTSSALSRIVLDCVARATLSLDTKFKSRFSQDGADNAFHHIMSQFTTLCYQSYLDGFMAKAKLPSLQEISRSHPKAVAPLLRTALTSHQFIVNVIKNDMAQKNHVRSLSLLFMVDAVDRDDDGGSNLYRDWEFKVPSIDVMISWSQELWRSVGSGSDMDTEVKKIVIFIGGIASSLFGSPGIADKSTALESTRGFYSRALEYERDVDYVNKVKKALSTMTAADFKDWELMKKQFSDSWVEKNDAIWTEAVRGLIQDRHGGERYFDEWITRCHKEETDSSIPADERITRSTASHEIEGYLPHGTSIIMADGQVTTVECLKPRDKLLSGLQPARHAVVSDKVRSTRAMTRLVGFNNEKPWASTVQIFHTTTGLRAVDPEAAMHRNPWLTVRPLACGHIIYKLGEKREYTMVEITSMEITPATMIATYDLRLKDNDSSHHANGYLLALQDIAQSLKAMSSHQQLTALASLSELRPLLRKWGTQTILHRLQSELHSDGAVQTEAASITSLTSKLSFAPGPHALSGPYRSLSRLNRNYRLKSLHGQGIVSHKLPRLTLVDGMVLIDGEAQTKVLMNEHKRIVGWSRQLRSEPTHFEHGHLRIHKNGSSATGVLFLSNDANPKDIQAGKLIHVCAHGPSQRRATTARQPVTSYDDGDDFLDTVWDMKIDQTEWPKNSERTAPEKPLNFGKIAESTETTSEDVFVYKIRFPLLDKLRDAINKTLSPREQIDELYESHQEIIQVPRQGKLTKTIVRSVVTLKHVPLLSIMSDQGIDASSSWQRTFKSTLGDQAPTLPLLFQSLYFESSVDGNNCLGAAYAFDPDMRESKGKRFLLVGRNEDADNFANIVTPQRAKISRLFSKDANPLVPFDQDPKFEPASIVYALQTQEKITVQDLIDLDYNPSAVHEKSQDYIFNAMVYHMDDEQRKLFTKRDKNSLERTMPAELKSQLPDEVKKFLRATYAPAFIAQMIGNNSDYNKQLSNEQWDKIWYWWAGNGEGCLAKSKEYVTLNKLASQCAVRDHFELNMDQGDAKLLAQDLLTEVKRTVRIKQYVKGGHIANEVNKICSLFNALEPEKDLANEWFDAILKVLQSDTSKSALGKQVKEETAKDHIYDTMKVFIEKLLDQNSELTGEVADQLIEDLREFEKQQGIDKTRTAQEQANDIMQKMNLLPEELAKLLQVAAPIAKKLSGTRLFQFASTIVEKSLEKLKNLPPIFTKIARFIGKLSVVGYLFIQSLSVVGALLNWKDMNDSQKSQAVLQTMKVIVEAVSKGLEKWQAWSNASGTEAEQATASMVLDESLEKVSLSEDNLAITVADRDPTWSKEGGVKFTVSERVKQIEIISIEEIPENDLETWSEPIAEKPEHLPPGPVSEETAAELSLSAKTLRGLSVALGAGVAAAMAFSLVHEWKDLTTAGKIINTLTVIVQILSVLIEGVTLLVDVGLIASSAFTAAIPIVGAVLAAIGVVLMILSICGIQLYKEPETPDPVKHFISNEIVKLIEKWPSPPESQLVYETDKPSVSGDTSLVITAKNKTAKDISLVYSQMTIYSGDTEQCLFTEDSFNNVNLGGTHDGSVAVDKGSEKLDFSLLTHRVGDNPASYVFNLSFKGLKSTDNPQAYLELKANEKISSTWKGHASTKGKSTIIEIVEMLTNMDKTHKLLTVLKTS

SEQ ID NO: 27060 - DNA, 471 bp, Muscodor strobelii
  misc_feature: SGI cDNA ID NO. 569263
  misc_feature: Encodes the peptide sequence at SEQ ID NO 27061
atgatcaactacaatagacagatcgagaagccgaattttggtgactcattcagtctccaatttagctgggcaacagattcacaagcctgtctgcgaccctccgccgacctcgacattgacgtcgtctgcgaagttcagaaaagaaaaacggacgacgactcctccgtggaactaccaagtcttgcatctgagtataacacattcagagttcttgcggagatcttcgacgagtgcgtcgtcaaggcggctaccgctgagttcaacaagatgaacgtgcacaacatttccacggagttccctccctaccgcggctactgcgaatacatcgattttgatagtatcaagaaaggaatccgtgaccctgacgaagtgcgcaaaagcgctgcagcacgggcgccccctgagcctcgaactttgatgacactggcagctgctgtggctttcttcgcattgagctcagtattattgtaa

SEQ ID NO: 27061 - protein, 156 aa, Muscodor strobelii
  misc_feature: SGI Peptide ID NO. 569263
MINYNRQIEKPNFGDSFSLQFSWATDSQACLRPSADLDIDVVCEVQKRKTDDDSSVELPSLASEYNTFRVLAEIFDECVVKAATAEFNKMNVHNISTEFPPYRGYCEYIDFDSIKKGIRDPDEVRKSAAARAPPEPRTLMTLAAAVAFFALSSVLL

SEQ ID NO: 27062 - DNA, 1386 bp, Muscodor strobelii
  misc_feature: SGI cDNA ID NO. 569264
  misc_feature: Elevated expression when VOC is produced
  misc_feature: Encodes the peptide sequence at SEQ ID NO 27063
atggatatagacaccgatattgaaaagactgcttcttcgggcttggacggcaatcatacggcgtctaacaaccaacctccattagcatatttcaacccctcggcgacaacgcccgaaacgaccacggaacggcatgaacccaaggattctggtttattggcaaaagaatgtgagaagagcgaggatacaccaccggatggtggttttgccgcttggtgccaagttgtcgctgctctcttgacagccacgatctcgtggggaacgccaacggcttttggcgtctttgagctatactataccgagacgctcaaattgccaaaatcgcaggttgcttggattggctccgtacagttcttcctcacctatggcatgtgcacattttccgggcgtctagccgatgctggctacatcaagtcgacctatgcatttggcgccttcttggtccttctcggcaccttcacaaccagtgtaggcactcagtactggcacttcttcctctcgcagggactagcggtcggatttggattgggaattatgttcatgccgccgctccaggtactcagctcgtacttcgagaaacaccgcactctcgccatgtccggcgtcgcaaccggcacaggaatcggcagtgttattctccctgccataatccaatactcgataccaaaggttgggtttggatgggctgtgcgaatctttgggttcgtagcgctgttctgtactgtcacctcattcttccttctgaagccacgtttggaaccgagaaagtctggctctttcgtagagtggaatgcgtttcaggaactgccgtatctgctatattcaattggcgtcttcctcctctatttggcacttttcttcggttctttctatatcaattcgttcgcgcgcaatgttatcgggctctcgagtactacatcggtgcaagtccttctgattcaaaatggtgttagtataccatttcgaccactcgtaggatatatcgcgaattatcatgttggtccgatgaacgtgtatatcgtgacatctgttctgtttagcgtcgtcacttttgcatggattggcgtaaacgatcggagtggtctgtatgcatacgccgtattccttggtataacgaatggcgtttgtcaaggcatgttccttggctcccttgcttccttgaccgacgacaaccaaaaaatgggaattcgtgtaggaatggtgcacactatcgtagccttcgcaacgttggcaggaccacctattgcgggtgcgatcattgataaagacggcgggcgttatctaaatgcgcaaatatacgcgggtattgttattcttgtcgcttcgggattcttcattggtgcgagatgcgcaaagacaggaccacgtctgaaagtaaaggtttga

SEQ ID NO: 27063 - protein, 461 aa, Muscodor strobelii
  misc_feature: SGI Peptide ID NO. 569264
  misc_feature (75)..(413): Pfam Id: PF07690 Pfam Desc: Major Facilitator Superfamily
  misc_feature (4)..(454): NCBI GI: 46125513 Blast Desc: FG07134.1 [Gibberella zeae PH-1]
  misc_feature (64)..(461): NCBI GI: 171692291 Blast Desc: protein product [Podospora anserina] gi|170946094|emb|CAP72895.1| protein product [Podospora anserina]
  misc_feature (6)..(461): NCBI GI: 256730939 Blast Desc: [Nectria haematococca mpVI 77-13-4]
  misc_feature (52)..(458): NCBI GI: 256728141 Blast Desc: NECHADRAFT_53888 [Nectria haematococca mpVI 77-13-4]
  misc_feature (39)..(461): NCBI GI: 238490472 Blast Desc: monocarboxylate permease, [Aspergillus flavus NRRL3357] gi|220696886|gb|EED53227.1| monocarboxylate permease, [Aspergillus flavus NRRL3357]
  misc_feature (23)..(461): NCBI GI: 238842446 Blast Desc: conserved [Microsporum canis CBS 113480]
  misc_feature (2)..(454): NCBI GI: 169779904 Blast Desc: [Aspergillus oryzae RIB40] gi|238506080|ref|XP_002384242.1| MFS monocarboxylate transporter, [Aspergillus flavus NRRL3357] gi|83773156|dbj|BAE63283.1| protein
  misc_feature (41)..(461): NCBI GI: 169772557 Blast Desc: [Aspergillus oryzae RIB40] gi|83768608|dbj|BAE58745.1| protein product [Aspergillus oryzae]
  misc_feature (2)..(454): NCBI GI: 119493378 Blast Desc: MFS monocarboxylate transporter, [Neosartorya fischeri NRRL 181] gi|119412039|gb|EAW21982.1| MFS monocarboxylate transporter, [Neosartorya fischeri NRRL 181]
  misc_feature (55)..(454): NCBI GI: 159128049 Blast Desc: MFS monocarboxylate transporter, [Aspergillus fumigatus A1163]
  misc_feature: Useful for introducing or modulating the production of volatile compounds
MDIDTDIEKTASSGLDGNHTASNNQPPLAYFNPSATTPETTTERHEPKDSGLLAKECEKSEDTPPDGGFAAWCQVVAALLTATISWGTPTAFGVFELYYTETLKLPKSQVAWIGSVQFFLTYGMCTFSGRLADAGYIKSTYAFGAFLVLLGTFTTSVGTQYWHFFLSQGLAVGFGLGIMFMPPLQVLSSYFEKHRTLAMSGVATGTGIGSVILPAIIQYSIPKVGFGWAVRIFGFVALFCTVTSFFLLKPRLEPRKSGSFVEWNAFQELPYLLYSIGVFLLYLALFFGSFYINSFARNVIGLSSTTSVQVLLIQNGVSIPFRPLVGYIANYHVGPMNVYIVTSVLFSVVTFAWIGVNDRSGLYAYAVFLGITNGVCQGMFLGSLASLTDDNQKMGIRVGMVHTIVAFATLAGPPIAGAIIDKDGGRYLNAQIYAGIVILVASGFFIGARCAKTGPRLKVKV

SEQ ID NO: 27064 - DNA, 19395 bp, Muscodor strobelii
  misc_feature: SGI EST ID NO. CUFF.65011.2
  misc_feature: Variant of the nucleotide sequence at SEQ ID NO 27062
agtggtgcacccaggcccgtggtatcgcgtgtggtgctgcaaagtgctgcaaagtgctgtagtgggaagctttttcgccaatgcgacagcatcttcggaaggcaccacattgtccacagcctcgtttcttctttcctacctcaccaccacttttccgctgtactttgatgatacccctcaattcgacctgaacttccattctctacgttgtggttggatcctgctgtgcattaccattccccccctccaccatcgcgcaacgacccgagctcgcaacacatccgtggactcaaagtgcaactaactattatactgagcaagatagacacctttcacacctgtcttgcacagctgtcgtattgaaggaggattcaaagacgagaaactaagctacctagggtacttaggtattcatcggccttacccccgccgcaaataagcttcattggcttcgagtcatcagcttccgcctcgactctctcgcttctctcgactctacccattctacctatcactcatcacccatctcctcgttgatggcgctcccgaatgcgttgaatgtggtataaaccccaactcgtcgcttctgcggagccgcaatcatgtcggcagcccagcttgaagacatcgtcaagaaattgactgttcaggaaactgaatccaagaccaagctcgaggccgcgacgacgctgcgcgatagccttgaccactacacaaatggccccatttacacccacttcctctcccgggtcatgcccttaatcgtcaacaccctgcgcggatcatgcatcttccagagcaactcgcccgagcagaagctccgccactgcatcctcgagatcctccaccgcctcccaaccaaccagaaccagacccccaccgagcccttcgagcagtatgccaaggaggtcgtcgacttgttgatgaccctcgtgcgccaggacaacgaagacaacgcccagctatgcatcaagatcatatccgacatcatgcgccaccagcccaaggtcctggctgataaggtccagcccttccttacgctgatacaggagctgttcgagcagctggaaaaggtcgttagggagcagctcgacagtactgccctccaacccggtgtcccagggccgccgtcgacccccggaagcacccagaccaatttccagtccccgcggccgggctctccggtcgcttctgtcaccgacttgggccaagacttgcagcagcagagccgtccgttgctgaagggaatgcagtctttcaaagtcgtgtctgagtgccccattattgtcgtctcgattttccagacgtaccgcaacattatccagtccaatgtgaaggcgtttgttcctctcatcaagacggtgttgtgcctgcaagcgaaggcacaggaacaggcgcacaatgaggccaaggcgaagggcaccatcttcaccggagttagtcccagcatcaagaaccgcgcagctttcggcgaattcatcaccgcgcaggtcaaaactatgagctttcttgcgtacttgcttcgtcaatactccagccaactggcagatttcctacctacactacccgagatcgtcgttcgtttgctcaaagactgtcccagagagaaatcagcggcgcggaaagagctgcttgttgccattcgccacataattaactttaatttccgaaagatatttcttcccaagatcgatgagcttctggaggaaaagactttgatcggtgatggtttaacggtctatgacacgatgcggccacttgcttacagcatgctcgctgatctgatccatcacgttcgtgaatcgctatcacccgaacagattcgaaagactgtcgaggtctacacaaagaatctgcaggataatttccccggcaccagctttcagactatgagcgccaagttactattaaacatggctgagtgcatcgccaagatgccgaacaaggtcgatgcccgacattaccttctcatgattctcaatgccattggagacaagtttgcagctatgaacagacagtatccgaatgcagtcaagctgtccaagctgtatgcgcaacaaaatgccgaggggcgcgagacatacctggcagacaaggagcaccctcccgagtgggatgaaattgacatcttcacagcaatgccaataaaaacttctaacccgcgtgagcggaacgccgacccagtggctgacaacaaatttctttttaaaaatctgatgaatgggctcaaaaacactttctatcagctgaaagcttgcaacacggcatctgtcgtcgactcccataatgctccggcacattggcaggatgtctcatatgggttcacagccgaggaagtcaaggtcgtcgtcaaacttctccgtgaaggcgcctatgttttccgttactacgagatcgaaaaacccgctgcggaaggtcaatttgcatccacggtggagtatatggcgaacttttatatggtgtcttctagcaaagaggaaaaagaactcctggaaacttttgcgacggtattccactgcatagaccctgctacatttcatgaggtcttccagcaggagataccgcgactctacgagatgatattcgaacacacggccctcttgcacataccgcaatttttcctcgctagtgaggcgacatccccgagtttttgtggcatgatactcaagtttctcatggaaaggatagacgaagtgggttctgctgatgtgaagaaagctagtatcttgttgcgtctcttcaaactcgcgttcatggccgtcacattgtttgccactcagaacgagcaagttcttctcccccacgtagttgatatcgttacgaagtctatcgatctgtcaacgaaagcagaggaaccgatgaactacttcttactgcttcgatctctatttagaagcatcggcggaggcaagtttgaacatctctacaagcagatcctacctttgctcgagatgatactcgacgtattaaacaacttgctcatggccgctcggaaaccagcggaacgggatctgtacgtcgagctgtgcctcactgtaccagcgcgtctgagcaacctgctcccgcatttgagctttttgatgagaccacttgtcgtcgcacttcgagcgggcacagagctggttggtcagggccttcgaactctcgagttgtgtgttgacaaccttactgctgactacttggatcccattatggcaccggtcattgaggagctgatgaatgcactttttgagcatttgaaacctcatccttactctcatttccatgcccataccaccatgcgcatcctgggcaaacttggtggtagaaaccggaagttcatgtcggaaacactaccggtcaactaccaacgctacgctgatgatccagccagtttcgacgtccgtctcattggctccaagaaagacagagccttcccagcctctcttggtattgactttgccatccgcaaactcatggaagtgcccaagccgtccaaagtgaataccgcaaagcagcaggatggatactacaagaagcaagcgctacagtttattaaagctcaagtcaaattgcgtatcggcgtcgaccacctacctgatgatctccctcgtcttgtacgtcttcaagctcaggacctgctggcaaggaaaccgaatgccgatttcgcagcatttgacgcgctcaacaaggagcgatcggttgtgaagaaggatgaggaagatctcatcatgaaacggctcatcaaggccatcatgtatgcggaatccatccctgagtttcgacaagaggccgacgtcttccttatgaacttggcgcggcatttcacaatcgtcgagattggacgcgcactagtcgatgtgaaaaaggagctaagtccatttgaccctcaagcgggcgaaggccccttattcgtcgatacgagggtccttgctgatgccatccttgagtcgctggcctcagaacttcccgaggtcagagacgcggcttttcgcgctgtccgagccgtgtatgactccacggccacaatctttggtggccaggctcaagtcggccgcttgagctttttcaaccacctgagtaaaactttctgtcatgcatgcttcgaggaagagtggtataccaaggctggcggtacactgggcatcaagtatcttcttgatgaaattgagcttggagacatatggataatttctaagcagatggagttcattcgagccctcatgtacgttatcaaggacatgcctcaagatcttcccgaaaaaacgcgcagctctgctcaagtcgccctcgaagcattattacggcgcaccacaaaaaatgcaaaaaaggaagatgctctgccagctcctgcgcagcaagggcaatcgccaccgaaaccttccaggcttgcgcaaatatgcatgatcttcaacgacgagttgtctcatatgaacaagcatgttcgagccaccgcccggcggtctcttgagtatattgccaacaccacccagtctgaaatatgggaactagttgagcctcacaaagatcgtctcctctcgccaatctatgcaaagccactgcgagctctgccgtttgcaactcagattggatatatagacgcgatcgcttactacatgggattgaagaacgattttgtctcttttgatgttgacctcaaccgactgctcatggagtctctagctcttgctgacgcttctgatgaatccctggctggtaaacacgccgaatttcgtacccatgagtcaatcgtcaacctaagagtggcctgtatcaagatattaagcaaggctatgggctttgaagaatttcagaagggccagaacaacccaacgcgcaccaaaatagtgtctgtcttcttcaaatgtctgtattcggaatcaaaaccgacgatcgaggcagccaatcagtccatcaaggcagtcttatcccagacaactaagttgcccaaggacctgttacagcaaggcctgaggccagtcttggctaatctccaggacccgaaacggttaagcacacatggactggacaaccttgcgagacttctaagattacttacaacgtacttcaaagtcgagatcggagcacgtctacttgatcacatcaagattctcgccgaaccaaatttccttcagcagatttcgttcaccttcttcgagcagaacagtcagatgaaggtgattgccgcagttttcaacatcttccatctgctgcccccagccgcagagcagtttaaagagagacttattgatacgtgcctcgatctggaggaaaagttacgacgcacgcatcatagccctttccgacctccgctttacaagttcttgaaccgttatccaagcgaggtctgggagtttctgacgggcaagctggaagacatcaagtatggtaggttccttgctcaggttcttgcaaaccctgagagcaaaccactacgcgatcatgccgccgccaatttggagcctttcatgtccaagtgtaaccaaatttggaacgaaaccaaagattccagatttgtcgttgccattggcacaatcaatatccttgattccctcagtggatacgaagatgcccgagactggatggatcggaaggagacgatgagcctactcaaacaaatcggaaaagatctggaacgtcgtcttcggctcaacgatttgcccgcaaacttacgtctacctgccgatcaagcagccgagcaactaatgagcatatttaccaaagcccttacgctaaaacctaaagaccttgatcccctcttcagcctgatcgagtccattacctcagatgagctacgcgccacatcttctgtcttcgcattcctctacaatgaggtggtctctagtcagtctatcgactattggaagtccatcatcatgcgctgtctcgacctttatgctagcaagaatgtcagccagaagacgaagtggtttcttcttcgctacatcgtcaatcctatagttgccatggacgtcattaggcactggaatccgtccaatgccccaaaagcacaaagactcatggataagtcagtgatcgaatcgattaatgtgaaaatctggaaagtcaacctcgcagacccccaagaggatcttgcacaaccaggtattgaccatacacgcatggaagtgctacaactatcggcaatgctcgtcaaataccaccacgcgattctgcaagatgcgagaaaagatatcattaagttcggctggacttacattcgtttggacgatgtcattaacaagcatgctgcttacgtcgtcattgcatacttcatcgcgcattatgagactcctgcgaaaattgtaactcaagtctactattctctcttgagaacgaatcagaatgaaggacgagcgcttgtcactcaagccctagaactaatggccccagtgctcccaaagcgatgcaatactgttcctggtgatcgcaatgccgtttgggcaatggcaccacggcgaatcctggccgaggagggtcaaaacgctcagcaaatgactagcatattccatttccttgttcgccatcctgatttgttttatgagtctagagacaaatttgcacttcttatcatcacctcccttcggaaagtgtctgcacctcaaacgtcttcgaatgagaacaagaagcttgcgttgaatatgatgtggctaatctggctatgggagaagcgacgtctggaagggaaatctaccgttcctacaagagccttgtcagaatcaccaaactcgaagaggcgcagattagatggagatgtgtcaacttcgtcccctccgtcagctcggcaaacatcacaggtcgaaagagcagaatttcagatccctcaaggcttccggttgaagatgattaagtatctgatcgaattcattgctcaattgaacgagagatacaaactgccttctgcaaagccgagagataccacatcaagtccgggccctactttgccgcccttgtctacagagctgtgcatgaaggcgttatctctattgtacaacttgctccaacctcaatgttggggcgatttggacgttgacttgtttccgaccatcactgatgtggtcttggccagtgagaaaactgctaagatcgtcaatgctgacccctccgacaaggacaactatgacgagaaattcatcacgaatatcatcaacactctacaggttgtgcgcatcattctcaatttcaagaccgacgaatggatattgagaagtatgacatcagtgcagaaagttctcgagaaatcattgaaatcagagattccagaaattcaagattgtttgcatttcgccgacaaagaattcgatggcgggcgtgatatcaagtctacagtccagcgaattcttgatgctgtacctgaagacgtcccaatggaagacgccgatggtgaagcggaggcggaaacgcccacctccgagatcattactttcctttctactctagccacagagactatggctaatgctcaatacggcgctggggtcagtaccttgtggtcgctgagtcgtcgtcgacctacaatcattgatcagcacattccggcacttatgaaagcattgcaaacgaaactggccagagaacatgttcagcactggaccagtgtgtcgtccactcagcttccatctaatgcaatccgtcctcaagatccaaatgcgcaagctggagagctgacgccttatgatctcaagatacagacggagctcatgatcaaggccattgaagtaacatccatgcgaatggagacgcttgctgataaccgtagaccattccttagtgtactggccacgctcgtcgagaaatcacaggataatacactctgtgagaaaattctcgagatggtcgagggctgggtgtttcgggcagaaggtacatggccaactctgaaggagaagactgccgtcctgcataagatgctctgtttcgagcatcgcactgacccgacaatgttgaccaagttccttgacctggtcatccgtatctacgaagacccgaaaataaccaggactgaactcacagttcgcatggagcacgccttcttaatcggaacacgtgctcaagacgttgagatgcggaaccgattcatggctatattcgacaagagtctctcaaagactgcaaccgctcgcttgtattatgtcatcaaagtacagaactgggacacacttgccgattcgttctggatcgcgcaagccactcaactactccttggtgccgtggaaatgaattcgaatattcaccttcatcaagaagacttccgaacgcttcctgcctcgctcgtatttggcgcatatgctaaagacagtcgagaaccgacactcatggctgatgataagtatgacactttcatggcaaatcaccgaagatttgtcaacgaactcagcgaggtcaagctacgggatgtgatagagcctatttcccagcttcagcacgtcgacagcaccctgtcacacgaactctgggtggccttgttcccaatgttctgggctgcgacggtgcgcgaagaaaagagtgagatcgagaaggctttggttgaactcctcactaaggacttccattctcgccagttggataaaagaccaaatgtagtgcaaactttgactacaggcgcagccaagtcttggccagagtgtaggattcctccacacattatgaagtattgtgcatcgacttacgatgcttggtacactgcaatggtgcaactggagaaggctgctatcaagccagagatcgattccgccaaggttcgtgaaagtaatacagatgcgctgttgcacttatactctagcctgaaggaggatgatctgttctacgggacgtggcgccgacggtgtggatatgtcgaaaccaatgctgcactctcatacgaacagagcggaatgtgggataaagctcagaagatgtacgaggctgctcaaataaaggctcgaacaggtgtcattccattttcgcagggcgagtacatgctctgggaggaccattgggttctttgcgcacaaaaactccagcaatgggagattctgcaggacttcgccaagcacgagaatctacaagatcttctgcttgagtgcgcttggagaaacatcgagatgtggcagaaccaagaacatcgcgacagtttagatatgctcatcaagggtgtcatggatgctcctacctctcgacgagcctttttccaaggattcatgtctctccttaagtttcacaacaagcaagagaatatgcctgagttttctcgagtttgcgatgaagcaatacaactatcgattcgcaaatggcaccaactcccccggaggcttaccgcggctcacatccccatgcttcacaacttccagcagctcgtggaacttcacgatgcgagtgtcatctgccagagtctggctggcactaaccaggctaatttagatgtcaagtctggagagctgaagctgctcttgggtgcctggagagatcgtctacctaatacttgggatgatatcacagactggcaagatttggtgacctggcggcaacatattttcggcttgataaacaacacatatttacagctgctaccccaatcggggcagaacgcgaatggcaactcgtttgcataccgtggctaccacgagactgcgtggattatcaaccgctttgctcatgtagcgcgaaagcacagccttcccgacgtctgcgtcagccaactcagccgcatatatacccttcctaacatagaaattcaggaggcgttccttaagctgagagagcaggcgagatgtcactatgaaaaccccgatgaactgacgaacggattggacgtgattaataatactaaccttaattacttcaacgctcagcagaaggcggaattctacactctgaaaggcatgttcctcgagaagctaggacaaaatgcagatgccgatggagcttatggcacagcgttgtattacgacatcaccaaggctaaggcatgggctgaatgggggtatttcaatgaccgcaaattcaaggctgatccatctgatacgggctcggcccgtcaagctacaacctcctaccttcaagctattggtagttacaagagcggaaaggctcggaagttgatcgcccgaattctgtggttgctcagcctagacgatgccaacggaacaatcgcagccggcttcgatgactacaaaggggagacacctgtctggtactggatcaccttcataccacaactgctcacaggcttgggccataaggaggcacccaaagtacacggcattttactcaagattgcaaaggcttatccccaatctctctatttccaacttcgaacgaaccgtgaggatatgttgatgattaagaagaatcaagaggctaaagagaaggctcggcagcgcgctcaatctgctgccgctgctagaaagccctccagttccccgtcccagtcgaaacaagagaatcctcaaccaaagtctgaagcgtcttcgcggccccagacgtcaaacggagacactgccgtccagaccaaaacagaaccagctgaagcatctgcatctgcaaatcctcctgctgccgccaatgcaacaacccctgctgcaaatgccgagcagcagcctgctaaggataccactgcatccaccaccggccaaaagaagcctccttgggagcttactgaagagatcatgtcggttctcaagactgctttcccccttcttgcattgtctatggagacaatggtcgatcagatacaaaagtatttcaaatgccctccggacgaggatgcttatcgactcatagttgccttgctcaatgacggattggcttatgttagtcgtatgcccgcatcatatgccaaagatgtgaaactgccgaatgctaccgagacaaacataacaagattcgctgagactattctcccggcgcatatcaaaaagtcctttgaagcagatttcgttactgtcaagccaacgatgtatgaatacatccacaagcttcgcaaatggcgcgacaagtttgaagaaaagctcgaccgcaggagctcaaatgctaatctagagtcatactctcgtcacctcagcgagttccgttacctcaaattcgacgaggtcgaggtcccaggacagtacttgcagcacaaggataagaaccaagacttcattcgaatcgatcgattcctgcccaacgtggacctcgtcagggcaattggcgtgtctcatcgtcgactcaagatacgcggccatgatggcagcgtccatgcttttgcgatacaacatccggctgccagacactgccgacgcgaggagagaattctacagctcttccgacagctcaatcaaacgctagccaaaaagaaggaaagtcgtcggcgcgatcttcaattcaccgttccgttaatgatacctcttgcaccgcacattagaattgtgcaagaagatacctcatacgtcactctacagggcatctacgaagatcactgcagacgcaacgggatgaccaaggacgacccggtcatgttcacaatggacaaattgagaggtctgatggagcctaaggcaaccaagcaagctcaagagaccgcaacagcccgacttgaggtgttcactgccatccaagagaaatgggtgtcgcatacaattgccttggaatatttccagagcatcttcccggaatactcggacttctggcttttccgtcgtaaacttgcgtaccagctgtctgcgttgactttcatgacgtatgttctgttcatgacagggcgttatcctcacaagatcaacatcgcacgcggatcgggtaagatctggggctccgagttgatgtcattcatggcgcctggtaaaccattcttccacaatcccgaaccggtcccgttccgtcttacgcccaacttgcaaaccttgatgggacccctggctaccgaaggcatcttcagctgttcggttatggcgattgcccgatgcctcactgagcccgaattcgaacttgagcacgccctcacgctgcttgtgcgggacgaagtgatcttctggttcactagtagccatcgcgccatccacctcaacgaaaatcagctgcgggataccgttcagtcgaactgcgacgtgatcgtgaaacgtgctctcagcttggcccaaagtccccaaggcactctaccggccaaccagacggttattgatcttgtcgctcgtgcggtaaacccgatgaacctagcccagtgtgatgcactctggatgccttatctctaatcaacagattcggagcaatggatttttgctcttttgtttctctttatttttgtacctgtacctattagttgacgttacatcatgacgaccatatggcattacagtgtgttctggcatggcgtttatgtggccttcggatttgtcttcagtcatcggataaaaacggagttccggttaggatctcgggcaggagtatcttacgataaaaggcaaccagaatggaggccaccaggacctatccataattactgcgttgagttacgctctctagatagcaccaaagaaatgtctttgctcataattatgcctcgtatcctataacttggtgaatgttacatcctaaatgctattaccgctttgggtcaaaccagatcaagatctcgtgaagtcctgtaccggccgaagagcccatactagctattatcgcccagattttcttgggtatgtagatgatacaccaccaaatgcacatcagcaatagccagatgagccatcctagatctcctagtatcttttcaaaaatctcttctgatacgactgcgaagtgacttagccacttccaaagtaactttggtccgtcgacgataacggcgcgtgcgaatgccaagaagccggtccaaatgtcggctagtgttagattgcggaagaatgtcgagagcgctgtgattagtgtgtgcaggaatgagaaaaagcgattgattatgtgggatattgatgttccgagtttctgaacgccggcccatagccattttccgaagattttaaggacggcgggtatggattttatgaagtgtttgagggtttttgataaccattttgtgaaagaccagagttgttctgagagtttggcgaggaatttgtagattgatttagagatttctagtaggtagttgccgaattccttcagtgaattgaggatgagagatgggagttcggcgcgatgcgtatgtatgtatttacacagtttcaccaaggggatgacgaggaattccttgggtactgtgtagagcagggcttttgggacctgcagtaagatgtttccgagttttcttagggattctaggaagagagctgggagttcggcccgatgggtatagatgtatttacagcatttcatcaaggggaggacgattagttctttgggtactgtgtaaagcagggctttggggattttgtagacgaagaagagtgtgaagtgttttatgttttgcaaggagcgggagatgcggcgcatggcgatggagtgtttggtcttccagcgtttgaacccaccaccgcgccgagagggcaggtaggacactatctcatggtgcccgtttgatgatgcgagacggagagcgagttgtccgtctggtgctattagggagtcgtctgcgtggtaggattccatgaggagttttacgatggagagctttccttgcgaggcggctagttggagcggtgttcgggatggatttgggatacgtttggcatgatagtaatgtgttggtggcggatctggggatgtgccgaagaggtttacgtctgcgccgtgagacataagaagacggatgacattgagatcgccatagtttactgcgactaggaggggtgttgagccggcgaagtttggggtgtttggtgtgcagatgttgtgtgttatgtagagggttatcatatttgtgttctggactcttatcgcgtcgaagaatgagtttatggtttcgcgacggtttcgcagaactggggagtgtgttgggtcgctaggcgaggatggttgtggtgggtaagcggtaattgggaggatatatccatcttgagtgatgtcgtgaataatttgagatatgacttgttctatttgacttgagtggacgttactagtgacgagccactgtggtgagcgtatattgtatcgaggcggttgtggggatgaagctggtggtgtagtgtgagaatggctttcggtgtaagtcggtggtgtttgtgagcttgtcgctttgtcggatgagttgagttgcgaggttgtgtcttcattggttgtctgaattttgttggtctcttccgagacgtctttggccttcttctctgatggtgaagacatcttgagaataggtgttttggcagtttataggtgaacgacttcgatgctgaaactcttatgctactctgatctgctaagttcgcatatcacaatgtttgtactagagccgacagcaatgtattatatctaacatcatcaatttcgggtcccgaggcatttacaatctgatcgagcttcgttgttgtaatctcatgaggatgaaattcacgtgaaatttaggcacactcattccagggccagacgttcaaaacaccaccctaacaaccttgagttacagtagcctctgattgggctcggttgtcttggttctgttatctgatgtttggttggcctggaggcgcagtagcgaggcgtccctgtgaggcgtatttctcttggcgttactagcatgtcggttgcgatcgcgacaagcgacaaaagcattttgagacctccttagtatcaagatgccggccatgaagggactaggaagcttcttgatatctatacgagtcttctattccgttattgaggggttgatgatggctcgtagaatatcgtaattccagaattgcactggaggtgcacggtttaataagatggaatcgttcttagcggcttaggcctcacaggttacctaacccacctgatgctgtcatagttcttgattaacttgattcccgaattaccttaatgcaaaattgcaaagagcttgttcgttcttatagagccattttattcatccttctcgttctttagacagtataccacgatacgaccaagtttatcaatcactcgcagagactcgtgagccagtcctcaagatgatgcaccatttgcgagactgcgggtccttcatgcctgtctaaagattctctactgcacaccatacgataaatgtgcgatctggcgcatttgaagagggcgtgtaaagacaaaaatgttgaagacttattagatatgatgtgagcttcaagaatataagttctcatagagttacaaaactctcacctcttttcagcgcctttgtcacgtcatctgtcgccagcgcaatggggtcgctacaagggcgcaaatgacaggctgggagtggcaacgcctccaccaacagaagcaggtacgtaataatctgggctttgggcaaacatgatcccgaaccatcgacgggtcccacgatgatttcgacaatgatcacaaatcctagactttgacaagatctcctcgagaattacccaatcctatagtgccatagctggcaggtcgtagtatttaaagcttgtcgatgcccgttgatttagactcagcatcatatcgcggctattgagacgacaatgctagtttgcgcatctttcattttcgttcggctgtggataccgtgaatagaccatatttcaaatacaatagtcatccaaaccttagagtgaacaataatggatatagacaccgatattgaaaagactgcttcttcgggcttggacggcaatcatacggcgtctaacaaccaacctccattagcatatttcaacccctcggcgacaacgcccgaaacgaccacggaacggcatgaacccaaggattctggtttattggcaaaagaatgtgagaagagcgaggatacaccaccggatggtggttttgccgcttggtgccaagttgtcgctgctctcttgacagccacgatctcgtggggaacgccaacggcttttggcgtctttgagctatactataccgagacgctcaaattgccaaaatcgcaggttgcttggattggctccgtacagttcttcctcacctatggcatgtgcacattttccgggcgtctagccgatgctggctacatcaagtcgacctatgcatttggcgccttcttggtccttctcggcaccttcacaaccagtgtaggcactcagtactggcacttcttcctctcgcagggactagcggtcggatttggattgggaattatgttcatgccgccgctccaggtactcagctcgtacttcgagaaacaccgcactctcgccatgtccggcgtcgcaaccggcacaggaatcggcagtgttattctccctgccataatccaatactcgataccaaaggttgggtttggatgggctgtgcgaatctttgggttcgtagcgctgttctgtactgtcacctcattcttccttctgaagccacgtttggaaccgagaaagtctggctctttcgtagagtggaatgcgtttcaggaactgccgtatctgctatattcaattggcgtcttcctcctctatttggcacttttcttcggttctttctatatcaattcgttcgcgcgcaatgttatcgggctctcgagtactacatcggtgcaagtccttctgattcaaaatggtgttagtataccatttcgaccactcgtaggatatatcgcgaattatcatgttggtccgatgaacgtgtatatcgtgacatctgttctgtttagcgtcgtcacttttgcatggattggcgtaaacgatcggagtggtctgtatgcatacgccgtattccttggtataacgaatggcgtttgtcaaggcatgttccttggctcccttgcttccttgaccgacgacaaccaaaaaatgggaattcgtgtaggaatggtgcacactatcgtagccttcgcaacgttggcaggaccacctattgcgggtgcgatcattgataaagacggcgggcgttatctaaatgcgcaaatatacgcgggtattgttattcttgtcgcttcgggattcttcattggtgcgagatgcgcaaagacaggaccacgtctgaaagtaaaggtttgacaagattcgctgaccgagcgaatcgtacatactctcagcggaaaaggtttgcatgtgttctactgagacggaaacttaggggcgttcgatatatccaataacttgagaagaggtggtgccggctcagccgaggcaaataagataccagttagcattaagaggccttgattacttattctacctatgccgcgaatggcgccatacacaataacatcagcaatttcctttcaaccacgtgtcatgcagactcaagctgaaagtcatcattccatgcgcctgtcagaccgacttcatgcaaccgttgccctactgaatcctcatctagagccggagatattcgtttctgcgagtaagatctgccgcgctcttgtttgccgttgagatgggtcaaacttcgaagaaccatagacgagcgagaaagaggtgtagaattgaagaaacatatcccacataccccactaatagcattgattcagataaccgtgcgctggatatcaagcataccggagatgtaaaagttggagtagagattggaactttccatttttagcgcggcttagttatacctctccactgggtctcaatctgcgtgaaacacaacatcatccagagcctcgtaggaatggagaatttgaaagcaatcgcccaccaccatcagctccggctcatccctcacggcgcgccaaaatgctttgcctcaataatcccaatagtaagttccaacacagttaacaatatcaatagtaacgccgagtacctcgatttctatatctcttcctttgccttcccaatacctattgctcagctcatctgatggcactccaacattcgcccttttatatgaaaccctcacatctaagcacttgtccgagggccgaaatcaacattcaactctatgttccgtgatgaagacctacacccttctcaatgcatccgggcaaccatataaatcccaaattcccggcacgctcggcggttatcgtccacttaagatatacggtcgtcttgcatgcccgagcgccgcccgctggctcgcgaagggcttctatgccaatcatcgcgtattctttcccgacgagtctacggccattcgcgcggggtaccgtccctgcgcaaggtgcctaccggagaaatacaaagagtggaagaagtctgaaatcgaacgcaagcgaccgcgcgcgaaaagaataacaagcacgaaaaaaatcgaagtaaaggaattgcagatttgaggtagacattgataaatcgcgtgggcgcgtggattcgtcgggagtgggtattcggagttatctggtcacgtcatgttcatccctgtcagatcttgtcaaggcatcgtcgatcatgagcctagttacgatagcccgtgccactgccatgacttcctctccacgagatcttccctattgtattgtgtaatgtagcgataaaaagaatacgatggagtcgttcagaaactcttggagggcaaggtatgattgtggcgtgtgactcaaggggattttctgctctaggttttgagccactcaacatgggatcacagcttcggagttttgacttgcgttttcagagcttcatgcttatatgcgcgacggattaactatgtaattcctaggatctaacgcaagacgtttacatacaagtagtgtagtaagtacattctatactctgtcaattgatagattgtgaagcatctctatctaggaggctagagctagaatagttactcattcatcgtatcttacactaaaacattgagtggttcgcctcactcccctctttgcttcatcttctcgctgaggtctgccaacaggccttcatttagcgccttttccattcaaaatgataacaatgcttagtgaaatgactaaagaactagttccgcgtccagagctatcgtggaacgaaagaaattggggcaaagtgcttctcagcctaatcaaatgtaaactgtctagtcgctcaaacgccaagacaggaagactgaaaatagtcttgtccgccatgactacctatgcaggcatgcaattattcagctgaattgtcaacacgatgcttcttcataacatgacggagcaggttgtctcgtcttccttcatatgtgcacccagtcgctgaacacgcctctttctcacttggtatgttgtgttctgctgcaaagtcggcgtgtttggaccatgtgtgtctattgaggtctcgtctcgacgcatactttttattcgatgcaaactgggcgttgcatatttcacagtggtgttttctagaacgaccaaatggggtgtatctggggtagtgtcaaagatgctattgcatgccgtattgttgccacagc

SEQ ID NO: 27065 - DNA, 1731 bp, Muscodor strobelii
  misc_feature: SGI cDNA ID NO. 569265
  misc_feature: Elevated expression when VOC is produced
  misc_feature: Encodes the peptide sequence at SEQ ID NO 27066
atgtcttcaccatcagagaagaaggccaaagacgtctcggaagagaccaacaaaattcagacaaccaatgaagacacaacctcgcaactcaactcatccgacaaagcgacaagctcacaaacaccaccgacttacaccgaaagccattctcacactacaccaccagcttcatccccacaaccgcctcgatacaatatacgctcaccacagtggctcgtcactagtaacgtccactcaagtcaaatagaacaagtcatatctcaaattattcacgacatcactcaagatggatatatcctcccaattaccgcttacccaccacaaccatcctcgcctagcgacccaacacactccccagttctgcgaaaccgtcgcgaaaccataaactcattcttcgacgcgataagagtccagaacacaaatatgataaccctctacataacacacaacatctgcacaccaaacaccccaaacttcgccggctcaacacccctcctagtcgcagtaaactatggcgatctcaatgtcatccgtcttcttatgtctcacggcgcagacgtaaacctcttcggcacatccccagatccgccaccaacacattactatcatgccaaacgtatcccaaatccatcccgaacaccgctccaactagccgcctcgcaaggaaagctctccatcgtaaaactcctcatggaatcctaccacgcagacgactccctaatagcaccagacggacaactcgctctccgtctcgcatcatcaaacgggcaccatgagatagtgtcctacctgccctctcggcgcggtggtgggttcaaacgctggaagaccaaacactccatcgccatgcgccgcatctcccgctccttgcaaaacataaaacacttcacactcttcttcgtctacaaaatccccaaagccctgctttacacagtacccaaagaactaatcgtcctccccttgatgaaatgctgtaaatacatctatacccatcgggccgaactcccagctctcttcctagaatccctaagaaaactcggaaacatcttactgcaggtcccaaaagccctgctctacacagtacccaaggaattcctcgtcatccccttggtgaaactgtgtaaatacatacatacgcatcgcgccgaactcccatctctcatcctcaattcactgaaggaattcggcaactacctactagaaatctctaaatcaatctacaaattcctcgccaaactctcagaacaactctggtctttcacaaaatggttatcaaaaaccctcaaacacttcataaaatccatacccgccgtccttaaaatcttcggaaaatggctatgggccggcgttcagaaactcggaacatcaatatcccacataatcaatcgctttttctcattcctgcacacactaatcacagcgctctcgacattcttccgcaatctaacactagccgacatttggaccggcttcttggcattcgcacgcgccgttatcgtcgacggaccaaagttactttggaagtggctaagtcacttcgcagtcgtatcagaagagatttttgaaaagatactaggagatctaggatggctcatctggctattgctgatgtgcatttggtggtgtatcatctacatacccaagaaaatctgggcgataatagctagtatgggctcttcggccggtacaggacttcacgagatcttgatctggtttgacccaaagcggtaa

SEQ ID NO: 27066 - protein, 576 aa, Muscodor strobelii
  misc_feature: SGI Peptide ID NO. 569265
  misc_feature (160)..(192): Pfam Id: PF00023 Pfam Desc: Ankyrin repeat
  misc_feature (43)..(575): NCBI GI: 225559443 Blast Desc: conserved [Ajellomyces capsulatus G186AR]
  misc_feature (110)..(576): NCBI GI: 256724869 Blast Desc: NECHADRAFT_77006 [Nectria haematococca mpVI 77-13-4]
  misc_feature (131)..(575): NCBI GI: 261190212 Blast Desc: conserved [Ajellomyces dermatitidis SLH14081] gi|239591344|gb|EEQ73925.1| conserved [Ajellomyces dermatitidis SLH14081] gi|239606404|gb|EEQ83391.1| conserved [Ajellomyces
  misc_feature (103)..(575): NCBI GI: 171684717 Blast Desc: protein product [Podospora anserina] gi|170942319|emb|CAP67971.1| protein product [Podospora anserina]
  misc_feature (126)..(576): NCBI GI: 46110635 Blast Desc: FG02199.1 [Gibberella zeae PH-1]
  misc_feature (128)..(575): NCBI GI: 226281558 Blast Desc: conserved [Paracoccidioides brasiliensis Pb01]
  misc_feature (56)..(526): NCBI GI: 85116573 Blast Desc: NCU02486 [Neurospora crassa OR74A] gi|28926882|gb|EAA35844.1| [Neurospora crassa OR74A] gi|38567104|emb|CAE76400.1| [Neurospora crassa]
  misc_feature (128)..(575): NCBI GI: 225678899 Blast Desc: conserved [Paracoccidioides brasiliensis Pb03]
  misc_feature (128)..(535): NCBI GI: 226293739 Blast Desc: conserved [Paracoccidioides brasiliensis Pb18]
  misc_feature (131)..(445): NCBI GI: 240272857 Blast Desc: conserved [Ajellomyces capsulatus H143]
  misc_feature: Useful for introducing or modulating the production of volatile compounds
MSSPSEKKAKDVSEETNKIQTTNEDTTSQLNSSDKATSSQTPPTYTESHSHTTPPASSPQPPRYNIRSPQWLVTSNVHSSQIEQVISQIIHDITQDGYILPITAYPPQPSSPSDPTHSPVLRNRRETINSFFDAIRVQNTNMITLYITHNICTPNTPNFAGSTPLLVAVNYGDLNVIRLLMSHGADVNLFGTSPDPPPTHYYHAKRIPNPSRTPLQLAASQGKLSIVKLLMESYHADDSLIAPDGQLALRLASSNGHHEIVSYLPSRRGGGFKRWKTKHSIAMRRISRSLQNIKHFTLFFVYKIPKALLYTVPKELIVLPLMKCCKYIYTHRAELPALFLESLRKLGNILLQVPKALLYTVPKEFLVIPLVKLCKYIHTHRAELPSLILNSLKEFGNYLLEISKSIYKFLAKLSEQLWSFTKWLSKTLKHFIKSIPAVLKIFGKWLWAGVQKLGTSISHIINRFFSFLHTLITALSTFFRNLTLADIWTGFLAFARAVIVDGPKLLWKWLSHFAVVSEEIFEKILGDLGWLIWLLLMCIWWCIIYIPKKIWAIIASMGSSAGTGLHEILIWFDPKR

SEQ ID NO: 27067 - DNA, 19643 bp, Muscodor strobelii
  misc_feature: SGI EST ID NO. CUFF.65010.0
  misc_feature: Variant of the nucleotide sequence at SEQ ID NO 27065
cagtgaatgagcacgagccgcgctcgccagataaaagacaattgagatacaccccatttggtcgttctagaaaacaccactgtgaaatatgcaacgcccagtttgcatcgaataaaaagtatgcgtcgagacgagacctcaatagacacacatggtccaaacacgccgactttgcagcagaacacaacataccaagtgagaaagaggcgtgttcagcgactgggtgcacatatgaaggaagacgagacaacctgctccgtcatgttatgaagaagcatcgtgttgacaattcagctgaataattgcatgcctgcataggtagtcatggcggacaagactattttcagtcttcctgtcttggcgtttgagcgactagacagtttacatttgattaggctgagaagcactttgccccaatttctttcgttccacgatagctctggacgcggaactagttctttagtcatttcactaagcattgttatcattttgaatggaaaaggcgctaaatgaaggcctgttggcagacctcagcgagaagatgaagcaaagaggggagtgaggcgaaccactcaatgttttagtgtaagatacgatgaatgagtaactattctagctctagcctcctagatagagatgcttcacaatctatcaattgacagagtatagaatgtacttactacactacttgtatgtaaacgtcttgcgttagatcctaggaattacatagttaatccgtcgcgcatataagcatgaagctctgaaaacgcaagtcaaaactccgaagctgtgatcccatgttgagtggctcaaaacctagagcagaaaatccccttgagtcacacgccacaatcataccttgccctccaagagtttctgaacgactccatcgtattctttttatcgctacattacacaatacaatagggaagatctcgtggagaggaagtcatggcagtggcacgggctatcgtaactaggctcatgatcgacgatgccttgacaagatctgacagggatgaacatgacgtgaccagataactccgaatacccactcccgacgaatccacgcgcccacgcgatttatcaatgtctacctcaaatctgcaattcctttacttcgatttttttcgtgcttgttattcttttcgcgcgcggtcgcttgcgttcgatttcagacttcttccactctttgtatttctccggtaggcaccttgcgcagggacggtaccccgcgcgaatggccgtagactcgtcgggaaagaatacgcgatgattggcatagaagcccttcgcgagccagcgggcggcgctcgggcatgcaagacgaccgtatatcttaagtggacgataaccgccgagcgtgccgggaatttgggatttatatggttgcccggatgcattgagaagggtgtaggtcttcatcacggaacatagagttgaatgttgatttcggccctcggacaagtgcttagatgtgagggtttcatataaaagggcgaatgttggagtgccatcagatgagctgagcaataggtattgggaaggcaaaggaagagatatagaaatcgaggtactcggcgttactattgatattgttaactgtgttggaacttactattgggattattgaggcaaagcattttggcgcgccgtgagggatgagccggagctgatggtggtgggcgattgctttcaaattctccattcctacgaggctctggatgatgttgtgtttcacgcagattgagacccagtggagaggtataactaagccgcgctaaaaatggaaagttccaatctctactccaacttttacatctccggtatgcttgatatccagcgcacggttatctgaatcaatgctattagtggggtatgtgggatatgtttcttcaattctacacctctttctcgctcgtctatggttcttcgaagtttgacccatctcaacggcaaacaagagcgcggcagatcttactcgcagaaacgaatatctccggctctagatgaggattcagtagggcaacggttgcatgaagtcggtctgacaggcgcatggaatgatgactttcagcttgagtctgcatgacacgtggttgaaaggaaattgctgatgttattgtgtatggcgccattcgcggcataggtagaataagtaatcaaggcctcttaatgctaactggtatcttatttgcctcggctgagccggcaccacctcttctcaagttattggatatatcgaacgcccctaagtttccgtctcagtagaacacatgcaaaccttttccgctgagagtatgtacgattcgctcggtcagcgaatcttgtcaaacctttactttcagacgtggtcctgtctttgcgcatctcgcaccaatgaagaatcccgaagcgacaagaataacaatacccgcgtatatttgcgcatttagataacgcccgccgtctttatcaatgatcgcacccgcaatcttcgacgacaagtcagcttgcaatgccccatatattgtaataaacgaaactcgtcgacatgaaacaacacttacaggtggtcctgccaacgttgcgaaggctacgatagtgtgcaccattcctacacgaattcccattttttggttgtcgtcggtcaaggaagcaagggagccaaggaacatgccttgacaaacgccattcgttataccaaggaatacggcgtatgcatacagaccactccgatcgtttacgccaatccatgcaaaagtgacgacgctaaacagaacagatgtcacgatatacacgttcatcggaccaacatgataattcgcgatatatcctacgagtggtcgaaatggtatactaacaccattttgaatcagaaggacttgcaccgatgtagtactcgagagcccgataacattgcgcgcgaacgaattgatctacatatcgtcagtaactcgtaaagaaaaggaagaatctcagctttcatcagacccggcgatcgagacttacatagaaagaaccgaagaaaagtgccaaatagaggaggaagacgccaattgaatatagcagatacggcagttcctgaaacgcattccactctacgaaagagccagactttctcggttccaaacgtggcttcagaaggaagaatgaggtgacagtacagaacagcgctacgaacccaaagattcgcacagcccatccaaacccaacctttggtatcgagtattggattatggcagggagaataacactgccgattcctgtgccggttgcgacgccggacatggcgagagtgcggtgtttctcgaagtacgagctgagtacctggagcggcggcatgaacataattcccaatccaaatccgaccgctagtccctgcgagaggaagaagtgccagtactgagtgcctacactggttgtgaaggtgccgagaaggaccaagaaggcgccaaatgcataggtcgacttgatgtagccagcatcggctagacgcccggaaaatgtgcacatgccataggtgaggaagaactgtacggagccaatccaagcaacctgcgattttggcaatttgagcgtctcggtatagtatagctcaaagacgccaaaagccgttggcgttccccacgagatcgtggctgtcaagagagcagcgacaacttggcaccaagcggcaaaaccaccatccggtggtgtatcctcgctcttctcacattcttttgccaataaaccagaatccttgggttcatgccgttccgtggtcgtttcgggcgttgtcgccgaggggttgaaatatgctaatggaggttggttgttagacgccgtatgattgccgtccaagcccgaagaagcagtcttttcaatatcggtgtctatatccattattgttcactctaaggtttggatgactattgtatttgaaatatggtctattcacggtatccacagccgaacgaaaatgaaagatgcgcaaactagcattgtcgtctcaatagccgcgatatgatgctgagtctaaatcaacgggcatcgacaagctttaaatactacgacctgccagctatggcactataggattgggtaattctcgaggagatcttgtcaaagtctaggatttgtgatcattgtcgaaatcatcgtgggacccgtcgatggttcgggatcatgtttgcccaaagcccagattattacgtacctgcttctgttggtggaggcgttgccactcccagcctgtcatttgcgcccttgtagcgaccccattgcgctggcgacagatgacgtgacaaaggcgctgaaaagagtcttcaacatttttgtctttacacgccctcttcaaatgcgccagatcgcacatttatcgtatggtgtgcagtagagaatctttagacaggcatgaaggacccgcagtctcgcaaatggtgcatcatcttgaggactggctcacgagtctctgcgagtgattgataaacttggtcgtatcgtggtatactgtctaaagaacgagaaggatgaataaaatggctctataagaacgaacaagctctttgcaattttgcattaaggtaattcgggaatcaagttaatcaagaactatgacagcatcaggtgggttaggtaacctgtgaggcctaagccgctaagaacgattccatcttattaaaccgtgcacctccagtgcaattctggaattacgatattctacgagccatcatcaacccctcaataacggaatagaagactcgtatagatatcaagaagcttcctagtcccttcatggccggcatcttgatactaaggaggtctcaaaatgcttttgtcgcttgtcgcgatcgcaaccgacatgctagtaacgccaagagaaatacgcctcacagggacgcctcgctactgcgcctccaggccaaccaaacatcagataacagaaccaagacaaccgagcccaatcagaggctactgtaactcaaggttgttagggtggtgttttgaacgtctggccctggaatgagtgtgcctaaatttcacgtgaatttcatcctcatgagattacaacaacgaagctcgatcagattgtaaatgcctcgggacccgaaattgatgatgttagatataatacattgctgtcggctctagtacaaacattgtgatatgcgaacttagcagatcagagtagcataagagtttcagcatcgaagtcgttcacctataaactgccaaaacacctattctcaagatgtcttcaccatcagagaagaaggccaaagacgtctcggaagagaccaacaaaattcagacaaccaatgaagacacaacctcgcaactcaactcatccgacaaagcgacaagctcacaaacaccaccgacttacaccgaaagccattctcacactacaccaccagcttcatccccacaaccgcctcgatacaatatacgctcaccacagtggctcgtcactagtaacgtccactcaagtcaaatagaacaagtcatatctcaaattattcacgacatcactcaagatggatatatcctcccaattaccgcttacccaccacaaccatcctcgcctagcgacccaacacactccccagttctgcgaaaccgtcgcgaaaccataaactcattcttcgacgcgataagagtccagaacacaaatatgataaccctctacataacacacaacatctgcacaccaaacaccccaaacttcgccggctcaacacccctcctagtcgcagtaaactatggcgatctcaatgtcatccgtcttcttatgtctcacggcgcagacgtaaacctcttcggcacatccccagatccgccaccaacacattactatcatgccaaacgtatcccaaatccatcccgaacaccgctccaactagccgcctcgcaaggaaagctctccatcgtaaaactcctcatggaatcctaccacgcagacgactccctaatagcaccagacggacaactcgctctccgtctcgcatcatcaaacgggcaccatgagatagtgtcctacctgccctctcggcgcggtggtgggttcaaacgctggaagaccaaacactccatcgccatgcgccgcatctcccgctccttgcaaaacataaaacacttcacactcttcttcgtctacaaaatccccaaagccctgctttacacagtacccaaagaactaatcgtcctccccttgatgaaatgctgtaaatacatctatacccatcgggccgaactcccagctctcttcctagaatccctaagaaaactcggaaacatcttactgcaggtcccaaaagccctgctctacacagtacccaaggaattcctcgtcatccccttggtgaaactgtgtaaatacatacatacgcatcgcgccgaactcccatctctcatcctcaattcactgaaggaattcggcaactacctactagaaatctctaaatcaatctacaaattcctcgccaaactctcagaacaactctggtctttcacaaaatggttatcaaaaaccctcaaacacttcataaaatccatacccgccgtccttaaaatcttcggaaaatggctatgggccggcgttcagaaactcggaacatcaatatcccacataatcaatcgctttttctcattcctgcacacactaatcacagcgctctcgacattcttccgcaatctaacactagccgacatttggaccggcttcttggcattcgcacgcgccgttatcgtcgacggaccaaagttactttggaagtggctaagtcacttcgcagtcgtatcagaagagatttttgaaaagatactaggagatctaggatggctcatctggctattgctgatgtgcatttggtggtgtatcatctacatacccaagaaaatctgggcgataatagctagtatgggctcttcggccggtacaggacttcacgagatcttgatctggtttgacccaaagcggtaatagcatttaggatgtaacattcaccaagttataggatacgaggcataattatgagcaaagacatttctttggtgctatctagagagcgtaactcaacgcagtaattatggataggtcctggtggcctccattctggttgccttttatcgtaagatactcctgcccgagatcctaaccggaactccgtttttatccgatgactgaagacaaatccgaaggccacataaacgccatgccagaacacactgtaatgccatatggtcgtcatgatgtaacgtcaactaataggtacaggtacaaaaataaagagaaacaaaagagcaaaaatccattgctccgaatctgttgattagagataaggcatccagagtgcatcacactgggctaggttcatcgggtttaccgcacgagcgacaagatcaataaccgtctggttggccggtagagtgccttggggactttgggccaagctgagagcacgtttcacgatcacgtcgcagttcgactgaacggtatcccgcagctgattttcgttgaggtggatggcgcgatggctactagtgaaccagaagatcacttcgtcccgcacaagcagcgtgagggcgtgctcaagttcgaattcgggctcagtgaggcatcgggcaatcgccataaccgaacagctgaagatgccttcggtagccaggggtcccatcaaggtttgcaagttgggcgtaagacggaacgggaccggttcgggattgtggaagaatggtttaccaggcgccatgaatgacatcaactcggagccccagatcttacccgatccgcgtgcgatgttgatcttgtgaggataacgccctgtcatgaacagaacatacgtcatgaaagtcaacgcagacagctggtacgcaagtttacgacggaaaagccagaagtccgagtattccgggaagatgctctggaaatattccaaggcaattgtatgcgacacccatttctcttggatggcagtgaacacctcaagtcgggctgttgcggtctcttgagcttgcttctgtagattgtcgttagcttgtgatataacgggcaattctttctcttgtacactcacggttgccttaggctccatcagacctctcaatttgtccattgtgaacatgaccgggtcgtccttggtcatcccgttgcgtctgcagtgatcttcgtagatgccctgtagagtgacgtatgaggtatcttcttgcacaattctaatgtgcggtgcaagaggtatcattaacggaacggtgaattgaagatcgcgccgacgactttccttctttttggctagcgtttgattgagctgtcggaagagctgtagaattctctcctcgcgtcggcagtgtctggcagccggatgttgtatcgcaaaagcatggacgctgccatcatggccgcgtatcttgagtcgacgatgagacacgccaattgccctgacgaggtccacgttgggcaggaatcgatcgattcgaatgaagtcttggttcttatccttgtgctgcaagtactgtcctgggacctcgacctcgtcgaatttgaggtaacggaactcgctgaggtgacgagagtatgactctagattagcatttgagctcctgcggtcgagcttttcttcaaacttgtcgcgccatttgcgaagcttgtggatgtattcatacatcgttggcttgacagtaacgaaatctgcttcaaaggactttttgatatgcgccgggagaatagtctcagcgaatcttgttatgtttgtctcggtagcattcggcagtttcacatctttggcatatgatgcgggcatacgactaacataagccaatccgtcattgagcaaggcaactatgagtcgataagcatcctcgtccggagggcatttgaaatacttttgtatctgatcgaccattgtctccatagacaatgcaagaagggggaaagcagtcttgagaaccgacatgatctcttcagtaagctcccaaggaggcttcttttggccggtggtggatgcagtggtatccttagcaggctgctgctcggcatttgcagcaggggttgttgcattggcggcagcaggaggatttgcagatgcagatgcttcagctggttctgttttggtctggacggcagtgtctccgtttgacgtctggggccgcgaagacgcttcagactttggttgaggattctcttgtttcgactgggacggggaactggagggctttctagcagcggcagcagattgagcgcgctgccgagccttctctttagcctcttgattcttcttaatcatcaacatatcctcacggttcgttcgaagttggaaatagagagattggggataagcctttgcaatcttgagtaaaatgccgtgtactttgggtgcctccttatggcccaagcctgtgagcagttgtggtatgaaggtgatccagtaccagacaggtgtctcccctttgtagtcatcgaagccggctgcgattgttccgttggcatcgtctaggctgagcaaccacagaattcgggcgatcaacttccgagcctttccgctcttgtaactaccaatagcttgaaggtaggaggttgtagcttgacgggccgagcccgtatcagatggatcagccttgaatttgcggtcattgaaatacccccattcagcccatgccttagccttggtgatgtcgtaatacaacgctgtgccataagctccatcggcatctgcattttgtcctagcttctcgaggaacatgcctttcagagtgtagaattccgccttctgctgagcgttgaagtaattaaggttagtattattaatcacgtccaatccgttcgtcagttcatcggggttttcatagtgacatctcgcctgctctctcagcttaaggaacgcctcctgaatttctatgttaggaagggtatatatgcggctgagttggctgacgcagacgtcgggaaggctgtgctttcgcgctacatgagcaaagcggttgataatccacgcagtctcgtggtagccacggtatgcaaacgagttgccattcgcgttctgccccgattggggtagcagctgtaaatatgtgttgtttatcaagccgaaaatatgttgccgccaggtcaccaaatcttgccagtctgtgatatcatcccaagtattaggtagacgatctctccaggcacccaagagcagcttcagctctccagacttgacatctaaattagcctggttagtgccagccagactctggcagatgacactcgcatcgtgaagttccacgagctgctggaagttgtgaagcatggggatgtgagccgcggtaagcctccgggggagttggtgccatttgcgaatcgatagttgtattgcttcatcgcaaactcgagaaaactcaggcatattctcttgcttgttgtgaaacttaaggagagacatgaatccttggaaaaaggctcgtcgagaggtaggagcatccatgacacccttgatgagcatatctaaactgtcgcgatgttcttggttctgccacatctcgatgtttctccaagcgcactcaagcagaagatcttgtagattctcgtgcttggcgaagtcctgcagaatctcccattgctggagtttttgtgcgcaaagaacccaatggtcctcccagagcatgtactcgccctgcgaaaatggaatgacacctgttcgagcctttatttgagcagcctcgtacatcttctgagctttatcccacattccgctctgttcgtatgagagtgcagcattggtttcgacatatccacaccgtcggcgccacgtcccgtagaacagatcatcctccttcaggctagagtataagtgcaacagcgcatctgtattactttcacgaaccttggcggaatcgatctctggcttgatagcagccttctccagttgcaccattgcagtgtaccaagcatcgtaagtcgatgcacaatacttcataatgtgtggaggaatcctacactctggccaagacttggctgcgcctgtagtcaaagtttgcactacatttggtcttttatccaactggcgagaatggaagtccttagtgaggagttcaaccaaagccttctcgatctcactcttttcttcgcgcaccgtcgcagcccagaacattgggaacaaggccacccagagttcgtgtgacagggtgctgtcgacgtgctgaagctgggaaataggctctatcacatcccgtagcttgacctcgctgagttcgttgacaaatcttcggtgatttgccatgaaagtgtcatacttatcatcagccatgagtgtcggttctcgactgtctttagcatatgcgccaaatacgagcgaggcaggaagcgttcggaagtcttcttgatgaaggtgaatattcgaattcatttccacggcaccaaggagtagttgagtggcttgcgcgatccagaacgaatcggcaagtgtgtcccagttctgtactttgatgacataatacaagcgagcggttgcagtctttgagagactcttgtcgaatatagccatgaatcggttccgcatctcaacgtcttgagcacgtgttccgattaagaaggcgtgctccatgcgaactgtgagttcagtcctggttattttcgggtcttcgtagatacggatgaccaggtcaaggaacttggtcaacattgtcgggtcagtgcgatgctcgaaacagagcatcttatgcaggacggcagtcttctccttcagagttggccatgtaccttctgcccgaaacacccagccctcgaccatctcgagaattttctcacagagtgtattatcctgtgatttctcgacgagcgtggccagtacactaaggaatggtctacggttatcagcaagcgtctccattcgcatggatgttacttcaatggccttgatcatgagctccgtctgtatcttgagatcataaggcgtcagctctccagcttgcgcatttggatcttgaggacggattgcattagatggaagctgagtggacgacacactggtccagtgctgaacatgttctctggccagtttcgtttgcaatgctttcataagtgccggaatgtgctgatcaatgattgtaggtcgacgacgactcagcgaccacaaggtactgaccccagcgccgtattgagcattagccatagtctctgtggctagagtagaaaggaaagtaatgatctcggaggtgggcgtttccgcctccgcttcaccatcggcgtcttccattgggacgtcttcaggtacagcatcaagaattcgctggactgtagacttgatatcacgcccgccatcgaattctttgtcggcgaaatgcaaacaatcttgaatttctggaatctctgatttcaatgatttctcgagaactttctgcactgatgtcatacttctcaatatccattcgtcggtcttgaaattgagaatgatgcgcacaacctgtagagtgttgatgatattcgtgatgaatttctcgtcatagttgtccttgtcggaggggtcagcattgacgatcttagcagttttctcactggccaagaccacatcagtgatggtcggaaacaagtcaacgtccaaatcgccccaacattgaggttggagcaagttgtacaatagagataacgccttcatgcacagctctgtagacaagggcggcaaagtagggcccggacttgatgtggtatctctcggctttgcagaaggcagtttgtatctctcgttcaattgagcaatgaattcgatcagatacttaatcatcttcaaccggaagccttgagggatctgaaattctgctctttcgacctgtgatgtttgccgagctgacggaggggacgaagttgacacatctccatctaatctgcgcctcttcgagtttggtgattctgacaaggctcttgtaggaacggtagatttcccttccagacgtcgcttctcccatagccagattagccacatcatattcaacgcaagcttcttgttctcattcgaagacgtttgaggtgcagacactttccgaagggaggtgatgataagaagtgcaaatttgtctctagactcataaaacaaatcaggatggcgaacaaggaaatggaatatgctagtcatttgctgagcgttttgaccctcctcggccaggattcgccgtggtgccattgcccaaacggcattgcgatcaccaggaacagtattgcatcgctttgggagcactggggccattagttctagggcttgagtgacaagcgctcgtccttcattctgattcgttctcaagagagaatagtagacttgagttacaattttcgcaggagtctcataatgcgcgatgaagtatgcaatgacgacgtaagcagcatgcttgttaatgacatcgtccaaacgaatgtaagtccagccgaacttaatgatatcttttctcgcatcttgcagaatcgcgtggtggtatttgacgagcattgccgatagttgtagcacttccatgcgtgtatggtcaatacctggttgtgcaagatcctcttgggggtctgcgaggttgactttccagattttcacattaatcgattcgatcactgacttatccatgagtctttgtgcttttggggcattggacggattccagtgcctaatgacgtccatggcaactataggattgacgatgtagcgaagaagaaaccacttcgtcttctggctgacattcttgctagcataaaggtcgagacagcgcatgatgatggacttccaatagtcgatagactgactagagaccacctcattgtagaggaatgcgaagacagaagatgtggcgcgtagctcatctgaggtaatggactcgatcaggctgaagaggggatcaaggtctttaggttttagcgtaagggctttggtaaatatgctcattagttgctcggctgcttgatcggcaggtagacgtaagtttgcgggcaaatcgttgagccgaagacgacgttccagatcttttccgatttgtttgagtaggctcatcgtctccttccgatccatccagtctcgggcatcttcgtatccactgagggaatcaaggatattgattgtgccaatggcaacgacaaatctggaatctttggtttcgttccaaatttggttacacttggacatgaaaggctccaaattggcggcggcatgatcgcgtagtggtttgctctcagggtttgcaagaacctgagcaaggaacctaccatacttgatgtcttccagcttgcccgtcagaaactcccagacctcgcttggataacggttcaagaacttgtaaagcggaggtcggaaagggctatgatgcgtgcgtcgtaacttttcctccagatcgaggcacgtatcaataagtctctctttaaactgctctgcggctgggggcagcagatggaagatgttgaaaactgcggcaatcaccttcatctgactgttctgctcgaagaaggtgaacgaaatctgctgaaggaaatttggttcggcgagaatcttgatgtgatcaagtagacgtgctccgatctcgactttgaagtacgttgtaagtaatcttagaagtctcgcaaggttgtccagtccatgtgtgcttaaccgtttcgggtcctggagattagccaagactggcctcaggccttgctgtaacaggtccttgggcaacttagttgtctgggataagactgccttgatggactgattggctgcctcgatcgtcggttttgattccgaatacagacatttgaagaagacagacactattttggtgcgcgttgggttgttctggcccttctgaaattcttcaaagcccatagccttgcttaatatcttgatacaggccactcttaggttgacgattgactcatgggtacgaaattcggcgtgtttaccagccagggattcatcagaagcgtcagcaagagctagagactccatgagcagtcggttgaggtcaacatcaaaagagacaaaatcgttcttcaatcccatgtagtaagcgatcgcgtctatatatccaatctgagttgcaaacggcagagctcgcagtggctttgcatagattggcgagaggagacgatctttgtgaggctcaactagttcccatatttcagactgggtggtgttggcaatatactcaagagaccgccgggcggtggctcgaacatgcttgttcatatgagacaactcgtcgttgaagatcatgcatatttgcgcaagcctggaaggtttcggtggcgattgcccttgctgcgcaggagctggcagagcatcttccttttttgcattttttgtggtgcgccgtaataatgcttcgagggcgacttgagcagagctgcgcgttttttcgggaagatcttgaggcatgtccttgataacgtacatgagggctcgaatgaactccatctgcttagaaattatccatatgtctccaagctcaatttcatcaagaagatacttgatgcccagtgtaccgccagccttggtataccactcttcctcgaagcatgcatgacagaaagttttactcaggtggttgaaaaagctcaagcggccgacttgagcctggccaccaaagattgtggccgtggagtcatacacggctcggacagcgcgaaaagccgcgtctctgacctcgggaagttctgaggccagcgactcaaggatggcatcagcaaggaccctcgtatcgacgaataaggggccttcgcccgcttgagggtcaaatggacttagctcctttttcacatcgactagtgcgcgtccaatctcgacgattgtgaaatgccgcgccaagttcataaggaagacgtcggcctcttgtcgaaactcagggatggattccgcatacatgatggccttgatgagccgtttcatgatgagatcttcctcatccttcttcacaaccgatcgctccttgttgagcgcgtcaaatgctgcgaaatcggcattcggtttccttgccagcaggtcctgagcttgaagacgtacaagacgagggagatcatcaggtaggtggtcgacgccgatacgcaatttgacttgagctttaataaactgtagcgcttgcttcttgtagtatccatcctgctgctttgcggtattcactttggacggcttgggcacttccatgagtttgcggatggcaaagtcaataccaagagaggctgggaaggctctgtctttcttggagccaatgagacggacgtcgaaactggctggatcatcagcgtagcgttggtagttgaccggtagtgtttccgacatgaacttccggtttctaccaccaagtttgcccaggatgcgcatggtggtatgggcatggaaatgagagtaaggatgaggtttcaaatgctcaaaaagtgcattcatcagctcctcaatgaccggtgccataatgggatccaagtagtcagcagtaaggttgtcaacacacaactcgagagttcgaaggccctgaccaaccagctctgtgcccgctcgaagtgcgacgacaagtggtctcatcaaaaagctcaaatgcgggagcaggttgctcagacgcgctggtacagtgaggcacagctcgacgtacagatcccgttccgctggtttccgagcggccatgagcaagttgtttaatacgtcgagtatcatctcgagcaaaggtaggatctgcttgtagagatgttcaaacttgcctccgccgatgcttctaaatagagatcgaagcagtaagaagtagttcatcggttcctctgctttcgttgacagatcgatagacttcgtaacgatatcaactacgtgggggagaagaacttgctcgttctgagtggcaaacaatgtgacggccatgaacgcgagtttgaagagacgcaacaagatactagctttcttcacatcagcagaacccacttcgtctatcctttccatgagaaacttgagtatcatgccacaaaaactcggggatgtcgcctcactagcgaggaaaaattgcggtatgtgcaagagggccgtgtgttcgaatatcatctcgtagagtcgcggtatctcctgctggaagacctcatgaaatgtagcagggtctatgcagtggaataccgtcgcaaaagtttccaggagttctttttcctctttgctagaagacaccatataaaagttcgccatatactccaccgtggatgcaaattgaccttccgcagcgggtttttcgatctcgtagtaacggaaaacataggcgccttcacggagaagtttgacgacgaccttgacttcctcggctgtgaacccatatgagacatcctgccaatgtgccggagcattatgggagtcgacgacagatgccgtgttgcaagctttcagctgatagaaagtgtttttgagcccattcatcagatttttaaaaagaaatttgttgtcagccactgggtcggcgttccgctcacgcgggttagaagtttttattggcattgctgtgaagatgtcaatttcatcccactcgggagggtgctccttgtctgccaggtatgtctcgcgcccctcggcattttgttgcgcatacagcttggacagcttgactgcattcggatactgtctgttcatagctgcaaacttgtctccaatggcattgagaatcatgagaaggtaatgtcgggcatcgaccttgttcggcatcttggcgatgcactcagccatgtttaatagtaacttggcgctcatagtctgaaagctggtgccggggaaattatcctgcagattctttgtgtagacctcgacagtctttcgaatctgttcgggtgatagcgattcacgaacgtgatggatcagatcagcgagcatgctgtaagcaagtggccgcatcgtgtcatagaccgttaaaccatcaccgatcaaagtcttttcctccagaagctcatcgatcttgggaagaaatatctttcggaaattaaagttaattatgtggcgaatggcaacaagcagctctttccgcgccgctgatttctctctgggacagtctttgagcaaacgaacgacgatctcgggtagtgtaggtaggaaatctgccagttggctggagtattgacgaagcaagtacgcaagaaagctcatagttttgacctgcgcggtgatgaattcgccgaaagctgcgcggttcttgatgctgggactaactccggtgaagatggtgcccttcgccttggcctcattgtgcgcctgttcctgtgccttcgcttgcaggcacaacaccgtcttgatgagaggaacaaacgccttcacattggactggataatgttgcggtacgtctggaaaatcgagacgacaataatggggcactcagacacgactttgaaagactgcattcccttcagcaacggacggctctgctgctgcaagtcttggcccaagtcggtgacagaagcgaccggagagcccggccgcggggactggaaattggtctgggtgcttccgggggtcgacggcggccctgggacaccgggttggagggcagtactgtcgagctgctccctaacgaccttttccagctgctcgaacagctcctgtatcagcgtaaggaagggctggaccttatcagccaggaccttgggctggtggcgcatgatgtcggatatgatcttgatgcatagctgggcgttgtcttcgttgtcctggcgcacgagggtcatcaacaagtcgacgacctccttggcatactgctcgaagggctcggtgggggtctggttctggttggttgggaggcggtggaggatctcgaggatgcagtggcggagcttctgctcgggcgagttgctctggaagatgcatgatccgcgcagggtgttgacgattaagggcatgacccgggagaggaagtgggtgtaaatggggccatttgtgtagtggtcaaggctatcgcgcagcgtcgtcgcggcctcgagcttggtcttggattctgcgtgggcagatggagcttgtcagcaatgtaggtcgcaatcagatagatcatccacggcggtaatagccaaagggcagagggaaagagagagaaacgctcttaccagtttcctgaacagtcaatttcttgacgatgtcttcaagctgggctgccgacatgattgcggctccgcagaagcgacgagttggggtttataccacattcaacgcattcgggagcgccatcaacgaggagatgggtgatgagtgataggtagaatgggtagagtcgagagaagcgagagagtcgaggcggaagctgatgactcgaagccaatgaagcttatttgcggcgggggtaaggccgatgaatacctaagtaccctaggtagcttagtttctcgtctttgaatcctccttcaatacgacagctgtgcaagacaggtgtgaaaggtgtctatcttgctcagtataatagttagttgcactttgagtccacggatgtgttgcgagctcgggtcgttgcgcgatggtggagggggggaatggtaatgcacagcaggatccaaccacaacgtagagaatggaagttcaggtcgaattgaggggtatcatcaaagtacagcggaaaagtggtggtgaggtaggaaagaagaaacgaggctgtggacaatgtggtgccttccgaagatgctgtcgcattggcgaaaaagcttcccactacagcactttgcagcactttgcagcaccacacgcgataccacgggcctgggtgcaccact

SEQ ID NO: 27068 - DNA, 11586 bp, Muscodor strobelii
  misc_feature: SGI cDNA ID NO. 569266
  misc_feature: Encodes the peptide sequence at SEQ ID NO 27069
atgtcggcagcccagcttgaagacatcgtcaagaaattgactgttcaggaaactgaatccaagaccaagctcgaggccgcgacgacgctgcgcgatagccttgaccactacacaaatggccccatttacacccacttcctctcccgggtcatgcccttaatcgtcaacaccctgcgcggatcatgcatcttccagagcaactcgcccgagcagaagctccgccactgcatcctcgagatcctccaccgcctcccaaccaaccagaaccagacccccaccgagcccttcgagcagtatgccaaggaggtcgtcgacttgttgatgaccctcgtgcgccaggacaacgaagacaacgcccagctatgcatcaagatcatatccgacatcatgcgccaccagcccaaggtcctggctgataaggtccagcccttccttacgctgatacaggagctgttcgagcagctggaaaaggtcgttagggagcagctcgacagtactgccctccaacccggtgtcccagggccgccgtcgacccccggaagcacccagaccaatttccagtccccgcggccgggctctccggtcgcttctgtcaccgacttgggccaagacttgcagcagcagagccgtccgttgctgaagggaatgcagtctttcaaagtcgtgtctgagtgccccattattgtcgtctcgattttccagacgtaccgcaacattatccagtccaatgtgaaggcgtttgttcctctcatcaagacggtgttgtgcctgcaagcgaaggcacaggaacaggcgcacaatgaggccaaggcgaagggcaccatcttcaccggagttagtcccagcatcaagaaccgcgcagctttcggcgaattcatcaccgcgcaggtcaaaactatgagctttcttgcgtacttgcttcgtcaatactccagccaactggcagatttcctacctacactacccgagatcgtcgttcgtttgctcaaagactgtcccagagagaaatcagcggcgcggaaagagctgcttgttgccattcgccacataattaactttaatttccgaaagatatttcttcccaagatcgatgagcttctggaggaaaagactttgatcggtgatggtttaacggtctatgacacgatgcggccacttgcttacagcatgctcgctgatctgatccatcacgttcgtgaatcgctatcacccgaacagattcgaaagactgtcgaggtctacacaaagaatctgcaggataatttccccggcaccagctttcagactatgagcgccaagttactattaaacatggctgagtgcatcgccaagatgccgaacaaggtcgatgcccgacattaccttctcatgattctcaatgccattggagacaagtttgcagctatgaacagacagtatccgaatgcagtcaagctgtccaagctgtatgcgcaacaaaatgccgaggggcgcgagacatacctggcagacaaggagcaccctcccgagtgggatgaaattgacatcttcacagcaatgccaataaaaacttctaacccgcgtgagcggaacgccgacccagtggctgacaacaaatttctttttaaaaatctgatgaatgggctcaaaaacactttctatcagctgaaagcttgcaacacggcatctgtcgtcgactcccataatgctccggcacattggcaggatgtctcatatgggttcacagccgaggaagtcaaggtcgtcgtcaaacttctccgtgaaggcgcctatgttttccgttactacgagatcgaaaaacccgctgcggaaggtcaatttgcatccacggtggagtatatggcgaacttttatatggtgtcttctagcaaagaggaaaaagaactcctggaaacttttgcgacggtattccactgcatagaccctgctacatttcatgaggtcttccagcaggagataccgcgactctacgagatgatattcgaacacacggccctcttgcacataccgcaatttttcctcgctagtgaggcgacatccccgagtttttgtggcatgatactcaagtttctcatggaaaggatagacgaagtgggttctgctgatgtgaagaaagctagtatcttgttgcgtctcttcaaactcgcgttcatggccgtcacattgtttgccactcagaacgagcaagttcttctcccccacgtagttgatatcgttacgaagtctatcgatctgtcaacgaaagcagaggaaccgatgaactacttcttactgcttcgatctctatttagaagcatcggcggaggcaagtttgaacatctctacaagcagatcctacctttgctcgagatgatactcgacgtattaaacaacttgctcatggccgctcggaaaccagcggaacgggatctgtacgtcgagctgtgcctcactgtaccagcgcgtctgagcaacctgctcccgcatttgagctttttgatgagaccacttgtcgtcgcacttcgagcgggcacagagctggttggtcagggccttcgaactctcgagttgtgtgttgacaaccttactgctgactacttggatcccattatggcaccggtcattgaggagctgatgaatgcactttttgagcatttgaaacctcatccttactctcatttccatgcccataccaccatgcgcatcctgggcaaacttggtggtagaaaccggaagttcatgtcggaaacactaccggtcaactaccaacgctacgctgatgatccagccagtttcgacgtccgtctcattggctccaagaaagacagagccttcccagcctctcttggtattgactttgccatccgcaaactcatggaagtgcccaagccgtccaaagtgaataccgcaaagcagcaggatggatactacaagaagcaagcgctacagtttattaaagctcaagtcaaattgcgtatcggcgtcgaccacctacctgatgatctccctcgtcttgtacgtcttcaagctcaggacctgctggcaaggaaaccgaatgccgatttcgcagcatttgacgcgctcaacaaggagcgatcggttgtgaagaaggatgaggaagatctcatcatgaaacggctcatcaaggccatcatgtatgcggaatccatccctgagtttcgacaagaggccgacgtcttccttatgaacttggcgcggcatttcacaatcgtcgagattggacgcgcactagtcgatgtgaaaaaggagctaagtccatttgaccctcaagcgggcgaaggccccttattcgtcgatacgagggtccttgctgatgccatccttgagtcgctggcctcagaacttcccgaggtcagagacgcggcttttcgcgctgtccgagccgtgtatgactccacggccacaatctttggtggccaggctcaagtcggccgcttgagctttttcaaccacctgagtaaaactttctgtcatgcatgcttcgaggaagagtggtataccaaggctggcggtacactgggcatcaagtatcttcttgatgaaattgagcttggagacatatggataatttctaagcagatggagttcattcgagccctcatgtacgttatcaaggacatgcctcaagatcttcccgaaaaaacgcgcagctctgctcaagtcgccctcgaagcattattacggcgcaccacaaaaaatgcaaaaaaggaagatgctctgccagctcctgcgcagcaagggcaatcgccaccgaaaccttccaggcttgcgcaaatatgcatgatcttcaacgacgagttgtctcatatgaacaagcatgttcgagccaccgcccggcggtctcttgagtatattgccaacaccacccagtctgaaatatgggaactagttgagcctcacaaagatcgtctcctctcgccaatctatgcaaagccactgcgagctctgccgtttgcaactcagattggatatatagacgcgatcgcttactacatgggattgaagaacgattttgtctcttttgatgttgacctcaaccgactgctcatggagtctctagctcttgctgacgcttctgatgaatccctggctggtaaacacgccgaatttcgtacccatgagtcaatcgtcaacctaagagtggcctgtatcaagatattaagcaaggctatgggctttgaagaatttcagaagggccagaacaacccaacgcgcaccaaaatagtgtctgtcttcttcaaatgtctgtattcggaatcaaaaccgacgatcgaggcagccaatcagtccatcaaggcagtcttatcccagacaactaagttgcccaaggacctgttacagcaaggcctgaggccagtcttggctaatctccaggacccgaaacggttaagcacacatggactggacaaccttgcgagacttctaagattacttacaacgtacttcaaagtcgagatcggagcacgtctacttgatcacatcaagattctcgccgaaccaaatttccttcagcagatttcgttcaccttcttcgagcagaacagtcagatgaaggtgattgccgcagttttcaacatcttccatctgctgcccccagccgcagagcagtttaaagagagacttattgatacgtgcctcgatctggaggaaaagttacgacgcacgcatcatagccctttccgacctccgctttacaagttcttgaaccgttatccaagcgaggtctgggagtttctgacgggcaagctggaagacatcaagtatggtaggttccttgctcaggttcttgcaaaccctgagagcaaaccactacgcgatcatgccgccgccaatttggagcctttcatgtccaagtgtaaccaaatttggaacgaaaccaaagattccagatttgtcgttgccattggcacaatcaatatccttgattccctcagtggatacgaagatgcccgagactggatggatcggaaggagacgatgagcctactcaaacaaatcggaaaagatctggaacgtcgtcttcggctcaacgatttgcccgcaaacttacgtctacctgccgatcaagcagccgagcaactaatgagcatatttaccaaagcccttacgctaaaacctaaagaccttgatcccctcttcagcctgatcgagtccattacctcagatgagctacgcgccacatcttctgtcttcgcattcctctacaatgaggtggtctctagtcagtctatcgactattggaagtccatcatcatgcgctgtctcgacctttatgctagcaagaatgtcagccagaagacgaagtggtttcttcttcgctacatcgtcaatcctatagttgccatggacgtcattaggcactggaatccgtccaatgccccaaaagcacaaagactcatggataagtcagtgatcgaatcgattaatgtgaaaatctggaaagtcaacctcgcagacccccaagaggatcttgcacaaccaggtattgaccatacacgcatggaagtgctacaactatcggcaatgctcgtcaaataccaccacgcgattctgcaagatgcgagaaaagatatcattaagttcggctggacttacattcgtttggacgatgtcattaacaagcatgctgcttacgtcgtcattgcatacttcatcgcgcattatgagactcctgcgaaaattgtaactcaagtctactattctctcttgagaacgaatcagaatgaaggacgagcgcttgtcactcaagccctagaactaatggccccagtgctcccaaagcgatgcaatactgttcctggtgatcgcaatgccgtttgggcaatggcaccacggcgaatcctggccgaggagggtcaaaacgctcagcaaatgactagcatattccatttccttgttcgccatcctgatttgttttatgagtctagagacaaatttgcacttcttatcatcacctcccttcggaaagtgtctgcacctcaaacgtcttcgaatgagaacaagaagcttgcgttgaatatgatgtggctaatctggctatgggagaagcgacgtctggaagggaaatctaccgttcctacaagagccttgtcagaatcaccaaactcgaagaggcgcagattagatggagatgtgtcaacttcgtcccctccgtcagctcggcaaacatcacaggtcgaaagagcagaatttcagatccctcaaggcttccggttgaagatgattaagtatctgatcgaattcattgctcaattgaacgagagatacaaactgccttctgcaaagccgagagataccacatcaagtccgggccctactttgccgcccttgtctacagagctgtgcatgaaggcgttatctctattgtacaacttgctccaacctcaatgttggggcgatttggacgttgacttgtttccgaccatcactgatgtggtcttggccagtgagaaaactgctaagatcgtcaatgctgacccctccgacaaggacaactatgacgagaaattcatcacgaatatcatcaacactctacaggttgtgcgcatcattctcaatttcaagaccgacgaatggatattgagaagtatgacatcagtgcagaaagttctcgagaaatcattgaaatcagagattccagaaattcaagattgtttgcatttcgccgacaaagaattcgatggcgggcgtgatatcaagtctacagtccagcgaattcttgatgctgtacctgaagacgtcccaatggaagacgccgatggtgaagcggaggcggaaacgcccacctccgagatcattactttcctttctactctagccacagagactatggctaatgctcaatacggcgctggggtcagtaccttgtggtcgctgagtcgtcgtcgacctacaatcattgatcagcacattccggcacttatgaaagcattgcaaacgaaactggccagagaacatgttcagcactggaccagtgtgtcgtccactcagcttccatctaatgcaatccgtcctcaagatccaaatgcgcaagctggagagctgacgccttatgatctcaagatacagacggagctcatgatcaaggccattgaagtaacatccatgcgaatggagacgcttgctgataaccgtagaccattccttagtgtactggccacgctcgtcgagaaatcacaggataatacactctgtgagaaaattctcgagatggtcgagggctgggtgtttcgggcagaaggtacatggccaactctgaaggagaagactgccgtcctgcataagatgctctgtttcgagcatcgcactgacccgacaatgttgaccaagttccttgacctggtcatccgtatctacgaagacccgaaaataaccaggactgaactcacagttcgcatggagcacgccttcttaatcggaacacgtgctcaagacgttgagatgcggaaccgattcatggctatattcgacaagagtctctcaaagactgcaaccgctcgcttgtattatgtcatcaaagtacagaactgggacacacttgccgattcgttctggatcgcgcaagccactcaactactccttggtgccgtggaaatgaattcgaatattcaccttcatcaagaagacttccgaacgcttcctgcctcgctcgtatttggcgcatatgctaaagacagtcgagaaccgacactcatggctgatgataagtatgacactttcatggcaaatcaccgaagatttgtcaacgaactcagcgaggtcaagctacgggatgtgatagagcctatttcccagcttcagcacgtcgacagcaccctgtcacacgaactctgggtggccttgttcccaatgttctgggctgcgacggtgcgcgaagaaaagagtgagatcgagaaggctttggttgaactcctcactaaggacttccattctcgccagttggataaaagaccaaatgtagtgcaaactttgactacaggcgcagccaagtcttggccagagtgtaggattcctccacacattatgaagtattgtgcatcgacttacgatgcttggtacactgcaatggtgcaactggagaaggctgctatcaagccagagatcgattccgccaaggttcgtgaaagtaatacagatgcgctgttgcacttatactctagcctgaaggaggatgatctgttctacgggacgtggcgccgacggtgtggatatgtcgaaaccaatgctgcactctcatacgaacagagcggaatgtgggataaagctcagaagatgtacgaggctgctcaaataaaggctcgaacaggtgtcattccattttcgcagggcgagtacatgctctgggaggaccattgggttctttgcgcacaaaaactccagcaatgggagattctgcaggacttcgccaagcacgagaatctacaagatcttctgcttgagtgcgcttggagaaacatcgagatgtggcagaaccaagaacatcgcgacagtttagatatgctcatcaagggtgtcatggatgctcctacctctcgacgagcctttttccaaggattcatgtctctccttaagtttcacaacaagcaagagaatatgcctgagttttctcgagtttgcgatgaagcaatacaactatcgattcgcaaatggcaccaactcccccggaggcttaccgcggctcacatccccatgcttcacaacttccagcagctcgtggaacttcacgatgcgagtgtcatctgccagagtctggctggcactaaccaggctaatttagatgtcaagtctggagagctgaagctgctcttgggtgcctggagagatcgtctacctaatacttgggatgatatcacagactggcaagatttggtgacctggcggcaacatattttcggcttgataaacaacacatatttacagctgctaccccaatcggggcagaacgcgaatggcaactcgtttgcataccgtggctaccacgagactgcgtggattatcaaccgctttgctcatgtagcgcgaaagcacagccttcccgacgtctgcgtcagccaactcagccgcatatatacccttcctaacatagaaattcaggaggcgttccttaagctgagagagcaggcgagatgtcactatgaaaaccccgatgaactgacgaacggattggacgtgattaataatactaaccttaattacttcaacgctcagcagaaggcggaattctacactctgaaaggcatgttcctcgagaagctaggacaaaatgcagatgccgatggagcttatggcacagcgttgtattacgacatcaccaaggctaaggcatgggctgaatgggggtatttcaatgaccgcaaattcaaggctgatccatctgatacgggctcggcccgtcaagctacaacctcctaccttcaagctattggtagttacaagagcggaaaggctcggaagttgatcgcccgaattctgtggttgctcagcctagacgatgccaacggaacaatcgcagccggcttcgatgactacaaaggggagacacctgtctggtactggatcaccttcataccacaactgctcacaggcttgggccataaggaggcacccaaagtacacggcattttactcaagattgcaaaggcttatccccaatctctctatttccaacttcgaacgaaccgtgaggatatgttgatgattaagaagaatcaagaggctaaagagaaggctcggcagcgcgctcaatctgctgccgctgctagaaagccctccagttccccgtcccagtcgaaacaagagaatcctcaaccaaagtctgaagcgtcttcgcggccccagacgtcaaacggagacactgccgtccagaccaaaacagaaccagctgaagcatctgcatctgcaaatcctcctgctgccgccaatgcaacaacccctgctgcaaatgccgagcagcagcctgctaaggataccactgcatccaccaccggccaaaagaagcctccttgggagcttactgaagagatcatgtcggttctcaagactgctttcccccttcttgcattgtctatggagacaatggtcgatcagatacaaaagtatttcaaatgccctccggacgaggatgcttatcgactcatagttgccttgctcaatgacggattggcttatgttagtcgtatgcccgcatcatatgccaaagatgtgaaactgccgaatgctaccgagacaaacataacaagattcgctgagactattctcccggcgcatatcaaaaagtcctttgaagcagatttcgttactgtcaagccaacgatgtatgaatacatccacaagcttcgcaaatggcgcgacaagtttgaagaaaagctcgaccgcaggagctcaaatgctaatctagagtcatactctcgtcacctcagcgagttccgttacctcaaattcgacgaggtcgaggtcccaggacagtacttgcagcacaaggataagaaccaagacttcattcgaatcgatcgattcctgcccaacgtggacctcgtcagggcaattggcgtgtctcatcgtcgactcaagatacgcggccatgatggcagcgtccatgcttttgcgatacaacatccggctgccagacactgccgacgcgaggagagaattctacagctcttccgacagctcaatcaaacgctagccaaaaagaaggaaagtcgtcggcgcgatcttcaattcaccgttccgttaatgatacctcttgcaccgcacattagaattgtgcaagaagatacctcatacgtcactctacagggcatctacgaagatcactgcagacgcaacgggatgaccaaggacgacccggtcatgttcacaatggacaaattgagaggtctgatggagcctaaggcaaccaagcaagctcaagagaccgcaacagcccgacttgaggtgttcactgccatccaagagaaatgggtgtcgcatacaattgccttggaatatttccagagcatcttcccggaatactcggacttctggcttttccgtcgtaaacttgcgtaccagctgtctgcgttgactttcatgacgtatgttctgttcatgacagggcgttatcctcacaagatcaacatcgcacgcggatcgggtaagatctggggctccgagttgatgtcattcatggcgcctggtaaaccattcttccacaatcccgaaccggtcccgttccgtcttacgcccaacttgcaaaccttgatgggacccctggctaccgaaggcatcttcagctgttcggttatggcgattgcccgatgcctcactgagcccgaattcgaacttgagcacgccctcacgctgcttgtgcgggacgaagtgatcttctggttcactagtagccatcgcgccatccacctcaacgaaaatcagctgcgggataccgttcagtcgaactgcgacgtgatcgtgaaacgtgctctcagcttggcccaaagtccccaaggcactctaccggccaaccagacggttattgatcttgtcgctcgtgcggtaaacccgatgaacctagcccagtgtgatgcactctggatgccttatctctaa

SEQ ID NO: 27069 - protein, 3861 aa, Muscodor strobelii
  misc_feature: SGI Peptide ID NO. 569266
  misc_feature (2808)..(3160): Pfam Id: PF02259 Pfam Desc: FAT domain
  misc_feature (3829)..(3861): Pfam Id: PF02260 Pfam Desc: FATC domain
  misc_feature (3531)..(3792): Pfam Id: PF00454 Pfam Desc: Phosphatidylinositol 3- and 4-kinase
  misc_feature (1)..(3861): NCBI GI: 116206310 Blast Desc: CHGG_02448 [Chaetomium globosum CBS 148.51] gi|88183045|gb|EAQ90513.1| CHGG_02448 [Chaetomium globosum CBS 148.51]
  misc_feature (1)..(3861): NCBI GI: 46123423 Blast Desc: FG06089.1 [Gibberella zeae PH-1]
  misc_feature (18)..(3861): NCBI GI: 16944583 Blast Desc: related to the component Tra1 of the SAGA complex [Neurospora crassa]
  misc_feature (6)..(3861): NCBI GI: 164426278 Blast Desc: NCU01379 [Neurospora crassa OR74A] gi|157071270|gb|EAA31700.2| NCU01379 [Neurospora crassa OR74A]
  misc_feature (1)..(3861): NCBI GI: 171693485 Blast Desc: protein product [Podospora anserina] gi|170946691|emb|CAP73494.1| protein product [Podospora anserina]
  misc_feature (1)..(3861): NCBI GI: 39961376 Blast Desc: MGG_09523 [Magnaporthe grisea 70-15] gi|145011025|gb|EDJ95681.1| MGG_09523 [Magnaporthe grisea 70-15]
  misc_feature (1)..(3861): NCBI GI: 156063222 Blast Desc: SS1G_01727 [Sclerotinia sclerotiorum 1980] gi|154697063|gb|EDN96801.1| SS1G_01727 [Sclerotinia sclerotiorum 1980]
  misc_feature (1)..(3861): NCBI GI: 154294424 Blast Desc: BC1G_13732 [Botryotinia fuckeliana B05.10] gi|150844741|gb|EDN19934.1| BC1G_13732 [Botryotinia fuckeliana B05.10]
  misc_feature (12)..(3861): NCBI GI: 159125992 Blast Desc: histone acetylase complex subunit Paf400, [Aspergillus fumigatus A1163]
  misc_feature (12)..(3861): NCBI GI: 70985158 Blast Desc: histone acetylase complex subunit Paf400 [Aspergillus fumigatus Af293] gi|66845713|gb|EAL86047.1| histone acetylase complex subunit Paf400, [Aspergillus fumigatus Af293]
MSAAQLEDIVKKLTVQETESKTKLEAATTLRDSLDHYTNGPIYTHFLSRVMPLIVNTLRGSCIFQSNSPEQKLRHCILEILHRLPTNQNQTPTEPFEQYAKEVVDLLMTLVRQDNEDNAQLCIKIISDIMRHQPKVLADKVQPFLTLIQELFEQLEKVVREQLDSTALQPGVPGPPSTPGSTQTNFQSPRPGSPVASVTDLGQDLQQQSRPLLKGMQSFKVVSECPIIVVSIFQTYRNIIQSNVKAFVPLIKTVLCLQAKAQEQAHNEAKAKGTIFTGVSPSIKNRAAFGEFITAQVKTMSFLAYLLRQYSSQLADFLPTLPEIVVRLLKDCPREKSAARKELLVAIRHIINFNFRKIFLPKIDELLEEKTLIGDGLTVYDTMRPLAYSMLADLIHHVRESLSPEQIRKTVEVYTKNLQDNFPGTSFQTMSAKLLLNMAECIAKMPNKVDARHYLLMILNAIGDKFAAMNRQYPNAVKLSKLYAQQNAEGRETYLADKEHPPEWDEIDIFTAMPIKTSNPRERNADPVADNKFLFKNLMNGLKNTFYQLKACNTASVVDSHNAPAHWQDVSYGFTAEEVKVVVKLLREGAYVFRYYEIEKPAAEGQFASTVEYMANFYMVSSSKEEKELLETFATVFHCIDPATFHEVFQQEIPRLYEMIFEHTALLHIPQFFLASEATSPSFCGMILKFLMERIDEVGSADVKKASILLRLFKLAFMAVTLFATQNEQVLLPHVVDIVTKSIDLSTKAEEPMNYFLLLRSLFRSIGGGKFEHLYKQILPLLEMILDVLNNLLMAARKPAERDLYVELCLTVPARLSNLLPHLSFLMRPLVVALRAGTELVGQGLRTLELCVDNLTADYLDPIMAPVIEELMNALFEHLKPHPYSHFHAHTTMRILGKLGGRNRKFMSETLPVNYQRYADDPASFDVRLIGSKKDRAFPASLGIDFAIRKLMEVPKPSKVNTAKQQDGYYKKQALQFIKAQVKLRIGVDHLPDDLPRLVRLQAQDLLARKPNADFAAFDALNKERSVVKKDEEDLIMKRLIKAIMYAESIPEFRQEADVFLMNLARHFTIVEIGRALVDVKKELSPFDPQAGEGPLFVDTRVLADAILESLASELPEVRDAAFRAVRAVYDSTATIFGGQAQVGRLSFFNHLSKTFCHACFEEEWYTKAGGTLGIKYLLDEIELGDIWIISKQMEFIRALMYVIKDMPQDLPEKTRSSAQVALEALLRRTTKNAKKEDALPAPAQQGQSPPKPSRLAQICMIFNDELSHMNKHVRATARRSLEYIANTTQSEIWELVEPHKDRLLSPIYAKPLRALPFATQIGYIDAIAYYMGLKNDFVSFDVDLNRLLMESLALADASDESLAGKHAEFRTHESIVNLRVACIKILSKAMGFEEFQKGQNNPTRTKIVSVFFKCLYSESKPTIEAANQSIKAVLSQTTKLPKDLLQQGLRPVLANLQDPKRLSTHGLDNLARLLRLLTTYFKVEIGARLLDHIKILAEPNFLQQISFTFFEQNSQMKVIAAVFNIFHLLPPAAEQFKERLIDTCLDLEEKLRRTHHSPFRPPLYKFLNRYPSEVWEFLTGKLEDIKYGRFLAQVLANPESKPLRDHAAANLEPFMSKCNQIWNETKDSRFVVAIGTINILDSLSGYEDARDWMDRKETMSLLKQIGKDLERRLRLNDLPANLRLPADQAAEQLMSIFTKALTLKPKDLDPLFSLIESITSDELRATSSVFAFLYNEVVSSQSIDYWKSIIMRCLDLYASKNVSQKTKWFLLRYIVNPIVAMDVIRHWNPSNAPKAQRLMDKSVIESINVKIWKVNLADPQEDLAQPGIDHTRMEVLQLSAMLVKYHHAILQDARKDIIKFGWTYIRLDDVINKHAAYVVIAYFIAHYETPAKIVTQVYYSLLRTNQNEGRALVTQALELMAPVLPKRCNTVPGDRNAVWAMAPRRILAEEGQNAQQMTSIFHFLVRHPDLFYESRDKFALLIITSLRKVSAPQTSSNENKKLALNMMWLIWLWEKRRLEGKSTVPTRALSESPNSKRRRLDGDVSTSSPPSARQTSQVERAEFQIPQGFRLKMIKYLIEFIAQLNERYKLPSAKPRDTTSSPGPTLPPLSTELCMKALSLLYNLLQPQCWGDLDVDLFPTITDVVLASEKTAKIVNADPSDKDNYDEKFITNIINTLQVVRIILNFKTDEWILRSMTSVQKVLEKSLKSEIPEIQDCLHFADKEFDGGRDIKSTVQRILDAVPEDVPMEDADGEAEAETPTSEIITFLSTLATETMANAQYGAGVSTLWSLSRRRPTIIDQHIPALMKALQTKLAREHVQHWTSVSSTQLPSNAIRPQDPNAQAGELTPYDLKIQTELMIKAIEVTSMRMETLADNRRPFLSVLATLVEKSQDNTLCEKILEMVEGWVFRAEGTWPTLKEKTAVLHKMLCFEHRTDPTMLTKFLDLVIRIYEDPKITRTELTVRMEHAFLIGTRAQDVEMRNRFMAIFDKSLSKTATARLYYVIKVQNWDTLADSFWIAQATQLLLGAVEMNSNIHLHQEDFRTLPASLVFGAYAKDSREPTLMADDKYDTFMANHRRFVNELSEVKLRDVIEPISQLQHVDSTLSHELWVALFPMFWAATVREEKSEIEKALVELLTKDFHSRQLDKRPNVVQTLTTGAAKSWPECRIPPHIMKYCASTYDAWYTAMVQLEKAAIKPEIDSAKVRESNTDALLHLYSSLKEDDLFYGTWRRRCGYVETNAALSYEQSGMWDKAQKMYEAAQIKARTGVIPFSQGEYMLWEDHWVLCAQKLQQWEILQDFAKHENLQDLLLECAWRNIEMWQNQEHRDSLDMLIKGVMDAPTSRRAFFQGFMSLLKFHNKQENMPEFSRVCDEAIQLSIRKWHQLPRRLTAAHIPMLHNFQQLVELHDASVICQSLAGTNQANLDVKSGELKLLLGAWRDRLPNTWDDITDWQDLVTWRQHIFGLINNTYLQLLPQSGQNANGNSFAYRGYHETAWIINRFAHVARKHSLPDVCVSQLSRIYTLPNIEIQEAFLKLREQARCHYENPDELTNGLDVINNTNLNYFNAQQKAEFYTLKGMFLEKLGQNADADGAYGTALYYDITKAKAWAEWGYFNDRKFKADPSDTGSARQATTSYLQAIGSYKSGKARKLIARILWLLSLDDANGTIAAGFDDYKGETPVWYWITFIPQLLTGLGHKEAPKVHGILLKIAKAYPQSLYFQLRTNREDMLMIKKNQEAKEKARQRAQSAAAARKPSSSPSQSKQENPQPKSEASSRPQTSNGDTAVQTKTEPAEASASANPPAAANATTPAANAEQQPAKDTTASTTGQKKPPWELTEEIMSVLKTAFPLLALSMETMVDQIQKYFKCPPDEDAYRLIVALLNDGLAYVSRMPASYAKDVKLPNATETNITRFAETILPAHIKKSFEADFVTVKPTMYEYIHKLRKWRDKFEEKLDRRSSNANLESYSRHLSEFRYLKFDEVEVPGQYLQHKDKNQDFIRIDRFLPNVDLVRAIGVSHRRLKIRGHDGSVHAFAIQHPAARHCRREERILQLFRQLNQTLAKKKESRRRDLQFTVPLMIPLAPHIRIVQEDTSYVTLQGIYEDHCRRNGMTKDDPVMFTMDKLRGLMEPKATKQAQETATARLEVFTAIQEKWVSHTIALEYFQSIFPEYSDFWLFRRKLAYQLSALTFMTYVLFMTGRYPHKINIARGSGKIWGSELMSFMAPGKPFFHNPEPVPFRLTPNLQTLMGPLATEGIFSCSVMAIARCLTEPEFELEHALTLLVRDEVIFWFTSSHRAIHLNENQLRDTVQSNCDVIVKRALSLAQSPQGTLPANQTVIDLVARAVNPMNLAQCDALWMPYL

SEQ ID NO: 27070 - DNA, 19395 bp, Muscodor strobelii; identical to SEQ ID NO: 27064
  misc_feature: SGI EST ID NO. CUFF.65011.2
  misc_feature: Variant of the nucleotide sequence at SEQ ID NO 27068

SEQ ID NO: 27071 - DNA, 1155 bp, Muscodor strobelii
  misc_feature: SGI cDNA ID NO. 569267
  misc_feature: Reduced expression when VOC is produced
  misc_feature: Encodes the peptide sequence at SEQ ID NO 27072
atgtatttcgcaaacgctgctgttgctgctgccttcgtggccggcgtcaatgcccacatgaagatgtctagtccatctcctttcgaccctaccgctcttaacaatgctcctcttgctgctgatggatctgatttcccttgcaagttcggcgctggttacactgctaccggtggaaccgccaaccagtacaagctgggctccgaccagactttgtcattcattggaactgctgttcacggtggtggttcttgccaggtcgttatgacctacgacaccaatcccaccaaggactcgaagtggaaggtcattcacagcatcgagggtggctgcccggccaagaacacaccaggcaatctgcctcagaacgatgccaacctcgccgatcctttcacctacccttacaccatcccctctgatattcccgctggaaagggtacgatcggcttcacctggttcaacaaagtcggcaaccgtgagatgtacatgaactgcggtgctcttgaactcactggtgatggcggtgatcagtccaacttcgacgcccttcctgacatgctcgtcctcaacgtgggcggtgcgcagaccatcgagggatctgactacatctttaagaacgctggaaagtcagttgagaacaaccttggtagcaccgtcgctacctgcgatgagaatggttgcactcctggtggtgacgctggctccggctctggctccggctccggatcctccagctctgccccagctcctaccacgactgccgctcccgcttctactcctgctgcctcaagccccggtggtgtcttcattaccgtcggctccagctcctctgcagctcccacctctgtcgctgctactcctacttccgtcgctactaccatgaccactgccgtgtcttcctccgctcctgctgccacccccacacccagctccggtactggctccggtactggctcttcttctggcgctatgaccggagcctgctctaccgagggacagtggaactgcatcagcggctccagcttccagcagtgcgcttccggccagtggtcggctgtgatgcagatggctgctggtaccaagtgcactgccggacagagcgctgctttggacatcaaggctggcaagcgatcccacgctcgcaacttccgtgcctaa

SEQ ID NO: 27072 - protein, 384 aa, Muscodor strobelii
  misc_feature: SGI Peptide ID NO. 569267
  misc_feature (3)..(384): NCBI GI: 261355578 Blast Desc: conserved [Verticillium albo-atrum VaMs.102]
  misc_feature (3)..(377): NCBI GI: 154292873 Blast Desc: BC1G_14469 [Botryotinia fuckeliana B05.10] gi|150845746|gb|EDN20939.1| BC1G_14469 [Botryotinia fuckeliana B05.10]
  misc_feature (3)..(384): NCBI GI: 46123419 Blast Desc: FG06087.1 [Gibberella zeae PH-1]
  misc_feature (1)..(377): NCBI GI: 156063792 Blast Desc: SS1G_02014 [Sclerotinia sclerotiorum 1980] gi|154697348|gb|EDN97086.1| SS1G_02014 [Sclerotinia sclerotiorum 1980]
  misc_feature (16)..(383): NCBI GI: 212535048 Blast Desc: conserved [Penicillium marneffei ATCC 18224] gi|210070079|gb|EEA24169.1| conserved [Penicillium marneffei ATCC 18224]
  misc_feature (8)..(383): NCBI GI: 242791913 Blast Desc: conserved [Talaromyces stipitatus ATCC 10500] gi|218718439|gb|EED17859.1| conserved [Talaromyces stipitatus ATCC 10500]
  misc_feature (1)..(373): NCBI GI: 119498947 Blast Desc: NFIA_039100 [Neosartorya fischeri NRRL 181] gi|119414395|gb|EAW24334.1| conserved [Neosartorya fischeri NRRL 181]
  misc_feature (16)..(383): NCBI GI: 238503077 Blast Desc: conserved [Aspergillus flavus NRRL3357] gi|220691582|gb|EED47930.1| conserved [Aspergillus flavus NRRL3357]
  misc_feature (16)..(383): NCBI GI: 169776393 Blast Desc: [Aspergillus oryzae RIB40] gi|83771398|dbj|BAE61530.1| protein product [Aspergillus oryzae]
  misc_feature (1)..(373): NCBI GI: 70985072 Blast Desc: conserved [Aspergillus fumigatus Af293] gi|66845670|gb|EAL86004.1| conserved [Aspergillus fumigatus Af293]
  misc_feature: Useful for introducing or modulating the production of volatile compounds
MYFANAAVAAAFVAGVNAHMKMSSPSPFDPTALNNAPLAADGSDFPCKFGAGYTATGGTANQYKLGSDQTLSFIGTAVHGGGSCQVVMTYDTNPTKDSKWKVIHSIEGGCPAKNTPGNLPQNDANLADPFTYPYTIPSDIPAGKGTIGFTWFNKVGNREMYMNCGALELTGDGGDQSNFDALPDMLVLNVGGAQTIEGSDYIFKNAGKSVENNLGSTVATCDENGCTPGGDAGSGSGSGSGSSSSAPAPTTTAAPASTPAASSPGGVFITVGSSSSAAPTSVAATPTSVATTMTTAVSSSAPAATPTPSSGTGSGTGSSSGAMTGACSTEGQWNCISGSSFQQCASGQWSAVMQMAAGTKCTAGQSAALDIKAGKRSHARNFRA

SEQ ID NO: 27073 - DNA, 1958 bp, Muscodor strobelii
  misc_feature: SGI EST ID NO. CUFF.64509.0
  misc_feature: Variant of the nucleotide sequence at SEQ ID NO 27071
ctctcctgcaatgtccaatcaatcctagcacacctgggaagcgctggggttcctgcagcatgtcaacgacttagtcgtgtgtactccgctgccgctatgcatgaataagtcttggcgaggccgactctgcccttgccagcttctcatcgtctcctgaaaggtataagacatcccataactcctctctcgtcgtttcgtttcttctctctccatgctatcagcagcacacagtctttgcactacagtccttccttcactcactaaaggctagtccttttttgtttaccaaactcgcctggagcaactttcctttgagtccaactcaacaaccatcaagaagaaagacactcggaccttctcgtcatttgtaccgctttgttcgtccgcccacaaacaaagctcacaacagaagtcatcatccgattcactgtcacaagttacacaacaaccactttcttcttaacttccgaaacaagagattttaatcgtcaggcacgaactttatctcaaccttcattcaatcactcaagatgtatttcgcaaacgctgctgttgctgctgccttcgtggccggcgtcaatgcccacatgaagatgtctagtccatctcctttcgaccctaccgctcttaacaatgctcctcttgctgctgatggatctgatttcccttgcaagttcggcgctggttacactgctaccggtggaaccgccaaccagtacaagctgggctccgaccagactttgtcattcattggaactgctgttcacggtggtggttcttgccaggtcgttatgacctacgacaccaatcccaccaaggactcgaagtggaaggtcattcacagcatcgagggtggctgcccggccaagaacacaccaggcaatctgcctcagaacgatgccaacctcgccgatcctttcacctacccttacaccatcccctctgatattcccgctggaaagggtacgatcggcttcacctggttcaacaaagtcggcaaccgtgagatgtacatgaactgcggtgctcttgaactcactggtgatggcggtgatcagtccaacttcgacgcccttcctgacatgctcgtcctcaacgtgggcggtgcgcagaccatcgagggatctgactacatctttaagaacgctggaaagtcagttgagaacaaccttggtagcaccgtcgctacctgcgatgagaatggttgcactcctggtggtgacgctggctccggctctggctccggctccggatcctccagctctgccccagctcctaccacgactgccgctcccgcttctactcctgctgcctcaagccccggtggtgtcttcattaccgtcggctccagctcctctgcagctcccacctctgtcgctgctactcctacttccgtcgctactaccatgaccactgccgtgtcttcctccgctcctgctgccacccccacacccagctccggtactggctccggtactggctcttcttctggcgctatgaccggagcctgctctaccgagggacagtggaactgcatcagcggctccagcttccagcagtgcgcttccggccagtggtcggctgtgatgcagatggctgctggtaccaagtgcactgccggacagagcgctgctttggacatcaaggctggcaagcgatcccacgctcgcaacttccgtgcctaaatgacatgttatgacaatcttctcaaagtgtacaattttggcataggggaaaataggatacggggcatggtatggggcgtttttggctaggtcacgatagcattcattcgttcattttgctgtacatacacttctattcattgactgtgacaactttacagaacgtctgtaccacgaatatattgccttttggtacttcaatcttataaattccaccaagtgattatgaaatgtgattcgtcgctgctttcttcgtgccggagctacttcaat

SEQ ID NO: 27074 - DNA, 1407 bp, Muscodor strobelii
  misc_feature: SGI cDNA ID NO. 569268
  misc_feature: Encodes the peptide sequence at SEQ ID NO 27075
atgtatttcccaccagagatcctagatcaaattgtcaggaatctagcctacacgggaatcgacgacctttcagtagcctcagaaagcagttatgcacacatcactgatgaaagacatgttcacagatggaataccttcacttcatgtccttacattccacaacctgcggagtctgtacccaacgacaacatcagcttccgtcgccgatggcgtcgtcagccaaacggctttggcaactgctttacgcaagttactttcaacggaatccacgaagggacttacaccgacaaacccgattttgaagaaacagacaacctcgataagtctccagagctcgatctgctccgcaagctagttgatcagttaccatgtattgaggcgctcagtgtgacgtttccatccgccaggtcagactgtgacagcgtcgaagcaacagcgcaatgttataatcctactgctatcgacgctgctttggctaccgtttcatactgtttgatatcacctgcttctgagcatctgaccagtctacacttagcagtacccggaacacacgaagtcgggttgattgctgcgggactatcaaacagcgtgaaggtacaactcacagacctatggattgaggttgttgattgcaccggtcccggaggtagccggcaacatgcgaatgagtgggaatctgatatttgggatgatggcgataattttatcatcgccgatggaagtcatcggtatcaagacggtacattgacagacccacatgaagcgggttatcctctgagcaacctccaagccagtcatcctaaccgagaacatcaacacggggtatggaacttcgtctcttcatgtcccaaccttgactatttggggatttctgcaacccattatctagacctcgagagactggatataaagtctcgtcaagaaccgcttcgagcattgtatctgagtcgtttgtacacgaaagcttctaccctgatcagcattctcggagccgcatgtaggtcacgaggccctagtcgcatacgacgagtcgaattcaatgatctgaaaattaaacacgatggcgggacctggaaagacgtatttaaatatctcgaaaagaaatgcccagatctcgagttcttctgcccgtacaacatcgggtatttgtcagatcatgagcacttcgagcacaacaataggccgaatgagaactgtaacgacatatggacggagtgggaagacgaccgcgaggcacttgctaccgtcacgaaatggctggtcgtcaaagccggtggtgaggtagtagaggatcgcaggcaactttttaacatagaagattggggtgattgttttgcgagcactaccgattacgtacctgtcgatctatttcaaggcactggtacgggaggatataacccactataa

SEQ ID NO: 27075 - protein, 468 aa, Muscodor strobelii
  misc_feature: SGI Peptide ID NO. 569268
MYFPPEILDQIVRNLAYTGIDDLSVASESSYAHITDERHVHRWNTFTSCPYIPQPAESVPNDNISFRRRWRRQPNGFGNCFTQVTFNGIHEGTYTDKPDFEETDNLDKSPELDLLRKLVDQLPCIEALSVTFPSARSDCDSVEATAQCYNPTAIDAALATVSYCLISPASEHLTSLHLAVPGTHEVGLIAAGLSNSVKVQLTDLWIEVVDCTGPGGSRQHANEWESDIWDDGDNFIIADGSHRYQDGTLTDPHEAGYPLSNLQASHPNREHQHGVWNFVSSCPNLDYLGISATHYLDLERLDIKSRQEPLRALYLSRLYTKASTLISILGAACRSRGPSRIRRVEFNDLKIKHDGGTWKDVFKYLEKKCPDLEFFCPYNIGYLSDHEHFEHNNRPNENCNDIWTEWEDDREALATVTKWLVVKAGGEVVEDRRQLFNIEDWGDCFASTTDYVPVDLFQGTGTGGYNPL

SEQ ID NO: 27076 - DNA, 438 bp, Muscodor strobelii
  misc_feature: SGI EST ID NO. CUFF.64513.0
  misc_feature: Variant of the nucleotide sequence at SEQ ID NO 27074
atcgcaggcaactttttaacatagaagattggggtgattgttttgcgagcactaccgattacgtacctgtcgatctatttcaaggcactggtacgggaggatataacccactataatgtcccagctcttgtccagcgggacaagacaattacaccattggcgcaatcggtagaacaccaaacgctgaatcggcacacaaatgctgtcaagctttcaatgagctaagacataataatgctgccatgacacttagagacaagccgacaacaacctagataataggattgtcaggctcatagcaaatcggaaactaggcatagtcagagaataaccctacggagtagctgcttcttgtgtattatttgttattcgaaatgcgtaggcaatgcctgtacaaccttgttttcgcctctagtagttggctatacaagaagcgca

SEQ ID NO: 27077 - DNA, 2544 bp, Muscodor strobelii
  misc_feature: SGI cDNA ID NO. 569269
  misc_feature: Encodes the peptide sequence at SEQ ID NO 27078
atgagtctcatgcagaagctcgacgacaaaaagagagagaaatatgcaacgaagggtgttgtgcttccatcacctactatatactcagaatttagtaatgaattgtgctgcacgtgccgtttatttattggcgatatttggacaaaagaggcatgggaagaagcatcactatcatggtggtcggagccggatgatgaaactggcatatccctttttcagcatcattgcatctgggaccttcccgtcgacctgcagcagttagactgcatcctttgtcgtatgcttgcacatgcctttaggcagacgccgtcatttttgagcgccgaggggcctgatgagagatacggcgatcacatctacattgcgaggaactttgcccgcagccaaaaattcttcgagatacaggctctcggtgagacacctgaaatccagtttgatttcaacgttctcattcagtacggtaagggaagagttgatccgcactggctagatgcatactgcgcagagaatggattcgatgaagcaactccagaggatcctggtggcgagtataagctgctcgagtactctagcgatacgacggtgatccaccagatcaaggattggatggaatcatgtactgagactcatgatctttgcaagcgaagcaaggctactctcccgactagagttattgatgttgggggcacgacggaccagcaccccaagctttatcttgctgatgatggcgaaattcaatcatacgctgcattgagctattgctggggacgagacagaagtgacgtcttgacacaagaagtgcttcctgagtttcaggtcgcaattcctctctccgctctacctgctacggtgctcgatgctgttcatctcacacgcgagcttggcttgcgctacctatgggttgatgcgttgtgcatcatacaggattcaagagaagactgggaaaaggaagcagccaaaatgagacacgtgtatcaaggagcggcgctcactattgcgggactcgaaagccatagcaagatcgcaggtctttttcgagaccgaagcgtgcgcgtcacccaagcacccatctttgacgggggtcgtcatctgatagttcaacgccagagaagggttcggctcgatatggctgttcttcgaaaaagagcttggacacttcaagagcagattctgagttctgcgacagtatacttctcaggctcgagtctagtatgggaatgtaacacctgtgtggtggatgaagacggcaaggatcatgaactaactcctcgcctcaagtggtttggagaggcgccaaatgagataggtgatcatcgcatatggtatagtctcgtccaggactatactgcaagatcaataacctatcaaaatgatcgcgtcgctgcaattgctggtcttgctgaccaatgcgaatcagagggatggcagctcggatcgtatatcgccggtctctggacagaggatcttccccgtgctcttctatggaaaggcacaatacgtcaagagactgagaaccggctgagtgcatggtggaacagagaacaattagctggagcctcgttcgtgtgggatatgccctcgtggtcgtggcttagcaatccttataatctgtattggccggatcctttcatccgtcaagataagaatgttgcgacaacctactgctgcgaatatgatgagtcgcggacacaaatattgccaaatgacaagataactagcacaaatgtcaaaggatctctcggacttacaggctatatacagcctttaaccgatcgtcttctgaaagctgtttcatcgcacgacgtttctccctttgacgagctctgcttcgatcacctcaagctactcgacaactctggactatggcgaccatcaaggcgctatcgcccgtacaagggtgtacaaccatggatggacatctcattcgacataggctggaaggctcttgttcaacaagtgtacctgcttcgagtctcttcctggccaacctctcttcccgctgatgggcctgatattggccgcggcgagtaccaatctgggtataaggtcgaagaagactaccttgacacatacttccttatcctcgaagtcgctaaggaacaaactgaccccgatggtaattccaaatggagttacaatccagacgataatcactatcgtgactctcttgatgaagacttcaatcaggaaacctacgacaatgcaattgctcttggtgaccttgcctcgtacaaaggagactgtgtgactcggttcaacactgcgatggaagaatgggcacggctacatctagcgacgttacatgagatgtcgccattgtttgaagagagcgagtatgaggtggagatccctcaagtactcctgcctgaaagcgagaacagggaaaatgaaaaacagcatgaagaacgtttttccgctgcgtcatttctaaagtctggtgttccttcgtgttttagacgcgtaggtgtacttgcgtttaggcattttagagatgacgagagcttcatgagggcagcgatcaaaatggagatctccttggtttaa

SEQ ID NO: 27078 - protein, 847 aa, Muscodor strobelii
  misc_feature: SGI Peptide ID NO. 569269
  misc_feature (248)..(388): Pfam Id: PF06985 Pfam Desc: Heterokaryon incompatibility protein (HET)
  misc_feature (248)..(333): Pfam Id: PF06985 Pfam Desc: Heterokaryon incompatibility protein (HET)
  misc_feature (202)..(540): NCBI GI: 145252262 Blast Desc: An16g03310 [Aspergillus niger] gi|134083190|emb|CAK42830.1| protein product [Aspergillus niger]
  misc_feature (199)..(532): NCBI GI: 46138087 Blast Desc: FG10558.1 [Gibberella zeae PH-1]
  misc_feature (203)..(590): NCBI GI: 39969899 Blast Desc: MGG_10558 [Magnaporthe grisea 70-15] gi|149209225|ref|XP_001521987.1| MGCH7_ch7g105 [Magnaporthe grisea 70-15] gi|86196060|gb|EAQ70698.1| MGCH7_ch7g105 grisea
  misc_feature (195)..(539): NCBI GI: 169610089 Blast Desc: SNOG_08138 [Phaeosphaeria nodorum SN15] gi|111063294|gb|EAT84414.1| SNOG_08138 [Phaeosphaeria nodorum SN15]
  misc_feature (199)..(540): NCBI GI: 159123464 Blast Desc: HET domain protein [Aspergillus fumigatus A1163]
  misc_feature (199)..(568): NCBI GI: 169613657 Blast Desc: SNOG_09961 [Phaeosphaeria nodorum SN15] gi|111061176|gb|EAT82296.1| SNOG_09961 [Phaeosphaeria nodorum SN15]
  misc_feature (220)..(592): NCBI GI: 256722781 Blast Desc: NECHADRAFT_5039 [Nectria haematococca mpVI 77-13-4]
  misc_feature (202)..(505): NCBI GI: 154317489 Blast Desc: BC1G_03096 [Botryotinia fuckeliana B05.10] gi|150844270|gb|EDN19463.1| BC1G_03096 [Botryotinia fuckeliana B05.10]
  misc_feature (187)..(532): NCBI GI: 28881154 Blast Desc: related to tol protein [Neurospora crassa]
  misc_feature (202)..(495): NCBI GI: 169777515 Blast Desc: [Aspergillus oryzae RIB40] gi|83771960|dbj|BAE62090.1| protein product [Aspergillus oryzae]
MSLMQKLDDKKREKYATKGVVLPSPTIYSEFSNELCCTCRLFIGDIWTKEAWEEASLSWWSEPDDETGISLFQHHCIWDLPVDLQQLDCILCRMLAHAFRQTPSFLSAEGPDERYGDHIYIARNFARSQKFFEIQALGETPEIQFDFNVLIQYGKGRVDPHWLDAYCAENGFDEATPEDPGGEYKLLEYSSDTTVIHQIKDWMESCTETHDLCKRSKATLPTRVIDVGGTTDQHPKLYLADDGEIQSYAALSYCWGRDRSDVLTQEVLPEFQVAIPLSALPATVLDAVHLTRELGLRYLWVDALCIIQDSREDWEKEAAKMRHVYQGAALTIAGLESHSKIAGLFRDRSVRVTQAPIFDGGRHLIVQRQRRVRLDMAVLRKRAWTLQEQILSSATVYFSGSSLVWECNTCVVDEDGKDHELTPRLKWFGEAPNEIGDHRIWYSLVQDYTARSITYQNDRVAAIAGLADQCESEGWQLGSYIAGLWTEDLPRALLWKGTIRQETENRLSAWWNREQLAGASFVWDMPSWSWLSNPYNLYWPDPFIRQDKNVATTYCCEYDESRTQILPNDKITSTNVKGSLGLTGYIQPLTDRLLKAVSSHDVSPFDELCFDHLKLLDNSGLWRPSRRYRPYKGVQPWMDISFDIGWKALVQQVYLLRVSSWPTSLPADGPDIGRGEYQSGYKVEEDYLDTYFLILEVAKEQTDPDGNSKWSYNPDDNHYRDSLDEDFNQETYDNAIALGDLASYKGDCVTRFNTAMEEWARLHLATLHEMSPLFEESEYEVEIPQVLLPESENRENEKQHEERFSAASFLKSGVPSCFRRVGVLAFRHFRDDESFMRAAIKMEISLV

SEQ ID NO: 27079 - DNA, 738 bp, Muscodor strobelii
  misc_feature: SGI EST ID NO. CUFF.63842.0
  misc_feature: Variant of the nucleotide sequence at SEQ ID NO 27077
gcatcatacaggattcaagagaagactgggaaaaggaagcagccaaaatgagacacgtgtatcaaggagcggcgctcactattgcgggactcgaaagccatagcaagatcgcaggtctttttcgagaccgaagcgtgcgcgtcacccaagcacccatctttgacgggggtcgtcatctgatagttcaacgccagagaagggttcggctcgatatggctgttcttcgaaaaagagcttggacacttcaagagcagattctgagttctgcgacagtatacttctcaggctcgagtctagtatgggaatgtaacacctgtgtggtggatgaagacggcaaggatcatgaactaactcctcgcctcaagtggtttggagaggcgccaaatgagataggtgatcatcgcatatggtatagtctcgtccaggactatactgcaagatcaataacctatcaaaatgatcgcgtcgctgcaattgctggtcttgctgaccaatgcgaatcagagggatggcagctcggatcgtatatcgccggtctctggacagaggatcttccccgtgctcttctatggaaaggcacaatacgtcaagagactgagaaccggctgagtgcatggtggaacagagaacaattagctggagcctcgttcgtgtgggatatgccctcgtggtcgtggcttagcaatccttataatctgtattggccggatcctttcatccgtcaagataagaatgttg

SEQ ID NO: 27080 - DNA, 975 bp, Muscodor strobelii
  misc_feature: SGI cDNA ID NO. 569270
  misc_feature: Reduced expression when VOC is produced
  misc_feature: Encodes the peptide sequence at SEQ ID NO 27081
atgagcagcacgacgtcgtacagtgggtactaccaagagcctacggcggcattttccacggccatgccacaaagcacaatagcgtaccagcccgagtacgggcaggacaataggcaaacgcagagttacagcgcgtacaacccgtcaatgctctacaacgtgccgcaggcgggtgcacagagtgccgtttacgatacgagtcaacagttcccgtcgcggcaacctgcaggcatgcagatgatgccagcggatgttaccgcgccttactttccgaacgagccaaccaacgcagccgcggctgctagcctacagccgcagacggggtcctcgagctcgtccgccgtatatcaacagagtccggcggaccaacgagcaatgcttcagacttaccccagcggtatgacgtctataagcggcatggcacagacaagcgcacctgaacaggttgttgaagagcaggaatatacggcatctgcggagatgggcgaggcttacgagcagtatcagacggcccttagggagatattcaccaacattcggaacggagtgttacaagcagcgagcgaatcgctacttagtgtgtcggagtggcttctcaccaaggtggttgaattaggccttactggagacgaagaagagctttacgcggaccgaatcaaactttggcgcgacttcaatcatgcatggctttcccttggccaaagacagaaggacatgatcgagtccggcgcccagctgcaacggggtcaatctttggtgagcgcagaagggctgaagaaaatgggccaagaggttgtacgactatgtaacggcatcgagcggcacggcttggtcgattacgagtacggagtttgggaagagcacatcattgacatcctcgaacagtgtctcgatctatacgagaacgctgacgaggccagtccagcactcgctaatacctcccgtcacgacggccactcttcccatcgtcgctga

SEQ ID NO: 27081 - protein, 324 aa, Muscodor strobelii
  misc_feature: SGI Peptide ID NO. 569270
  misc_feature (1)..(301): NCBI GI: 85101791 Blast Desc: NCU03830 [Neurospora crassa OR74A] gi|28922760|gb|EAA31983.1| conserved [Neurospora crassa OR74A] gi|38566798|emb|CAE76107.1| [Neurospora crassa]
  misc_feature (32)..(314): NCBI GI: 145605691 Blast Desc: MGG_06934 [Magnaporthe grisea 70-15] gi|145013493|gb|EDJ98134.1| MGG_06934 [Magnaporthe grisea 70-15]
  misc_feature (1)..(304): NCBI GI: 171694227 Blast Desc: protein product [Podospora anserina] gi|170947062|emb|CAP73867.1| protein product [Podospora anserina]
  misc_feature (7)..(304): NCBI GI: 116198261 Blast Desc: CHGG_07286 [Chaetomium globosum CBS 148.51] gi|88178565|gb|EAQ86033.1| CHGG_07286 [Chaetomium globosum CBS 148.51]
  misc_feature (3)..(299): NCBI GI: 261351528 Blast Desc: conserved [Verticillium albo-atrum VaMs.102]
  misc_feature (22)..(297): NCBI GI: 256731291 Blast Desc: NECHADRAFT_84620 [Nectria haematococca mpVI 77-13-4]
  misc_feature (9)..(315): NCBI GI: 156064419 Blast Desc: SS1G_00217 [Sclerotinia sclerotiorum 1980] gi|154691079|gb|EDN90817.1| SS1G_00217 [Sclerotinia sclerotiorum 1980]
  misc_feature (2)..(302): NCBI GI: 154323195 Blast Desc: BC1G_00941 [Botryotinia fuckeliana B05.10] gi|150848274|gb|EDN23467.1| BC1G_00941 [Botryotinia fuckeliana B05.10]
  misc_feature (43)..(315): NCBI GI: 121703696 Blast Desc: conserved [Aspergillus clavatus NRRL 1] gi|119398256|gb|EAW08686.1| conserved [Aspergillus clavatus NRRL 1]
  misc_feature (44)..(315): NCBI GI: 239613152 Blast Desc: conserved [Ajellomyces dermatitidis ER-3]
  misc_feature: Useful for introducing or modulating the production of volatile compounds
MSSTTSYSGYYQEPTAAFSTAMPQSTIAYQPEYGQDNRQTQSYSAYNPSMLYNVPQAGAQSAVYDTSQQFPSRQPAGMQMMPADVTAPYFPNEPTNAAAAASLQPQTGSSSSSAVYQQSPADQRAMLQTYPSGMTSISGMAQTSAPEQVVEEQEYTASAEMGEAYEQYQTALREIFTNIRNGVLQAASESLLSVSEWLLTKVVELGLTGDEEELYADRIKLWRDFNHAWLSLGQRQKDMIESGAQLQRGQSLVSAEGLKKMGQEVVRLCNGIERHGLVDYEYGVWEEHIIDILEQCLDLYENADEASPALANTSRHDGHSSHRR

SEQ ID NO: 27082 - DNA, 3198 bp, Muscodor strobelii
  misc_feature: SGI EST ID NO. CUFF.63876.0
  misc_feature: Variant of the nucleotide sequence at SEQ ID NO 27080
atcaacttataccctctttaagctcgaactttcaatgacaacttttcgcaatcgtcaatcgggaaaaaatcaactactgtattccaacacatcggggtcgctgggctatctgccaaacacacaaactatacacaaggcttggcacagtggtgttctctcgcgccaaatctttgaacacaattctgtaaaatccaaaaatccagtacccgagtcatctatcactctcttgagtactcctaaaaaaacgtggctggcaccaatcaccagagaagccagtttcgggagcagtcggtcacgcaccaaacaaaaccagatccgtaccacgattgctcaagaaccctccaacacttgacccatttttgtgcggcttgcacatcccccatcaatacgcagaggcagggtcatcgctgtctatattgaccagtcattctagtacttgcagggtcttcccagtacttatagtgacaaccgttgaacaaatcaattgccagcttcgtcaacatctcagccctctttgaggttgggctcgagctatctgaagtaagagacgcgactagggcgtggaggttcggggctgtcttcgtcgtcatacagtagaacggccaaggcgttgtgtgctggtattctacatatatcgtcgactgtttgtagcaaaagcttcaagcacctaagttcttgcgcctgcccttattacaaaggcggttgctgctccctggcaaactttttattattatttctgtccacccatcgccccctctaaataccatcccgcactccctcacccggccatacaacaactttaaaagtccatacgtacctccggtctcccaccacttatacgaaggctcaagctgctgggatcttcatccgatcttgcgggtcagattttgttcaccagcagatcccttcttgtcctcctgttcaaccgtgaaactcctgtcacccatactcaactcccgaacaagccatccttcacttgtcctcacgtaaccacttgcctaggttgcgcgcaagtctcagatcaagttgtcgcaacccgccatcaccttacactagtagtgttcttgtacttgtacgatacggcaggccggtcgatcctcgacacggccgacaaatagcaaactggccctactatacgcccaacccgctccgttgccggagtcgcagcggctgggctcgcctttccacccaaatagcgacctgttacggggtatggacgacaatagccggcggaggaggcaggacccgcctgtcagttcttcttccagtgtcaggtatccagttgatcccaatgcacaacgtagatcgtatggcggagggtcgttagataggtatcgacccgcgcctctcaatacgtcgccgtcggccactcgcggcatgagcagcacgacgtcgtacagtgggtactaccaagagcctacggcggcattttccacggccatgccacaaagcacaatagcgtaccagcccgagtacgggcaggacaataggcaaacgcagagttacagcgcgtacaacccgtcaatgctctacaacgtgccgcaggcgggtgcacagagtgccgtttacgatacgagtcaacagttcccgtcgcggcaacctgcaggcatgcagatgatgccagcggatgttaccgcgccttactttccgaacgagccaaccaacgcagccgcggctgctagcctacagccgcagacggggtcctcgagctcgtccgccgtatatcaacagagtccggcggaccaacgagcaatgcttcagacttaccccagcggtatgacgtctataagcggcatggcacagacaagcgcacctgaacaggttgttgaagagcaggaatatacggcatctgcggagatgggcgaggcttacgagcagtatcagacggcccttagggagatattcaccaacattcggaacggagtgttacaagcagcgagcgaatcgctacttagtgtgtcggagtggcttctcaccaaggtggttgaattaggccttactggagacgaagaagagctttacgcggaccgaatcaaactttggcgcgacttcaatcatgcatggctttcccttggccaaagacagaaggacatgatcgagtccggcgcccagctgcaacggggtcaatctttggtgagcgcagaagggctgaagaaaatgggccaagaggttgtacgactatgtaacggcatcgagcggcacggcttggtcgattacgagtacggagtttgggaagagcacatcattgacatcctcgaacagtgtctcgatctatacgagaacgctgacgaggccagtccagcactcgctaatacctcccgtcacgacggccactcttcccatcgtcgctgaagatagattctgactgaactcgagttccgagagctctgtacttacggcggcctaataggctagccttaatcactgtaacactacacatcgggaaggcgttttcattaagagcataatggttctgcatggacggggctagggtatcatcatctgggcaaggcctgctttccggatactatcgggtttatttacgccactacacacaaagcgccctgcgacgccgaacaatatttgcggcgccggcgtggcatccgctgagagggcagggctctactctgttccccctcttctctccaaccatgccaacataacaatgcatttcaattttggaggttctctggtttctgggtggtcatacggcttggtgagctcggcaagttcagggaacattgagcatgaggatctggcgaatggcggtcgtgacaaggcagcaaatgaagcactgaacaaggacatgggtatgatctatagagtggaggcgtacacggctgtacgaatggagtctaagaatacccctgagcctaattcttgtacaggcaaagatgagaatgggacatagaaaattgggtaaacagggggagcacatgatgctctcatagattattttggtttcacgggatttctaagagcataaggcgttctatcggtttgctggagagacacggcattggtctcctctacagtattgctcagacgcatcaaatggtggcagccgggagggctgggtcccaaagcctcggtgggctgggcacgagcagtgtatagttacatgtagcggtgaaacataaactggagcaaccatttcgatgcatcacgtacatacgtgcaggcacatgatgggcgaga

SEQ ID NO: 27083 - DNA, 900 bp, Muscodor strobelii
  misc_feature: SGI cDNA ID NO. 569271
  misc_feature: Reduced expression when VOC is produced
  misc_feature: Encodes the peptide sequence at SEQ ID NO 27084
atgtcatccctacggtctggagtccggtgcttaaggggcttccgagcacccgtcaaaacgatacgacctcacaacgtcattccgaggcgagccatcacgacgacaacccccaaacaagacgaggacctccaattcagtataaatcggagggcagacgaagtagaaagtttctacgcccgccccgtacccgcgtctccatcctatttctcccgcttcccccagttcaacgacagcttcgtacaaatccaggagctagcccagaaatacggcaggctgcctaccctccccaaagcagatgtcgagcgcatttcgtggaagacgaaagatcaattccgtcgggatgtgggagagaaagtcaaggcgagggactacgcgacgtgtataacactggtcaagaaactacactccatccacccagaattgatgccggccgccgttctggagggcatcctgcccttcaagcgtcatctcaacgcgctggacaacggcaagaaagtggctcccatcgacaagttcggtcgcacacacggtgtcggcaagaggaaatcctcagtggcacgagcttgggtggttgagggtaatggcgaagtcttgatcaacggcaagactctgaatgatatgtttggacgtgttcacgatcgcgagagtgcactttggggcttgaagactacggaacggctggacaagtacaatgtctgggccaaggtcgagggtggtggctcgactggtcaggctgaggctctggccatggctattgctaaggctttgatggttcatgagccgccgttgaagaccattctcagaagagccggctgtatcaccagagattacaggaccgtggagaggaagaagcctggtcatctcaaggccagaaagagcccggcctgggtcaagcgttga

SEQ ID NO: 27084 - protein, 299 aa, Muscodor strobelii
  misc_feature: SGI Peptide ID NO. 569271
  misc_feature (179)..(299): Pfam Id: PF00380 Pfam Desc: Ribosomal protein S9/S16
  misc_feature (58)..(299): NCBI GI: 116198265 Blast Desc: CHGG_07288 [Chaetomium globosum CBS 148.51] gi|88178567|gb|EAQ86035.1| CHGG_07288 [Chaetomium globosum CBS 148.51]
  misc_feature (1)..(299): NCBI GI: 39978101 Blast Desc: MGG_06935 [Magnaporthe grisea 70-15] gi|145013491|gb|EDJ98132.1| MGG_06935 [Magnaporthe grisea 70-15]
  misc_feature (58)..(299): NCBI GI: 85101779 Blast Desc: NCU03827 [Neurospora crassa OR74A] gi|52783387|sp|Q7S7R6.1|RT09_NEUCR RecName: Full=40S ribosomal protein S9, mitochondrial; Flags: Precursor [Neurospora crassa to
  misc_feature (58)..(299): NCBI GI: 261351529 Blast Desc: 40S ribosomal protein S9 [Verticillium albo-atrum VaMs.102]
  misc_feature (58)..(299): NCBI GI: 256731293 Blast Desc: [Nectria haematococca mpVI 77-13-4]
  misc_feature (54)..(272): NCBI GI: 171694225 Blast Desc: protein product [Podospora anserina] gi|170947061|emb|CAP73866.1| protein product [Podospora anserina]
  misc_feature (1)..(290): NCBI GI: 46126049 Blast Desc: FG07402.1 [Gibberella zeae PH-1]
  misc_feature (60)..(299): NCBI GI: 169599192 Blast Desc: SNOG_02413 [Phaeosphaeria nodorum SN15] gi|111069505|gb|EAT90625.1| SNOG_02413 [Phaeosphaeria nodorum SN15]
  misc_feature (60)..(299): NCBI GI: 189208784 Blast Desc: 40S ribosomal protein S9, mitochondrial precursor [Pyrenophora tritici-repentis Pt-1C-BFP] gi|187976818|gb|EDU43444.1| 40S ribosomal protein S9, precursor
  misc_feature (38)..(299): NCBI GI: 242823745 Blast Desc: 37S ribosomal protein S9 [Talaromyces stipitatus ATCC 10500] gi|218713042|gb|EED12467.1| 37S ribosomal protein S9 [Talaromyces stipitatus ATCC 10500]
  misc_feature: Useful for introducing or modulating the production of volatile compounds
MSSLRSGVRCLRGFRAPVKTIRPHNVIPRRAITTTTPKQDEDLQFSINRRADEVESFYARPVPASPSYFSRFPQFNDSFVQIQELAQKYGRLPTLPKADVERISWKTKDQFRRDVGEKVKARDYATCITLVKKLHSIHPELMPAAVLEGILPFKRHLNALDNGKKVAPIDKFGRTHGVGKRKSSVARAWVVEGNGEVLINGKTLNDMFGRVHDRESALWGLKTTERLDKYNVWAKVEGGGSTGQAEALAMAIAKALMVHEPPLKTILRRAGCITRDYRTVERKKPGHLKARKSPAWVKR

SEQ ID NO: 27085 - DNA, 1466 bp, Muscodor strobelii
  misc_feature: SGI EST ID NO. CUFF.63907.0
  misc_feature: Variant of the nucleotide sequence at SEQ ID NO 27083
ctggagtctagcaaggatcgacaacgccttgggcaattctagctcatcgcgtgaaaacaccaagaaaacccgtaatcgacatcacgaactccgaaccttgcggcctcggctcatctatcaactcgccgaatgagcgggtcatgacgatcaagcgataaccaaccgccatgtcatccctacggtctggagtccggtgcttaaggggcttccgagcacccgtcaaaacgatacgacctcacaacgtcattccgaggcgagccatcacgacgacaacccccaaacaagacgaggacctccaattcagtataaatcggagggcagacgaagtagaaagtttctacgcccgccccgtacccgcgtctccatcctatttctcccgcttcccccagttcaacgacagcttcgtacaaatccaggagctagcccagaaatacggcaggctgcctaccctccccaaagcagatgtcgagcgcatttcgtggaagacgaaagatcaattccgtcgggatgtgggagagaaagtcaaggcgagggactacgcgacgtgtataacactggtcaagaaactacactccatccacccagaattgatgccggccgccgttctggagggcatcctgcccttcaagcgtcatctcaacgcgctggacaacggcaagaaagtggctcccatcgacaagttcggtcgcacacacggtgtcggcaagaggaaatcctcagtggcacgagcttgggtggttgagggtaatggcgaagtcttgatcaacggcaagactctgaatgatatgtttggacgtgttcacgatcgcgagagtgcactttggggcttgaagactacggaacggctggacaagtacaatgtctgggccaaggtcgagggtggtggctcgactggtcaggctgaggctctggccatggctattgctaaggctttgatggttcatgagccgccgttgaagaccattctcagaagagccggctgtatcaccagagattacaggaccgtggagaggaagaagcctggtcatctcaaggccagaaagagcccggcctgggtcaagcgttgagagacttgcttgggttgtgtccatcctgcagtcgttgttcagaaagccacgcgcatcttcctcattttcctcgtcatctaaatgattttgcccatcccgtttgcgaggtagtttgcgaggtagattttgcatcacatgctgcgagacatgtagctgtacaaagaaatgtaacaatattgtacctaccaagcttcctacttgcccaactataatgaacttaggaaagatgagacgccctccccttgacatgaaagcccaagtcgcatatacctgaagtctcgtgatcctctaccgtcgacaccttattcgccacttgggcattaagatcgtcaattcagtccgcctaggtgtcaattcttatcccgcgggatgccgagttgtactattcacatgtgaagc

SEQ ID NO: 27086 - DNA, 1236 bp, Muscodor strobelii
  misc_feature: SGI cDNA ID NO. 569272
  misc_feature: Encodes the peptide sequence at SEQ ID NO 27087
atggctttcggaaaactctacactcgcgagctcaacccccgcagcaccgccatccttgcggttgctaaggccaacggcctcgatctcgagcgcgttgaggttgacgctgccaacgtccccgctgagctcaccaacatcaacaagctcggcaaggtccctaccttcgtcggcgctgatggctacgtcctctccgagtgcattgctatcgccatctacatcacctcccagaacgagaagactactctcctcggcaagaccaagcaggactatgcctcgatcctgaagtggatgtccttcttcaactcggaggtcctcatgaacctcggcgcctggtaccgccctctgctcggcctggacccctacaataagaagtccatcgatgacgcccagaaggctgccaacaaggccatctctatcgtcgaggagcacctcctcacccagacctacctcgtcggtgagcgtgccactctcgctgatctgttcgccgccggcatcatctcccgcggcttccagttcttcttcgacaaggcctggcgcgccgagtaccccaacaccacccgttggtactcgaccgtctacaaccagcccatttacctcgaggttgccaaacctctcgagctccttgacacccccaagctagtcaacactcctcccaagaaggctgagaaggctcccaaggctcctaagcctgctgccgcccccaagcctgccgctgccgtcgaggaggacgagcccgctcctgctcctaagcccaagcacccttgcgacctcctccccaagtccgagttccctctggatgagtggaagcgctacttctccaacaaccccgaggaccaagccctcgcgtggttctgggagaatgttcccttcaaggactactccatctggaaggtcaactacaagtacaacaacgagttgaagctgactttcatgtccaacaacttgattggtggattcaataaccgtcttgagggctcccgcaagtacctcttcggcgccgcctccgtctatggcgagaacaacaactccatcatcgagggtgctttcgtcatccgtggtgaggactacctccccgtcttcgacgtcgctcccgattacgagagctacgagttcatcaagctcgacccctccaagcccgaggaccgcgctgttgttgagtccatgtggaagtgggacaagcctgttaccgttgacggcaaggagtacccccacgccgatggcaaggtcttcaagtaa

SEQ ID NO: 27087 - protein, 411 aa, Muscodor strobelii
  misc_feature: SGI Peptide ID NO. 569272
  misc_feature (250)..(355): Pfam Id: PF00647 Pfam Desc: Elongation factor 1 gamma, conserved domain
  misc_feature (104)..(196): Pfam Id: PF00043 Pfam Desc: Glutathione S-transferase, C-terminal domain
  misc_feature (2)..(75): Pfam Id: PF02798 Pfam Desc: Glutathione S-transferase, N-terminal domain
  misc_feature (1)..(411): NCBI GI: 85101774 Blast Desc: elongation factor 1-gamma [Neurospora crassa OR74A] gi|28922756|gb|EAA31979.1| elongation factor 1-gamma [Neurospora crassa OR74A] gi|38566795|emb|CAE76104.1| translation elongation
  misc_feature (1)..(411): NCBI GI: 39978103 Blast Desc: MGG_06936 [Magnaporthe grisea 70-15] gi|145013490|gb|EDJ98131.1| MGG_06936 [Magnaporthe grisea 70-15]
  misc_feature (1)..(411): NCBI GI: 171694223 Blast Desc: protein product [Podospora anserina] gi|170947060|emb|CAP73865.1| protein product [Podospora anserina]
  misc_feature (1)..(411): NCBI GI: 116198267 Blast Desc: CHGG_07289 [Chaetomium globosum CBS 148.51] gi|88178568|gb|EAQ86036.1| CHGG_07289 [Chaetomium globosum CBS 148.51]
  misc_feature (1)..(411): NCBI GI: 154323191 Blast Desc: BC1G_00939 [Botryotinia fuckeliana B05.10] gi|150848272|gb|EDN23465.1| BC1G_00939 [Botryotinia fuckeliana B05.10]
  misc_feature (1)..(411): NCBI GI: 156064425 Blast Desc: 40S ribosomal protein S3aE [Sclerotinia sclerotiorum 1980] gi|154691082|gb|EDN90820.1| 40S ribosomal protein S3aE [Sclerotinia sclerotiorum 1980]
  misc_feature (1)..(411): NCBI GI: 46126047 Blast Desc: FG07401.1 [Gibberella zeae PH-1]
  misc_feature (1)..(411): NCBI GI: 169599190 Blast Desc: SNOG_02412 [Phaeosphaeria nodorum SN15] gi|111069504|gb|EAT90624.1| SNOG_02412 [Phaeosphaeria nodorum SN15]
  misc_feature (1)..(411): NCBI GI: 256730913 Blast Desc: [Nectria haematococca mpVI 77-13-4]
  misc_feature (1)..(411): NCBI GI: 70984206 Blast Desc: translation elongation factor eEF-1 subunit gamma [Aspergillus fumigatus Af293] gi|66845248|gb|EAL85583.1| translation elongation factor eEF-1 subunit gamma, [Aspergillus
  misc_feature (1)..(207): SWISSPROT Homolog: EC 2.5.1.18 Glutathione transferase
MAFGKLYTRELNPRSTAILAVAKANGLDLERVEVDAANVPAELTNINKLGKVPTFVGADGYVLSECIAIAIYITSQNEKTTLLGKTKQDYASILKWMSFFNSEVLMNLGAWYRPLLGLDPYNKKSIDDAQKAANKAISIVEEHLLTQTYLVGERATLADLFAAGIISRGFQFFFDKAWRAEYPNTTRWYSTVYNQPIYLEVAKPLELLDTPKLVNTPPKKAEKAPKAPKPAAAPKPAAAVEEDEPAPAPKPKHPCDLLPKSEFPLDEWKRYFSNNPEDQALAWFWENVPFKDYSIWKVNYKYNNELKLTFMSNNLIGGFNNRLEGSRKYLFGAASVYGENNNSIIEGAFVIRGEDYLPVFDVAPDYESYEFIKLDPSKPEDRAVVESMWKWDKPVTVDGKEYPHADGKVFK

SEQ ID NO: 27088 - DNA, 1626 bp, Muscodor strobelii
  misc_feature: SGI EST ID NO. CUFF.63955.0
  misc_feature: Variant of the nucleotide sequence at SEQ ID NO 27086
ttcccctctcctcctcttcaccaccatctatctgtctccccaagcaaccataggaaacatcggtcaccatggctttcggaaaactctacactcgcgagctcaacccccgcagcaccgccatccttgcggttgctaaggccaacggcctcgatctcgagcgcgttgaggttgacgctgccaacgtccccgctgagctcaccaacatcaacaagctcggcaaggtccctaccttcgtcggcgctgatggctacgtcctctccgagtgcattgctatcgccatctacatcacctcccagaacgagaagactactctcctcggcaagaccaagcaggactatgcctcgatcctgaagtggatgtccttcttcaactcggaggtcctcatgaacctcggcgcctggtaccgccctctgctcggcctggacccctacaataagaagtccatcgatgacgcccagaaggctgccaacaaggccatctctatcgtcgaggagcacctcctcacccagacctacctcgtcggtgagcgtgccactctcgctgatctgttcgccgccggcatcatctcccgcggcttccagttcttcttcgacaaggcctggcgcgccgagtaccccaacaccacccgttggtactcgaccgtctacaaccagcccatttacctcgaggttgccaaacctctcgagctccttgacacccccaagctagtcaacactcctcccaagaaggctgagaaggctcccaaggctcctaagcctgctgccgcccccaagcctgccgctgccgtcgaggaggacgagcccgctcctgctcctaagcccaagcacccttgcgacctcctccccaagtccgagttccctctggatgagtggaagcgctacttctccaacaaccccgaggaccaagccctcgcgtggttctgggagaatgttcccttcaaggactactccatctggaaggtcaactacaagtacaacaacgagttgaagctgactttcatgtccaacaacttgattggtggattcaataaccgtcttgagggctcccgcaagtacctcttcggcgccgcctccgtctatggcgagaacaacaactccatcatcgagggtgctttcgtcatccgtggtgaggactacctccccgtcttcgacgtcgctcccgattacgagagctacgagttcatcaagctcgacccctccaagcccgaggaccgcgctgttgttgagtccatgtggaagtgggacaagcctgttaccgttgacggcaaggagtacccccacgccgatggcaaggtcttcaagtaaacgacaaatttacttgcctcatgttgagatgattacgtgatgatgatgaggttacgcatggtcggatagggatggatcgggatagaaaacacaacggttcgggacgatgagaagctgatcggacagtttatgagatggcagtctatgaagcaccaacaaatgaagtaaaactaccatggcattgacatttgtctgtcatcaaaccttttctgcttttacgcggctcgcatgggctattcgacgtgacattgtcttgaggatacccctgatttaacctgttttttgaacctctataggcgagtaggtggaaacagatcttccc

SEQ ID NO: 27089 - DNA, 1383 bp, Muscodor strobelii
  misc_feature: SGI cDNA ID NO. 569273
  misc_feature: Encodes the peptide sequence at SEQ ID NO 27090
atgggcgcagcgtttcggtgccttgccttcaacgttgttcgacgagcacaatctcacacattctgggttatcgacacgtttccctaccctggatccgaagtctacgatgacctgccaatctccgcgttagattggtggtggaattctgctgaatgggatcacttccttctcgaggaagagtttcagtccgaacaactaggaggtataaaatctaatcagctggcaccgcttcataaatggctcgatttcggattggaattcccactggtatacgggggccatacatctgcacaacagtataggctcgcgcaattccaggctctcttcgactcggagtctatagttatacgcgagggtgaatgggccgattggcttcgaaaagatcactggtataatacaaacttctggagcgttgacaatgtcaacgtatggcaagcaatgaggccagcaattgaactatgtaaccgcatatggtcatattgcatcaccgagagacatgctggacttcagactttcctgtatggccgcctagactactggaagaggtggaacccaaatacgcctcgtggtcttggcaatagtattgtcttgatgtcgctcgaacttgaacgcagattatctgcaaataggggaatcccttgttttggagagtatatgactcagctcacggacggggactacgttgagcgattgcgacatctcaccaagaatcttacatggtacatcgccgatatcgacaaagatggggtgatgagttggggtgaaacctttatgaagagccatgtaatcggggtcaactccaaattggtccgatcactcatggataacagcataactctgtccgagagatgcctgattactttaaacctaaccaccaccctattgcatgagagcatgcatgtaataatagatactcgattaaaagataagcaaaatgatccggcatggttcttagacccatctcgttatcatcctcgcgaaccttcgctcgatttcataggcgacgatccatgggattgggaagcgggagaggaattcgagcacgtgtgggcttctcagcttttgtcggagtcgttttgggataacaatcaaacaccggaaggcgtagcttatcagaaaagtgccaaccactttcagcgaagaacggtcattgaagctagggaattcgagcctgctcgcattgcggtcgacactggctttccggcttcggtcacggggctcgatgaatatgagaaagtcagccaggactggagaaaccgcgagaccacaatcaaacgccaccgacgctcgtggtatccgcatgcaatagggccatgggaaatatcgcctgtgagcattggccactactggattttctgcattgtgttcctgactatatcctaa

SEQ ID NO: 27090 - protein, 460 aa, Muscodor strobelii
  misc_feature: SGI Peptide ID NO. 569273
MGAAFRCLAFNVVRRAQSHTFWVIDTFPYPGSEVYDDLPISALDWWWNSAEWDHFLLEEEFQSEQLGGIKSNQLAPLHKWLDFGLEFPLVYGGHTSAQQYRLAQFQALFDSESIVIREGEWADWLRKDHWYNTNFWSVDNVNVWQAMRPAIELCNRIWSYCITERHAGLQTFLYGRLDYWKRWNPNTPRGLGNSIVLMSLELERRLSANRGIPCFGEYMTQLTDGDYVERLRHLTKNLTWYIADIDKDGVMSWGETFMKSHVIGVNSKLVRSLMDNSITLSERCLITLNLTTTLLHESMHVIIDTRLKDKQNDPAWFLDPSRYHPREPSLDFIGDDPWDWEAGEEFEHVWASQLLSESFWDNNQTPEGVAYQKSANHFQRRTVIEAREFEPARIAVDTGFPASVTGLDEYEKVSQDWRNRETTIKRHRRSWYPHAIGPWEISPVSIGHYWIFCIVFLTIS

SEQ ID NO: 27091 - DNA, 648 bp, Muscodor strobelii
  misc_feature: SGI cDNA ID NO. 569274
  misc_feature: Encodes the peptide sequence at SEQ ID NO 27092
atgatgtctaaaagctcggctcttgataacttctcacgtgcttctggtcaacttcaagacgtcaacaccaaggctagctaccaatccaacttcctaacactcaacgcactgaagccctcctacataaagcataacactcccgtcttcgtggcaagaaggaagacaacaacacagagcactcttgatcaataccagcacgccgtcaacccggtcacactcgctccagttaaagacgtcgataccaagtcctcaatccacgtcttcctctacttctacagggcgcccgtcttccactacgtccggatgcgcgagtacccctacatcatcttccgagacaccgccttccgcatcatccccctcatcgtcttcttcgcccgtgcgtatcaccaccggccccgtctcacctttgccgaacatctctacgccggtatcctcttcggcatgccgttccacatcgccgggtgggtcctctactggaatagggacagaaactggatgggcagattcgtgaggtggcatatgaggagacagatgcgcgcttatgagagagagcaggaggagggctggcagtggttttgggcggagaggtttgagcagtgggaggaagaggagggaagacgcctttggattaggcagatgaggttttag

SEQ ID NO: 27092 - protein, 215 aa, Muscodor strobelii
  misc_feature: SGI Peptide ID NO. 569274
MMSKSSALDNFSRASGQLQDVNTKASYQSNFLTLNALKPSYIKHNTPVFVARRKTTTQSTLDQYQHAVNPVTLAPVKDVDTKSSIHVFLYFYRAPVFHYVRMREYPYIIFRDTAFRIIPLIVFFARAYHHRPRLTFAEHLYAGILFGMPFHIAGWVLYWNRDRNWMGRFVRWHMRRQMRAYEREQEEGWQWFWAERFEQWEEEEGRRLWIRQMRF

SEQ ID NO: 27093 - DNA, 1650 bp, Muscodor strobelii
  misc_feature: SGI cDNA ID NO. 569275
  misc_feature: Reduced expression when VOC is produced
  misc_feature: Encodes the peptide sequence at SEQ ID NO 27094
atggcgactgcgccttccgctaacaacggaggcgccctgtctccgcgatctttcgcccacaagcaccagcgacctcaggccgccttcaaaggatgctcgcgcatcaacgactacgagcagctgggcaagctgggcgagggcacattcggcgaggtccacaaggccagatccaagaggaccggcgcattggtggcattgaagaagatcatcatgcacaacgagaaggatggctttcccatcaccgccctcagagagatcaagctcttgaagcttctatcccacaagaatgtcttgcatctggaggacatggccgtcgagcatcactccaagatcatcgacaagagaaaacggcccataatatacatggtcatgccctatatggaccacgatctttcgggattgctcgatagccctgccgtgcggttcaccgtaccccagatcaaatgctacctgatacagctgtttcgtggcctccagtacatccatgagagcaagattcttcatcgcgatatgaaagcggcgaatttgctcatcaacaacaaaggcatactccagattgcggattttggcttggctcgtcactacgatgggcctgtgccccaggccggtaacggtggtggcgagggcaagagagattacacgagcctggtggtcaccagatggtaccggcctcccgagctcttaatgcatctcaaaaagtacaccactgctatcgacatgtggggtgttgggtgtgtctttggcgaaatgttagtgggtaagccgattcttgctggcgagagcgacgcccatcagcttgagattatcttcgatctggtcggctcccccaacgagcagaatatgcccggatggcgacagttgcccggtgcagagagtctcacgccacgaaccagaccaggatcgctatccacacgctttagggagcacggagcgacggctgtgtctctgctcaaagagctcctccagctagactggcgcactcgtgtcaatgccattgatgcattggagcatccatatttcagggattcgcctctaccagccaagccagaagatatacccacctttgacgatagccacgagctggataggagaaagttccatgatcgcaaggcggtccttccacccgcccctaagggtggaactgttggtggtgcttttgacggacctaatgttggctttggaagtggtgatggatatggtaataggggaggagaccgcagatacaacggcggaaatcgcaataacgatgatggccgtcgccctgcctgggccagagagcaaccacgtcatgagcatagactgccaccccgaccacccggcccacctcctgagaatccctccggtggatgggatggcccgggagatcatcatgactcttatagggacagaaaccgccaaccgcgtaatcgtggtggcaacacccgaccagacgtcgatacctacattccgagttataacggagcaggagacgaaagacccagggaacaccggccggctcgtgatgatcggcatagatatgacgaccgcgaccgagacgataggcggcgtgactatcgcgatcgatatgatgaccgcggccggactagtatgacccgcagccgaagtcgcacgccggtccgggaccgtgacagagatccacaccggcgatag

SEQ ID NO: 27094 - protein, 549 aa, Muscodor strobelii
  misc_feature: SGI Peptide ID NO. 569275
  misc_feature (38)..(340): Pfam Id: PF00069 Pfam Desc: Protein kinase domain
  misc_feature (38)..(246): Pfam Id: PF07714 Pfam Desc: Protein tyrosine kinase
  misc_feature (13)..(489): NCBI GI: 74697003 Blast Desc: BUR1_NEUCR RecName: Full=Serine/threonine-protein kinase bur-1 gi|28950346|emb|CAD70970.1| related to cyclin dependent kinase C [Neurospora crassa]
  misc_feature (14)..(485): NCBI GI: 171692775 Blast Desc: protein product [Podospora anserina] gi|170946336|emb|CAP73137.1| protein product [Podospora anserina]
  misc_feature (14)..(399): NCBI GI: 46126063 Blast Desc: FG07409.1 [Gibberella zeae PH-1] gi|85540959|sp|Q4I5U9.1|BUR1_GIBZE RecName: Full=Serine/threonine-protein kinase BUR1
  misc_feature (1)..(401): NCBI GI: 256730909 Blast Desc: [Nectria haematococca mpVI 77-13-4]
  misc_feature (1)..(541): NCBI GI: 156064383 Blast Desc: SS1G_00199 [Sclerotinia sclerotiorum 1980] gi|154691061|gb|EDN90799.1| SS1G_00199 [Sclerotinia sclerotiorum 1980]
  misc_feature (1)..(538): NCBI GI: 154312114 Blast Desc: BC1G_06090 [Botryotinia fuckeliana B05.10] gi|150850053|gb|EDN25246.1| BC1G_06090 [Botryotinia fuckeliana B05.10]
  misc_feature (29)..(549): NCBI GI: 74697940 Blast Desc: BUR1_EMENI RecName: Full=Serine/threonine-protein kinase bur1; AltName: Full=PITALRE-like kinase A gi|14530079|emb|CAC42219.1| pitalre-like kinase [Emericella TPA:
  misc_feature (29)..(490): NCBI GI: 225562257 Blast Desc: serine/threonine-protein kinase bur-1 [Ajellomyces capsulatus G186AR]
  misc_feature (29)..(490): NCBI GI: 240277338 Blast Desc: serine/threonine protein kinase bur-1 [Ajellomyces capsulatus H143]
  misc_feature (29)..(537): NCBI GI: 238839452 Blast Desc: serine/threonine-protein kinase bur1 [Microsporum canis CBS 113480]
  misc_feature (6)..(395): SWISSPROT Homolog: EC 2.7.11.22 Cyclin-dependent kinase
  misc_feature (6)..(395): SWISSPROT Homolog: EC 2.7.11.23 [RNA-polymerase]-subunit kinase
  misc_feature: Useful for introducing or modulating the production of volatile compounds
MATAPSANNGGALSPRSFAHKHQRPQAAFKGCSRINDYEQLGKLGEGTFGEVHKARSKRTGALVALKKIIMHNEKDGFPITALREIKLLKLLSHKNVLHLEDMAVEHHSKIIDKRKRPIIYMVMPYMDHDLSGLLDSPAVRFTVPQIKCYLIQLFRGLQYIHESKILHRDMKAANLLINNKGILQIADFGLARHYDGPVPQAGNGGGEGKRDYTSLVVTRWYRPPELLMHLKKYTTAIDMWGVGCVFGEMLVGKPILAGESDAHQLEIIFDLVGSPNEQNMPGWRQLPGAESLTPRTRPGSLSTRFREHGATAVSLLKELLQLDWRTRVNAIDALEHPYFRDSPLPAKPEDIPTFDDSHELDRRKFHDRKAVLPPAPKGGTVGGAFDGPNVGFGSGDGYGNRGGDRRYNGGNRNNDDGRRPAWAREQPRHEHRLPPRPPGPPPENPSGGWDGPGDHHDSYRDRNRQPRNRGGNTRPDVDTYIPSYNGAGDERPREHRPARDDRHRYDDRDRDDRRRDYRDRYDDRGRTSMTRSRSRTPVRDRDRDPHRR

SEQ ID NO: 27095 - DNA, 2196 bp, Muscodor strobelii
  misc_feature: SGI EST ID NO. CUFF.64000.2
  misc_feature: Variant of the nucleotide sequence at SEQ ID NO 27093
cacgtgtacaggtagtggggcgagtccggtacctaagttaccttacctgtcaatggcatggagcattcccgcctagggtggtgctacccgtacgtcgtcgcgattcgcgtgccatcatcattttctttgtagctatcgccaaaaccacatgcgcccaccccacatggataacccacgacacgtgcgctcattcatataatcattatttctagtaatcttcctctatctgacacgcgcgctcacattccatcatggcgactgcgccttccgctaacaacggaggcgccctgtctccgcgatctttcgcccacaagcaccagcgacctcaggccgccttcaaaggatgctcgcgcatcaacgactacgagcagctgggcaagctgggcgagggcacattcggcgaggtccacaaggccagatccaagaggaccggcgcattggtggcattgaagaagatcatcatgcacaacgagaaggatggctttcccatcaccgccctcagagagatcaagctcttgaagcttctatcccacaagaatgtcttgcatctggaggacatggccgtcgagcatcactccaagatcatcgacaagagaaaacggcccataatatacatggtcatgccctatatggaccacgatctttcgggattgctcgatagccctgccgtgcggttcaccgtaccccagatcaaatgctacctgatacagctgtttcgtggcctccagtacatccatgagagcaagattcttcatcgcgatatgaaagcggcgaatttgctcatcaacaacaaaggcatactccagattgcggattttggcttggctcgtcactacgatgggcctgtgccccaggccggtaacggtggtggcgagggcaagagagattacacgagcctggtggtcaccagatggtaccggcctcccgagctcttaatgcatctcaaaaagtacaccactgctatcgacatgtggggtgttgggtgtgtctttggcgaaatgttagtgggtaagccgattcttgctggcgagagcgacgcccatcagcttgagattatcttcgatctggtcggctcccccaacgagcagaatatgcccggatggcgacagttgcccggtgcagagagtctcacgccacgaaccagaccaggatcgctatccacacgctttagggagcacggagcgacggctgtgtctctgctcaaagagctcctccagctagactggcgcactcgtgtcaatgccattgatgcattggagcatccatatttcagggattcgcctctaccagccaagccagaagatatacccacctttgacgatagccacgagctggataggagaaagttccatgatcgcaaggcggtccttccacccgcccctaagggtggaactgttggtggtgcttttgacggacctaatgttggctttggaagtggtgatggatatggtaataggggaggagaccgcagatacaacggcggaaatcgcaataacgatgatggccgtcgccctgcctgggccagagagcaaccacgtcatgagcatagactgccaccccgaccacccggcccacctcctgagaatccctccggtggatgggatggcccgggagatcatcatgactcttatagggacagaaaccgccaaccgcgtaatcgtggtggcaacacccgaccagacgtcgatacctacattccgagttataacggagcaggagacgaaagacccagggaacaccggccggctcgtgatgatcggcatagatatgacgaccgcgaccgagacgataggcggcgtgactatcgcgatcgatatgatgaccgcggccggactagtatgacccgcagccgaagtcgcacgccggtccgggaccgtgacagagatccacaccggcgataggatggtcgtggtggagatttgtacgggcagcaaggtggtcgtgatacccgagatccgtattatgaacggcccaaccgggattactactggaaccagagagacccatatgcatatgggcgataggggagtcgcgatacccgagatagagataggaggcatgtaaataacctcccgacataatgatttttatgattgtaccagatagctgtacggtttacagaatggtagcgatacccgagaagatactagtagcaggcataacaatagcgatcaacatagtcattcttaaaatgag

SEQ ID NO: 27096 - DNA, 315 bp, Muscodor strobelii
  misc_feature: SGI cDNA ID NO. 569276
  misc_feature: Encodes the peptide sequence at SEQ ID NO 27097
atgtcgacatttgaggtagcagctatccttgttgattgttgcacgctcttgagctttctcattcagctacagaggtacatacccccatcgtcgcggcaaaacaccggcaacagccgccggccagtcggcatccgccttcagccacccacacactatcacaatggctggcggtcccggtcccatcaaggctcacacccgggcatctacaagttcgctggcaccgccctcggcgccagcatgtggttcttcttgatgtaccgcgcgagaaaagatggtcccgttttgatgggctggaagcacccctgggatcattag

SEQ ID NO: 27097 - protein, 104 aa, Muscodor strobelii
  misc_feature: SGI Peptide ID NO. 569276
  misc_feature (66)..(104): NCBI GI: 154312112 Blast Desc: BC1G_06089 [Botryotinia fuckeliana B05.10] gi|150850052|gb|EDN25245.1| BC1G_06089 [Botryotinia fuckeliana B05.10]
  misc_feature (66)..(104): NCBI GI: 39978085 Blast Desc: [Magnaporthe grisea 70-15] gi|145013500|gb|EDJ98141.1| [Magnaporthe grisea 70-15]
  misc_feature (66)..(104): NCBI GI: 238839455 Blast Desc: conserved [Microsporum canis CBS 113480]
  misc_feature (68)..(104): NCBI GI: 212536008 Blast Desc: conserved [Penicillium marneffei ATCC 18224] gi|210070559|gb|EEA24649.1| conserved [Penicillium marneffei ATCC 18224]
  misc_feature (68)..(104): NCBI GI: 154284283 Blast Desc: [Ajellomyces capsulatus NAm1] gi|150411117|gb|EDN06505.1| [Ajellomyces capsulatus NAm1] gi|225562256|gb|EEH10536.1| conserved [Ajellomyces capsulatus
  misc_feature (68)..(104): NCBI GI: 242794634 Blast Desc: conserved [Talaromyces stipitatus ATCC 10500] gi|218719003|gb|EED18423.1| conserved [Talaromyces stipitatus ATCC 10500]
  misc_feature (65)..(104): NCBI GI: 259482916 Blast Desc: TPA: [Aspergillus nidulans FGSC A4]
  misc_feature (68)..(104): NCBI GI: 258571445 Blast Desc: [Uncinocarpus reesii 1704] gi|237904796|gb|EEP79197.1| [Uncinocarpus reesii 1704]
  misc_feature (68)..(104): NCBI GI: 261190821 Blast Desc: conserved [Ajellomyces dermatitidis SLH14081] gi|239590863|gb|EEQ73444.1| conserved [Ajellomyces dermatitidis SLH14081] gi|239613231|gb|EEQ90218.1| conserved [Ajellomyces
  misc_feature (65)..(104): NCBI GI: 121712554 Blast Desc: ACLA_008820 [Aspergillus clavatus NRRL 1] gi|119402041|gb|EAW12462.1| ACLA_008820 [Aspergillus clavatus NRRL 1]
MSTFEVAAILVDCCTLLSFLIQLQRYIPPSSRQNTGNSRRPVGIRLQPPTHYHNGWRSRSHQGSHPGIYKFAGTALGASMWFFLMYRARKDGPVLMGWKHPWDH

SEQ ID NO: 27098 - DNA, 994 bp, Muscodor strobelii
  misc_feature: SGI EST ID NO. CUFF.63992.0
  misc_feature: Variant of the nucleotide sequence at SEQ ID NO 27096
gccgccggccagtcggcatccgccttcaggtaagcagcatccatccatcgtccccaagctccgaccatcgaattgacgacgacaacaatctccctctcttgcgaagctcaattgctcgacaccacccaattcctccccgatagccacccacacactatcacaatggctggcggtcccggtcccatcaaggctcacacccgggcatctacaagttcgctggcaccgccctcggcgccagcatgtggttcttcttgatgtaccgcgcgagaaaagatggtcccgttttgatgggctggaagcacccctgggatcattagatttgcgtcggcatctaaataaaatacaatgtacgacttcaagaacagttggagagaggcaatggattaggaggtcgcagtgaaagcaagacgcgctaccacacccgacgatagccacggctttccttgagtcaagaaaccgcaaaacaatagacggcatagctggatttgtacatatcgatgatgtcaaatactaaaatgctagttcacagcaatccatctgtcgcgtcccccattactcatgcgatatggccggtttctcaaacagataatgcgagacgccccaggtatccccgccttcataagcaaacagctccgagcacgccatatagaatatctgccacctgttgtaccacgtgtttgcattctcctcgccatatgtcttgattaagtgcggccatatggctttcttattcgcgatcatgttcgacagccaatgctgcgagttcaagttagctcaatcctaatcctgagaattcatgcgatgaactcacttcgcaggtctttgaataatggcccccattaacccaccactgcctctcaatcttcaaatccttctgaaaatacagcaacaagtccgccgagggcattgtgccacccgtgaagaaatgcgtcgtcatccatccctcctcgaaatcgtagggactagtcttatgagcgaagatgtgaacaaagag

SEQ ID NO: 27099 - DNA, 1035 bp, Muscodor strobelii
  misc_feature: SGI cDNA ID NO. 569277
  misc_feature: Encodes the peptide sequence at SEQ ID NO 27100
atgagtctagactggatcctagacgccggttacctcccacacgcagtaatccgcgtgggcatccggcgccagctcgcccagcggattgaagaaatcaaatccacaacactagcagccgacatggagcgcaaaatggggtacataaatctacttcgaactcggcccatcgccatcgaaacagacacggcaaacacgcaacattacgaagtcggaacaggtgtcctccagggcatgttggggccgaggatgaaatattcggcttgtttgtatcccaagggtggggaaacgctggctcaggccgagattgccatgttggagacttatgtccaaaaagctggtttggtggacgggatgagtattttggatcttggatgtggatggggatccggtgctctttacttcgccgaggtgttgcccaactcgaagatcactgcgttctccaactcaagaacgcaaaaggagtatatcgactcgaaggcgaaagaaaaaggtctcaagaacctgaaagtcatcacgggcgatgtcgtcgactacgagtttgagaaggagagttttgatcgggtggtttctatcgagttgtttgagcatatgaagaactacgaacaactcatggcgaaggtctccagagccctgaaaccaggcggtaagctctttgttcacatcttcgctcataagactagtccctacgatttcgaggagggatggatgacgacgcatttcttcacgggtggcacaatgccctcggcggacttgttgctgtattttcagaaggatttgaagattgagaggcagtggtgggttaatgggggccattattcaaagacctgcgaacattggctgtcgaacatgatcgcgaataagaaagccatatggccgcacttaatcaagacatatggcgaggagaatgcaaacacgtggtacaacaggtggcagatattctatatggcgtgctcggagctgtttgcttatgaaggcggggatacctggggcgtctcgcattatctgtttgagaaaccggccatatcgcatgagtaa

SEQ ID NO: 27100 - protein, 344 aa, Muscodor strobelii
  misc_feature: SGI Peptide ID NO. 569277
  misc_feature (49)..(338): Pfam Id: PF02353 Pfam Desc: Cyclopropane-fatty-acyl-phospholipid synthase
  misc_feature (121)..(219): Pfam Id: PF08241 Pfam Desc: Methyltransferase domain
  misc_feature (121)..(217): Pfam Id: PF08242 Pfam Desc: Methyltransferase domain
  misc_feature (179)..(220): Pfam Id: PF02353 Pfam Desc: Cyclopropane-fatty-acyl-phospholipid synthase
  misc_feature (1)..(340): NCBI GI: 256730883 Blast Desc: NECHADRAFT_63362 [Nectria haematococca mpVI 77-13-4]
  misc_feature (4)..(339): NCBI GI: 156064387 Blast Desc: SS1G_00201 [Sclerotinia sclerotiorum 1980] gi|154691063|gb|EDN90801.1| SS1G_00201 [Sclerotinia sclerotiorum 1980]
  misc_feature (1)..(340): NCBI GI: 39978083 Blast Desc: MGG_06926 [Magnaporthe grisea 70-15] gi|145013501|gb|EDJ98142.1| MGG_06926 [Magnaporthe grisea 70-15]
  misc_feature (6)..(339): NCBI GI: 169612569 Blast Desc: SNOG_09408 [Phaeosphaeria nodorum SN15] gi|111062480|gb|EAT83600.1| SNOG_09408 [Phaeosphaeria nodorum SN15]
  misc_feature (6)..(339): NCBI GI: 189189266 Blast Desc: SAM-dependent methyltransferases [Pyrenophora tritici-repentis Pt-1C-BFP] gi|187972578|gb|EDU40077.1| SAM-dependent methyltransferases [Pyrenophora tritici-repentis
  misc_feature (1)..(339): NCBI GI: 261351484 Blast Desc: cyclopropane-fatty-acyl-phospholipid synthase [Verticillium albo-atrum VaMs.102]
  misc_feature (1)..(342): NCBI GI: 154312110 Blast Desc: BC1G_06088 [Botryotinia fuckeliana B05.10] gi|150850051|gb|EDN25244.1| BC1G_06088 [Botryotinia fuckeliana B05.10]
  misc_feature (4)..(339): NCBI GI: 164429318 Blast Desc: NCU10144 [Neurospora crassa OR74A] gi|28950348|emb|CAD70972.1| related to coclaurine N-methyltransferase [Neurospora crassa] conserved [Neurospora
  misc_feature (10)..(338): NCBI GI: 187921709 Blast Desc: Methyltransferase type 11 [Burkholderia phytofirmans PsJN] gi|187720147|gb|ACD21370.1| Methyltransferase type 11 [Burkholderia phytofirmans PsJN]
  misc_feature (12)..(338): NCBI GI: 189913048 Blast Desc: Cyclopropane fatty acid synthase-related methyltransferase [Leptospira biflexa serovar Patoc strain 'Patoc 1 (Ames)'] gi|189913377|ref|YP_001964606.1| synthase [Leptospira
  misc_feature (16)..(331): SWISSPROT Homolog: EC 2.1.1.79 Cyclopropane-fatty-acyl-phospholipid synthase
MSLDWILDAGYLPHAVIRVGIRRQLAQRIEEIKSTTLAADMERKMGYINLLRTRPIAIETDTANTQHYEVGTGVLQGMLGPRMKYSACLYPKGGETLAQAEIAMLETYVQKAGLVDGMSILDLGCGWGSGALYFAEVLPNSKITAFSNSRTQKEYIDSKAKEKGLKNLKVITGDVVDYEFEKESFDRVVSIELFEHMKNYEQLMAKVSRALKPGGKLFVHIFAHKTSPYDFEEGWMTTHFFTGGTMPSADLLLYFQKDLKIERQWWVNGGHYSKTCEHWLSNMIANKKAIWPHLIKTYGEENANTWYNRWQIFYMACSELFAYEGGDTWGVSHYLFEKPAISHE

SEQ ID NO: 27101 - DNA, 1628 bp, Muscodor strobelii
  misc_feature: SGI EST ID NO. CUFF.63993.1
  misc_feature: Variant of the nucleotide sequence at SEQ ID NO 27099
aaattatccagcctctaatttgattttagctgtcttttacttgtgtgctccttcacaatcgcaaacatgagtctagactggatcctagacgccggttacctcccacacgcagtaatccgcgtgggcatccggcgccagctcgcccagcggattgaagaaatcaaatccacaacactagcagccgacatggagcgcaaaatggggtacataaatctacttcgaactcggcccatcgccatcgaaacagacacggcaaacacgcaacattacgaagtcggaacaggtgtcctccagggcatgttggggccgaggatgaaatattcggcttgtttgtatcccaagggtggggaaacgctggctcaggccgagattgccatgttggagacttatgtccaaaaagctggtttggtggacgggatgagtattttggatcttggatgtggatggggatccggtgctctttacttcgccgaggtgttgcccaactcgaagatcactgcgttctccaactcaagaacgcaaaaggagtatatcgactcgaaggcgaaagaaaaaggtctcaagaacctgaaagtcatcacgggcgatgtcgtcgactacgagtttgagaaggagagttttgatcgggtggtttctatcgagttgtttgagcatatgaagaactacgaacaactcatggcgaaggtctccagagccctgaaaccaggcggtaagctctttgttcacatcttcgctcataagactagtccctacgatttcgaggagggatggatgacgacgcatttcttcacgggtggcacaatgccctcggcggacttgttgctgtattttcagaaggatttgaagattgagaggcagtggtgggttaatgggggccattattcaaagacctgcgaagtgagttcatcgcatgaattctcaggattaggattgagctaacttgaactcgcagcattggctgtcgaacatgatcgcgaataagaaagccatatggccgcacttaatcaagacatatggcgaggagaatgcaaacacgtggtacaacaggtggcagatattctatatggcgtgctcggagctgtttgcttatgaaggcggggatacctggggcgtctcgcattatctgtttgagaaaccggccatatcgcatgagtaatgggggacgcgacagatggattgctgtgaactagcattttagtatttgacatcatcgatatgtacaaatccagctatgccgtctattgttttgcggtttcttgactcaaggaaagccgtggctatcgtcgggtgtggtagcgcgtcttgctttcactgcgacctcctaatccattgcctctctccaactgttcttgaagtcgtacattgtattttatttagatgccgacgcaaatctaatgatcccaggggtgcttccagcccatcaaaacgggacctgttgcattgtaagtatgcgggtattcgaggatctattcgagtctaggagtatttaccatcttttctcgcgcggtacatcaactagatgggaaatcagcacaagtcaacgcaacaacattggaattggtagggacaatcgagaacgtacgaagaaccacatgctggcgccgagggcggtgccagcgaacttgtag

SEQ ID NO: 27102 - DNA, 1611 bp, Muscodor strobelii
  misc_feature: SGI cDNA ID NO. 569278
  misc_feature: Encodes the peptide sequence at SEQ ID NO 27103
atgtctaagcgacatgcctccgaggcgctcgacgacatgtacggcgtcggctcgccggcttccaaaaggtcgcgcctcgatgatggcccagagatgaacggcaacggctccataaccccacaagaggaccgcgaccagactctcgcagaccccgagaccgacgatgatgagatagacgacgagcccgcgaaagcaccgatacggcagtccgcacccacagaaggatacggtgatctctacctcgacaccatagaccgcaatgttctcgactttgacttcgagaagctgtgctccatctccctgtccaacatcaacgtctacgcctgccttgtgtgcgggaagtacttccagggtagaggcccaaagtcgcatgcctacttccacgccctcgaggatggccaccacgtcttcattaacatgggctctcaaaaggtctatgtgttacctgaaggctacgaagttaagagcaagtccctcgacgatatcaaatacgtttccgaccccagatattcgaaacaggaggtcatggagctggatcgcaagccgaggacagcctggacactgctctcgaagcaatacacgccgggctacgtgggcatgaataacatcaaagacaacgactacctcaacgtcgtagtccaagcattatcacacgtagcgccactgcggaactatttcctcctcgaagacttctcgtcccgccccgagctagtcaaacgatgttccattctattccgcaaaatctggaatccccgcgccttcaaaaaccacgtctccccccacgagctcctccaagagatctccctccgctccaataagaaatttaccttgacagaacagtccgatcccgtcgacttcctctcctggttcctcaataacctacatctcgggctaggcgggagcaagaccaagcccggcagctccataatccagcggatcttccaggggaagctgaaagtagagtcgcaggctataacagccaaagccgacgtcggcgaccggttgcgcttcgaagaagcagctgaagtgaaaacagacatcaaccgctttctcctcttgactctcgatctaccgccagcacccctattccaagacgaattagagcggaatatcatcccgcaagtccctttgactacagtattatccaaatacgacggtctaaaagcacaagaacatctcgcgcagcggaaacgctataggttaatgcacccactacccccctacctcatcttccacatcaagcgtttctccacgaacaaattcgtctcggagcggaacccaacaatcgtcactttcgacgcgagggtagggttagacgtaagtccgtacgtcgagccaagtcccactgatcaccccatgggcgaaccaatatggtatgatctggtggcaaatgtcacgcatgaggctgtgagggcgaaggaagatgttgcggatactaccgaggagaagaagacttggaaggtacagcttaaggataaaggtagagatgagtgggtcgtgtgtcaggatctgtttgttgaggagattcagaaggagttgttgtatcttggggagagttatttgcagatttgggaacggagacggagtcctaaggggaagatgaggggatag

SEQ ID NO: 27103 - protein, 536 aa, Muscodor strobelii
  misc_feature: SGI Peptide ID NO. 569278
  misc_feature (195)..(524): Pfam Id: PF00443 Pfam Desc: Ubiquitin carboxyl-terminal hydrolase
  misc_feature (195)..(467): Pfam Id: PF00443 Pfam Desc: Ubiquitin carboxyl-terminal hydrolase
  misc_feature (1)..(536): NCBI GI: 46124823 Blast Desc: FG06789.1 [Gibberella zeae PH-1]
  misc_feature (1)..(536): NCBI GI: 171693595 Blast Desc: protein product [Podospora anserina] gi|170946746|emb|CAP73550.1| protein product [Podospora anserina]
  misc_feature (3)..(536): NCBI GI: 39946098 Blast Desc: MGG_08169 [Magnaporthe grisea 70-15] gi|145019426|gb|EDK03654.1| MGG_08169 [Magnaporthe grisea 70-15]
  misc_feature (1)..(532): NCBI GI: 169601432 Blast Desc: SNOG_03581 [Phaeosphaeria nodorum SN15] gi|111067666|gb|EAT88786.1| SNOG_03581 [Phaeosphaeria nodorum SN15]
  misc_feature (1)..(525): NCBI GI: 189193545 Blast Desc: U4/U6.U5 tri-snRNP-associated protein 2 [Pyrenophora tritici-repentis Pt-1C-BFP] gi|187978675|gb|EDU45301.1| U4/U6.U5 tri-snRNP-associated protein 2 [Pyrenophora tritici-repentis
  misc_feature (68)..(536): NCBI GI: 156053570 Blast Desc: SS1G_05632 [Sclerotinia sclerotiorum 1980] gi|154703413|gb|EDO03152.1| SS1G_05632 [Sclerotinia sclerotiorum 1980]
  misc_feature (1)..(530): NCBI GI: 116206416 Blast Desc: conserved [Chaetomium globosum CBS 148.51] gi|88183098|gb|EAQ90566.1| conserved [Chaetomium globosum CBS 148.51]
  misc_feature (3)..(536): NCBI GI: 261355569 Blast Desc: U4/U6.U5 tri-snRNP-associated protein [Verticillium albo-atrum VaMs.102]
  misc_feature (3)..(536): NCBI GI: 164429365 Blast Desc: NCU09547 [Neurospora crassa OR74A] gi|38566856|emb|CAE76162.1| related to snRNP-associated protein [Neurospora crassa] gi|157073452|gb|EAA29530.2| NCU09547 crassa
  misc_feature (1)..(536): NCBI GI: 256731395 Blast Desc: [Nectria haematococca mpVI 77-13-4]
  misc_feature (171)..(527): SWISSPROT Homolog: EC 3.1.2.15 Ubiquitin thiolesterase
MSKRHASEALDDMYGVGSPASKRSRLDDGPEMNGNGSITPQEDRDQTLADPETDDDEIDDEPAKAPIRQSAPTEGYGDLYLDTIDRNVLDFDFEKLCSISLSNINVYACLVCGKYFQGRGPKSHAYFHALEDGHHVFINMGSQKVYVLPEGYEVKSKSLDDIKYVSDPRYSKQEVMELDRKPRTAWTLLSKQYTPGYVGMNNIKDNDYLNVVVQALSHVAPLRNYFLLEDFSSRPELVKRCSILFRKIWNPRAFKNHVSPHELLQEISLRSNKKFTLTEQSDPVDFLSWFLNNLHLGLGGSKTKPGSSIIQRIFQGKLKVESQAITAKADVGDRLRFEEAAEVKTDINRFLLLTLDLPPAPLFQDELERNIIPQVPLTTVLSKYDGLKAQEHLAQRKRYRLMHPLPPYLIFHIKRFSTNKFVSERNPTIVTFDARVGLDVSPYVEPSPTDHPMGEPIWYDLVANVTHEAVRAKEDVADTTEEKKTWKVQLKDKGRDEWVVCQDLFVEEIQKELLYLGESYLQIWERRRSPKGKMRG

SEQ ID NO: 27104 - DNA, 480 bp, Muscodor strobelii
  misc_feature: SGI cDNA ID NO. 569279
  misc_feature: Encodes the peptide sequence at SEQ ID NO 27105
atgacaccacagacacatatagagatgcccgagccgaccccaggcgttgatccaagagacatcaccatctcaaccggtttcggccccccgttcacatccaactgctatgtctgcacgcaaaactccccatggggcgcaagctgccaattcactagcctccccagttgcgtagcgacagtgacgctcgaagccggatcctcctacatccatgtcgggactctgacatccgacgcgctgtacaccagtgtctcgaatgccgtgtctagcctttgtcccacgccaagcggcggctccatggtatgcgcgccgtcggcgaaagcgacaattggcggcctctcgtggatcgactcgtccgagcacctcgagacggatggcgagcttatcgtcgaagttctggctagcagttatgataattcttcgatctacgaggctatgattcacaccatcgccaccgcggtggagttgtcagctgcgggttga

SEQ ID NO: 27105 - protein, 159 aa, Muscodor strobelii
  misc_feature: SGI Peptide ID NO. 569279
MTPQTHIEMPEPTPGVDPRDITISTGFGPPFTSNCYVCTQNSPWGASCQFTSLPSCVATVTLEAGSSYIHVGTLTSDALYTSVSNAVSSLCPTPSGGSMVCAPSAKATIGGLSWIDSSEHLETDGELIVEVLASSYDNSSIYEAMIHTIATAVELSAAG

SEQ ID NO: 27106 - DNA, 233 bp, Muscodor strobelii
  misc_feature: SGI EST ID NO. CUFF.63961.0
  misc_feature: Variant of the nucleotide sequence at SEQ ID NO 27104
atcgactcgtccgagcacctcgagacggatggcgagcttatcgtcgaagttctggctagcagttatgataattcttcgatctacgaggctatgattcacaccatcgccaccgcggtggagttgtcagctgcgggttgacaactgttacactgcttatcacaatgtgctcggcttcaaagacaagcgtgatgatggttcttggtggttgccgagtttcctgcgacgggatggac

SEQ ID NO: 27107 - DNA, 1329 bp, Muscodor strobelii
  misc_feature: SGI cDNA ID NO. 569280
  misc_feature: Encodes the peptide sequence at SEQ ID NO 27108
atgcacgtccttcctctgctttgggactggctacccgtcctactgtgggtagccatcaagacttgtcaagctcaaacagattggcgcatgaagccttatattcccgacggtgtcccagatggaaaacaatcaggagagacaaagaaaggcgaagcccgtccgacttatttagcagcctatgaccaggcggtaacgggtctcgctgacccaggctcgtgggctactgtgtctcaaattgccgggaaccatttcaactggcttgagaacaatgtggacatgagagagtcgtactcaaaatcagggtggttgctggtagctgtcttctacgatgcggaaaacgaaaggtacttcgcctcaacggtgccccgaggcctacgaaggaaggaaatggagaaaactggcaaagaaagagctcctgcttggtggcatcaagccagctcggaaggccagaatcccgggtttccaatgcatgctgaagacagtgtatacttcagttatgagagtttacaggagttcactttttttgaggatacgtatcctgcggggagtttcattgccgtctatggggcgaagagagacccaaacttcacaacctatctcgtggaacctcaaccgataagtctgtgtcaaggtagtgcagaggatgaaaaaagtccaccctgccaagacattgccgatcgtctgcgtgtagagttcagagcaccccaagaagctgctcaaaacaatgttgctgtcatagcagatccggatagcgatgaggataataccgaatacttcaatgacgaccttactcagaatgaatgggacgcgatcgactgtgagcagttgaatccccagcaaaagcgcagtctcaagacgaacggtggtcatctcgtggtaaataagcgcaacgttacctgcgcatcccccgtcccattctcgctcgactaccaggagttcccaactcccacgtcgctctcaacgcctgcagcaacatggtgggttacccagtccgaacagtcgagctcggtgaccacgaagatcactacaccagcctcctcaacgccttcaacactttccacttcagtattaccctcggtatcttgctccgctcatttcgcggatcctgacgtaggtaacaacaaccaatattgtgtgtgtaacagctcaagaacggaggcgttcttaccttctgggtctggttatccttgccactattcaactctgcctcctcagaagagggatgaattgaggactatgacagattcctacgccaacaggatcaccgctagtacccaggctacgagtgatgctcatttgccagcgggtacctgccttgcgcccccttaa

SEQ ID NO: 27108 - protein, 442 aa, Muscodor strobelii
  misc_feature: SGI Peptide ID NO. 569280
  misc_feature (73)..(232): NCBI GI: 171693631 Blast Desc: protein product [Podospora anserina] gi|170946764|emb|CAP73568.1| protein product [Podospora anserina]
  misc_feature (84)..(228): NCBI GI: 171685322 Blast Desc: protein product [Podospora anserina] gi|170942622|emb|CAP68274.1| protein product [Podospora anserina]
MHVLPLLWDWLPVLLWVAIKTCQAQTDWRMKPYIPDGVPDGKQSGETKKGEARPTYLAAYDQAVTGLADPGSWATVSQIAGNHFNWLENNVDMRESYSKSGWLLVAVFYDAENERYFASTVPRGLRRKEMEKTGKERAPAWWHQASSEGQNPGFPMHAEDSVYFSYESLQEFTFFEDTYPAGSFIAVYGAKRDPNFTTYLVEPQPISLCQGSAEDEKSPPCQDIADRLRVEFRAPQEAAQNNVAVIADPDSDEDNTEYFNDDLTQNEWDAIDCEQLNPQQKRSLKTNGGHLVVNKRNVTCASPVPFSLDYQEFPTPTSLSTPAATWWVTQSEQSSSVTTKITTPASSTPSTLSTSVLPSVSCSAHFADPDVGNNNQYCVCNSSRTEAFLPSGSGYPCHYSTLPPQKRDELRTMTDSYANRITASTQATSDAHLPAGTCLAPP

SEQ ID NO: 27109 - DNA, 966 bp, Muscodor strobelii
  misc_feature: SGI EST ID NO. CUFF.63968.0
  misc_feature: Variant of the nucleotide sequence at SEQ ID NO 27107
ggcgaagagagacccaaacttcacaacctatctcgtggaacctcaaccgataagtctgtgtcaaggtagtgcagaggatgaaaaaagtccaccctgccaagacattgccgatcgtctgcgtgtagagttcagagcaccccaagaagctgctcaaaacaatgttgctgtcatagcagatccggatagcgatgaggataataccgaatacttcaatgacgaccttactcagaatgaatgggacgcgatcgactgtgagcagttgaatccccagcaaaagcgcagtctcaagacgaacggtggtcatctcgtggtaaataagcgcaacgttacctgcgcatcccccgtcccattctcgctcgactaccaggagttcccaactcccacgtcgctctcaacgcctgcagcaacatggtgggttacccagtccgaacagtcgagctcggtgaccacgaagatcactacaccagcctcctcaacgccttcaacactttccacttcagtattaccctcggtatcttgctccgctcatttcgcggatcctgacgtaggtaacaacaaccaatattgtgtgtgtaacagctcaagaacggaggcgttcttaccttctgggtctggttatccttgccactattcaactctgcctcctcagaagagggatgaattgaggactatgacagattcctacgccaacaggatcaccgctagtacccaggctacgagtgatgctcatttgccagcgggtacctgccttgcgcccccttaatgaagagagtcgcaaaactgttcttgttatgcagctgcgcacacttgcttgcatgattatttccaccgtttgtatgattatgtctcctagatcaaatcttgaacaggatgtttgaaacgaatgagggttgcgaagataggagtgcgtaagagagtacgcctggagaagtgcgtgcgtatgtgtaacaacctagactatttttg

SEQ ID NO: 27110 - DNA, 636 bp, Muscodor strobelii
  misc_feature: SGI cDNA ID NO. 569281
  misc_feature: Encodes the peptide sequence at SEQ ID NO 27111
atgaccaatcattccaaacgcaagtcgcatctgcgcaaatcgcagcgctctaacatgcgcgccaaagcagaccatattgcccaccccgagggggaagagtacgcggagactatcccacgcgctactactcctcgcgttatcgtcgcagcgatcgttggtggcagccttaggtaccctggcacctcctttgtcatcgggaagcatctcactgcacctggcggccatagctggtcaacttttctcgactcgcgtcgtcatggagagaatgtattcgactgcgctaaacgcattatccgcgagcagacgggtctcatcgttcgcatcgagagctttgttgacatggtcacggacttgaggactatgagcgagggatttatcactcattttgtgttctgtgggtatccagaggctatacctaatgttctcgatgataagtcaacagctactagtcaagccattccaaacgccaacggtatgccgacagagacggccaatgtattcccgcttgctactccttccaacgaggaccttgtcttgaagaagccgctatggcttctcaaggactcggaatactggctgccagtcaacggtgctctctgggattacctgaagccaagagcaagcagcacgacatga

SEQ ID NO: 27111 - protein, 211 aa, Muscodor strobelii
  misc_feature: SGI Peptide ID NO. 569281
  misc_feature (41)..(143): NCBI GI: 256720816 Blast Desc: NECHADRAFT_9346 [Nectria haematococca mpVI 77-13-4]
MTNHSKRKSHLRKSQRSNMRAKADHIAHPEGEEYAETIPRATTPRVIVAAIVGGSLRYPGTSFVIGKHLTAPGGHSWSTFLDSRRHGENVFDCAKRIIREQTGLIVRIESFVDMVTDLRTMSEGFITHFVFCGYPEAIPNVLDDKSTATSQAIPNANGMPTETANVFPLATPSNEDLVLKKPLWLLKDSEYWLPVNGALWDYLKPRASSTT

SEQ ID NO: 27112 - DNA, 1362 bp, Muscodor strobelii
  misc_feature: SGI cDNA ID NO. 569282
  misc_feature: Encodes the peptide sequence at SEQ ID NO 27113
atgggaaacaccccgtcgtctgcgtccaaggcacataccccaacgcccccgtcctcctcctccaatgtcgactcgccgcgctcgacgaggaaagagcacaagaacctagcctctatacatccacaccacatccgctcgccagcctcccccgaggccaccaccgtccaggcgaccggctccaccatctccagcaggagctctcactccagacccctatctatcttgaactcgtcctcgcccaccacaagctccaacacctctccctctcagccgcgcaccttcagccccaggaacaaacatgccatcgacatcaagccacgtgatgagccgtcgaagcctgtagccgtcccccaatcccatcaggagcctgctgggtttgcgcaaggctcgcatctcgacgaaggcttcggtggcatcggttccaacagcatacaggacatgtcatatcacatggcgcgtccacctcgtcttcctcttcccattgaggaggagatacacaccccaggttctcccattgctgctgctgaagacactgatgaccgagatgtgaccgacgtgcctcctatcgacgagcagaatgagctgccacgtcgtgtctctggactgagtaatgcgacggacgaagacgatgccgaggaactgcgcgtcgacaagactcgtccctcgctaccgacgaggataacttggctgcggggcggacagaaggtctacgtcacaggaacgcccttccaatggggccggaaacaacggctacttccagccaagggggaagaaggtgttctcgagaccacgatccgagtgtttcccggaacccaccacattaagttcttagttgatggtaatatgcaaacttcgccagatttgcccaccacagtagattttggcaacaatctagtcaattatatcgaagtgagcggcgacgacaacgacgtacggagtgtaccagttgatcccggcgttcccaagccggaagacgtggcaaatctgccatccagacaaggctcaggagaggacctagcccagaaaaggtcttacattcccactggcactttttcgactaaactcccacagtatctggaagacttcgatcaacctgaagaatctccatactacaagatttccgccgctgctctcgagaaactcccaacgccacctacgttacctggcttcctcagcaagccgattctgaacaacacgacgttgatcaaagatgacaacagtgtcttgaacatgccgaaccatacggtcctcaatcacttggctacttgcagtatcaagaataatattctatctgtatctgccactacaaggtataaggataagtacgtgacgaccattgtatacaagcctactaagcggtag

SEQ ID NO: 27113 - protein, 453 aa, Muscodor strobelii
  misc_feature: SGI Peptide ID NO. 569282
  misc_feature (344)..(451): Pfam Id: PF04739 Pfam Desc: 5'-AMP-activated protein kinase, beta subunit, complex-interacting region
  misc_feature (1)..(451): NCBI GI: 256730910 Blast Desc: NECHADRAFT_48705 [Nectria haematococca mpVI 77-13-4]
  misc_feature (1)..(451): NCBI GI: 46126059 Blast Desc: FG07407.1 [Gibberella zeae PH-1]
  misc_feature (1)..(451): NCBI GI: 171694235 Blast Desc: protein product [Podospora anserina] gi|170947066|emb|CAP73871.1| protein product [Podospora anserina]
  misc_feature (1)..(451): NCBI GI: 85098329 Blast Desc: NCU03837 [Neurospora crassa OR74A] gi|28922100|gb|EAA31360.1| [Neurospora crassa OR74A]
  misc_feature (1)..(451): NCBI GI: 156064405 Blast Desc: SS1G_00210 [Sclerotinia sclerotiorum 1980] gi|154691072|gb|EDN90810.1| SS1G_00210 [Sclerotinia sclerotiorum 1980]
  misc_feature (1)..(451): NCBI GI: 154312092 Blast Desc: BC1G_06079 [Botryotinia fuckeliana B05.10] gi|150850042|gb|EDN25235.1| BC1G_06079 [Botryotinia fuckeliana B05.10]
  misc_feature (1)..(451): NCBI GI: 116198227 Blast Desc: CHGG_07269 [Chaetomium globosum CBS 148.51] gi|88178548|gb|EAQ86016.1| CHGG_07269 [Chaetomium globosum CBS 148.51]
  misc_feature (45)..(451): NCBI GI: 145605695 Blast Desc: MGG_06930 [Magnaporthe grisea 70-15] gi|145013497|gb|EDJ98138.1| MGG_06930 [Magnaporthe grisea 70-15]
  misc_feature (1)..(441): NCBI GI: 261351524 Blast Desc: conserved [Verticillium albo-atrum VaMs.102]
  misc_feature (1)..(451): NCBI GI: 119467698 Blast Desc: Snf1 kinase complex beta-subunit Gal83, [Neosartorya fischeri NRRL 181] gi|119405807|gb|EAW15758.1| Snf1 kinase complex beta-subunit Gal83, [Neosartorya fischeri NRRL 181]
MGNTPSSASKAHTPTPPSSSSNVDSPRSTRKEHKNLASIHPHHIRSPASPEATTVQATGSTISSRSSHSRPLSILNSSSPTTSSNTSPSQPRTFSPRNKHAIDIKPRDEPSKPVAVPQSHQEPAGFAQGSHLDEGFGGIGSNSIQDMSYHMARPPRLPLPIEEEIHTPGSPIAAAEDTDDRDVTDVPPIDEQNELPRRVSGLSNATDEDDAEELRVDKTRPSLPTRITWLRGGQKVYVTGTPFQWGRKQRLLPAKGEEGVLETTIRVFPGTHHIKFLVDGNMQTSPDLPTTVDFGNNLVNYIEVSGDDNDVRSVPVDPGVPKPEDVANLPSRQGSGEDLAQKRSYIPTGTFSTKLPQYLEDFDQPEESPYYKISAAALEKLPTPPTLPGFLSKPILNNTTLIKDDNSVLNMPNHTVLNHLATCSIKNNILSVSATTRYKDKYVTTIVYKPTKR

SEQ ID NO: 27114 - DNA, 3053 bp, Muscodor strobelii
  misc_feature: SGI EST ID NO. CUFF.64144.1
  misc_feature: Variant of the nucleotide sequence at SEQ ID NO 27112
cgggaaataagtcggcaatgaacaaaatcaaatgattcccaaagctatcatgatcttgtaatccttattgtctgctctgctaccacctcggtgaacaaggtatgagtcaggcacctcggcttacctgttgaacaacgatgtctcgcatttagagacgtgtaagtaagggtgaggcaccggtacagcttccgttttgaaggtggagtcgaatctgatctcatctttggcttgacaggtgtgacatgtcaatcctgaaggaccctggcgagctggtactacctgcagtggtggaacaggtcatcagccatcaacacgggatttgaatggtcggctctcgacgggagatggtatattcgcatctctaaggcaatgaccccaaatgccaattgcatggcggtggtggacgactgactcggcaatggcagagcaatggttgactgatgcagtacaaagcaggcttgctcggcttgccatggatctggctcgctggggccttcccgggcggttctgtagccggggtaagctagagagccagcgttgcagcggggtctgccccgcccccgtcattacggtcaagcgtttgttgggagcagaattccccaattgcgatcgagcaatgcatcaaaagaggagctcagggtatttattagctaagcgggtgtgcctgcagctcttcggctggccggtgaagctggtcggctgacctcgacttcatgcgacgatcctgccgtccaccttgcacatcgcctgtctcacgcctgcctcgccgcaagaatatctacgctgttgctttttgactcactttgcgccggcactcttcaccgcccagcgcctggcattgcctgcccacgcgacaagtcacccgcctgacagcccaactgaagggctgtgacttactgacggacactgtctgcccgcggccaccccccgcctcccccacgcccatcccatcatcccaatcgcaattcccatcatcccatctccggctgtgattgccctctggccctctggccctctgcgcccacgtgtgaccgccggccatgggaaacaccccgtcgtctgcgtccaaggcacataccccaacgcccccgtcctcctcctccaatgtcgactcgccgcgctcgacgaggaaagagcacaagaacctagcctctatacatccacaccacatccgctcgccagcctcccccgaggccaccaccgtccaggcgaccggctccaccatctccagcaggagctctcactccagacccctatctatcttgaactcgtcctcgcccaccacaagctccaacacctctccctctcagccgcgcaccttcagccccaggaacaaacatgccatcgacatcaagccacgtgatgagccgtcgaagcctgtagccgtcccccaatcccatcaggagcctgctgggtttgcgcaaggctcgcatctcgacgaaggcttcggtggcatcggttccaacagcatacaggacatgtcatatcacatggcgcgtccacctcgtcttcctcttcccattgaggaggagatacacaccccaggttctcccattgctgctgctgaagacactgatgaccgagatgtgaccgacgtgcctcctatcgacgagcagaatgagctgccacgtcgtgtctctggactgagtaatgcgacggacgaagacgatgccgaggaactgcgcgtcgacaagactcgtccctcgctaccgacgaggataacttggctgcggggcggacagaaggtctacgtcacaggaacgcccttccaatggggccggaaacaacggctacttccagccaagggggaagaaggtgttctcgagaccacgatccgagtgtttcccggaacccaccacattaagttcttagttgatggtaatatgcaaacttcgccagatttgcccaccacagtagattttggcaacaatctagtcaattatatcgaagtgagcggcgacgacaacgacgtacggagtgtaccagttgatcccggcgttcccaagccggaagacgtggcaaatctgccatccagacaaggctcaggagaggacctagcccagaaaaggtcttacattcccactggcactttttcgactaaactcccacagtatctggaagacttcgatcaacctgaagaatctccatactacaagatttccgccgctgctctcgagaaactcccaacgccacctacgttacctggcttcctcagcaagccgattctgaacaacacgacgttgatcaaagatgacaacagtgtcttgaacatgccgaaccatacggtcctcaatcacttggctacttgcagtatcaagaataatattctatctgtatctgccactacaaggtataaggataagtacgtgacgaccattgtatacaagcctactaagcggtagacaactgtgtcgacctcagccttgagctctagctcggcagagaacgtatggattatcttacctacgtggggctgcggatcgaaatcccattgagcagttagtgctttgcatcctacatgttgtataattggatcaatgggcagcctcgtgttggcgaaatcgagattcgacccttcagtcacgaaccaacgttgcctgatgccgaaagaacgaggaaatggtataggcattgatgtactacctgagatacgccatgatgtgtgcacgaattgatggatctaatgcgttccacgctacgttatgtctgcatgacttgaagtagggataggtaataacattgcgatatccaacctgctcggcgcattcattgctgtgatcataatatggcttctgaattacgaataaactagcaatgacattggtgtatatacagactttatcccctcggtggcattctacgtagcacacccaattgcggctgttaaagaacgcaactaaatgggcaactgctgacatttgagccttacgacggggatgaatctgtgtcagctaggtagtctgtgaaggcaaatcaaaagtcattgcactctaagttcgagttaggaactgaatgatagaagacctttcccggtgtttagttatactttttaa

SEQ ID NO: 27115 - DNA, 1086 bp, Muscodor strobelii
  misc_feature: SGI cDNA ID NO. 569283
  misc_feature: Encodes the peptide sequence at SEQ ID NO 27116
atggcacccctcctatccctaggccttgaaggcagcgccaacaaactaggaatcggcataatatcgcacgacccaataacaggaaaagccaaagtcctctccaacatccggcacaccttcaacgctcccccgggggccggattcctccccaaagacacagcaaaacaccaccggtcgtggttcgcccgaatagcaaaatccgcgctcgaaaccgcgggagtttctcctggcgaattatcatgtatatcctacaccaaaggcccaggcatgggcgcgcctctccaatccgtcgcggtcgcagcaagaacactggcactgttatggggaaagccgttagtgggcgtgaatcactgtgttggccatatagaaatggggcgtgagataacgggagctgataaccccgtcgtgttgtacgtctcggggggtaacacacaagtcatcgcgtatgcggaacagcgatataggatatttggcgagacgctcgatatcgctgtggggaactgtcttgatcggttcgcgaggacgctgcagattagtaatgaccccgcgccgggccataatatcgagatgttggcgaggaaagcgagtgggagtatgttactggacttgccgtatgcggtgaagggcatggattgcagtttcagtgggattctggcgagtgctgatttactcgctgctgctatgcgagatcaggatgatagagaggcacgcggtgagaatccactgggtctgaaggagagggataggattacgcctgaggagctgtgttatagtcttcaggagactgtctttgcgatgcttgttgagatcacggagcgtgctatggcgcatgtggggagtagccaggtcctggttgtgggtggtgtggggtgtaatgagaggttacaggctatgatggggaagatggctgaggagagggggggaagcgtgtatgcgacggatgagaggttttgtatcgataatgggattatgatcgcgcatgctggcttgttggcgtataggacggggtttgagactccgctggatgatagtacgtgtacgcagaggtttaggacggacgaggtgcttgttaagtggagggattga

SEQ ID NO: 27116 - protein, 361 aa, Muscodor strobelii
  misc_feature: SGI Peptide ID NO. 569283
  misc_feature (31)..(327): Pfam Id: PF00814 Pfam Desc: Glycoprotease family
  misc_feature (5)..(361): NCBI GI: 85098324 Blast Desc: NCU03836 [Neurospora crassa OR74A] gi|74616287|sp|Q7S745.1|KAE1_NEUCR RecName: Full= glycoprotein endopeptidase kae-1 gi|28922099|gb|EAA31359.1| NCU03836 crassa
  misc_feature (4)..(361): NCBI GI: 156064407 Blast Desc: conserved [Sclerotinia sclerotiorum 1980] gi|154691073|gb|EDN90811.1| conserved [Sclerotinia sclerotiorum 1980]
  misc_feature (4)..(361): NCBI GI: 154312090 Blast Desc: conserved [Botryotinia fuckeliana B05.10] gi|150850041|gb|EDN25234.1| conserved [Botryotinia fuckeliana B05.10]
  misc_feature (5)..(361): NCBI GI: 46126057 Blast Desc: FG07406.1 [Gibberella zeae PH-1] gi|121812808|sp|Q4I5V2.1|KAE1_GIBZE RecName: Full= glycoprotein endopeptidase KAE1
  misc_feature (5)..(361): NCBI GI: 39978093 Blast Desc: conserved [Magnaporthe grisea 70-15] gi|145013496|gb|EDJ98137.1| conserved [Magnaporthe grisea 70-15]
  misc_feature (5)..(361): NCBI GI: 256731289 Blast Desc: [Nectria haematococca mpVI 77-13-4]
  misc_feature (5)..(360): NCBI GI: 171694233 Blast Desc: protein product [Podospora anserina] gi|170947065|emb|CAP73870.1| protein product [Podospora anserina]
  misc_feature (5)..(360): NCBI GI: 116198225 Blast Desc: conserved [Chaetomium globosum CBS 148.51] gi|121781527|sp|Q2GXN6.1|KAE1_CHAGB RecName: Full= glycoprotein endopeptidase KAE1 gi|88178547|gb|EAQ86015.1| conserved globosum
  misc_feature (4)..(361): NCBI GI: 154272533 Blast Desc: HCAG_08228 [Ajellomyces capsulatus NAm1] gi|150409106|gb|EDN04562.1| HCAG_08228 [Ajellomyces capsulatus NAm1]
  misc_feature (4)..(361): NCBI GI: 225554759 Blast Desc: O-sialoglycoprotein endopeptidase [Ajellomyces capsulatus G186AR]
  misc_feature (7)..(361): SWISSPROT Homolog: EC 3.4.24.57 O-sialoglycoprotein endopeptidase
MAPLLSLGLEGSANKLGIGIISHDPITGKAKVLSNIRHTFNAPPGAGFLPKDTAKHHRSWFARIAKSALETAGVSPGELSCISYTKGPGMGAPLQSVAVAARTLALLWGKPLVGVNHCVGHIEMGREITGADNPVVLYVSGGNTQVIAYAEQRYRIFGETLDIAVGNCLDRFARTLQISNDPAPGHNIEMLARKASGSMLLDLPYAVKGMDCSFSGILASADLLAAAMRDQDDREARGENPLGLKERDRITPEELCYSLQETVFAMLVEITERAMAHVGSSQVLVVGGVGCNERLQAMMGKMAEERGGSVYATDERFCIDNGIMIAHAGLLAYRTGFETPLDDSTCTQRFRTDEVLVKWRD

SEQ ID NO: 27117 - DNA, 1730 bp, Muscodor strobelii
  misc_feature: SGI EST ID NO. CUFF.64047.0
  misc_feature: Variant of the nucleotide sequence at SEQ ID NO 27115
tactagtcaattattaatgcgagtgatgatgttggtgatgttctctatgctgctttattgcaaaaccccgacatcaaatcttggtctctttcgacccttcaaactttcccatctcgtcccgtccccgcccccactatgaacgacttcgctccaagatgtaactgcccctccatacgttcgacttcatgaacttcaagatattagatcctacatgttaacaatgcatgagtcattcatttaactacaccacacaagcctccagccatcaagcaagataattagatctagatgagaaccatctagatccatctctccgagcgcaccacgcgcactgtcctcctccaccccaccacatcgcaaaccactccctcaacaccaaagccaacccatcatggcacccctcctatccctaggccttgaaggcagcgccaacaaactaggaatcggcataatatcgcacgacccaataacaggaaaagccaaagtcctctccaacatccggcacaccttcaacgctcccccgggggccggattcctccccaaagacacagcaaaacaccaccggtcgtggttcgcccgaatagcaaaatccgcgctcgaaaccgcgggagtttctcctggcgaattatcatgtatatcctacaccaaaggcccaggcatgggcgcgcctctccaatccgtcgcggtcgcagcaagaacactggcactgttatggggaaagccgttagtgggcgtgaatcactgtgttggccatatagaaatggggcgtgagataacgggagctgataaccccgtcgtgttgtacgtctcggggggtaacacacaagtcatcgcgtatgcggaacagcgatataggatatttggcgagacgctcgatatcgctgtggggaactgtcttgatcggttcgcgaggacgctgcagattagtaatgaccccgcgccgggccataatatcgagatgttggcgaggaaagcgagtgggagtatgttactggacttgccgtatgcggtgaagggcatggattgcagtttcagtgggattctggcgagtgctgatttactcgctgctgctatgcgagatcaggatgatagagaggcacgcggtgagaatccactgggtctgaaggagagggataggattacgcctgaggagctgtgttatagtcttcaggagactgtctttgcgatgcttgttgagatcacggagcgtgctatggcgcatgtggggagtagccaggtcctggttgtgggtggtgtggggtgtaatgagaggttacaggctatgatggggaagatggctgaggagagggggggaagcgtgtatgcgacggatgagaggttttgtatcgataatgggattatgatcgcgcatgctggcttgttggcgtataggacggggtttgagactccgctggatgatagtacgtgtacgcagaggtttaggacggacgaggtgcttgttaagtggagggattgagggagtccgtggataggagcgatattgcgtcttcgatgaagctcaaatgacacggcgttagacgtattgagaagaaccacgaagagaacgtgtgatgacaaggcaactcacagcctgcaacatggccaatggagtgcatctcagtcataacagtaacatcgttcagggtgtctggattacagctagtaatcaagactacatgcaccagaataaggggcaatatagatacctatgaaacagagcaagatcgcac

SEQ ID NO: 27118 - DNA, 816 bp, Muscodor strobelii
  misc_feature: SGI cDNA ID NO. 569284
  misc_feature: Encodes the peptide sequence at SEQ ID NO 27119
atgactctcttgcgtgataggcaggccgaaagagaccaggagcttcgtcatagtgtcgagatcaaggttctcgatcatcagagatggaatgctggttttgttgacctgaccgctaatcacatgcctaaagccagaggagaaaaagaatcgagcttcagacatgccaggacagagttcctgatgactccacctgcttcgtctgccgactccatggacattgatgaagctcccccagcacctgaaaagtcacttgcacccttcgttttcaaaggcatcacaccagaggactctgatcaggaggaaatgccctcattccgtcgccgtatcggtcgtttgaacagaatgttcattgatcgtcgccgttcccagtcgcgtaccgggttgattagtcctcctcgggaatcttcctcgctccagagtgatcgatggaagtatgaccaggacgacgatgacgacgaggaacctgtgtataagatggacaccaatagtcttgagcaaatgaagttcaggtcgacgataccgccgccgccgtttcttctcagacgacctggtatggatccagcacagctccaacttgctgcaaatcgagccgctctgccacaagctcagttgcaaaatcaagcacaagctcaggcacaggtacaggggcaggtccagagccagcctcagccgaatggccgaacaccagtaccacacccgactctcccgggccagacaacgaagaacgcatcgtcagcttcgatcgtgccacagacttcgcccggacaaatgaagcaagccgcccctgcggtgcaacccgtggttgtgaagaaatga

SEQ ID NO: 27119 - protein, 271 aa, Muscodor strobelii
  misc_feature: SGI Peptide ID NO. 569284
  misc_feature (1)..(181): NCBI GI: 46126055 Blast Desc: FG07405.1 [Gibberella zeae PH-1] gi|84028936|sp|Q4I5V3.1|EPL1_GIBZE RecName: Full=Enhancer of polycomb-like protein 1
  misc_feature (1)..(182): NCBI GI: 171694231 Blast Desc: protein product [Podospora anserina] gi|170947064|emb|CAP73869.1| protein product [Podospora anserina]
  misc_feature (1)..(189): NCBI GI: 261351526 Blast Desc: conserved [Verticillium albo-atrum VaMs.102]
  misc_feature (1)..(179): NCBI GI: 256731290 Blast Desc: NECHADRAFT_106360 [Nectria haematococca mpVI 77-13-4]
  misc_feature (1)..(182): NCBI GI: 116198223 Blast Desc: CHGG_07267 [Chaetomium globosum CBS 148.51] gi|88178546|gb|EAQ86014.1| CHGG_07267 [Chaetomium globosum CBS 148.51]
  misc_feature (1)..(190): NCBI GI: 85098316 Blast Desc: NCU03834 [Neurospora crassa OR74A] gi|74616289|sp|Q7S747.1|EPL1_NEUCR RecName: Full=Enhancer of polycomb-like protein 1 gi|28922097|gb|EAA31357.1| conserved
  misc_feature (1)..(174): NCBI GI: 39978095 Blast Desc: MGG_06932 [Magnaporthe grisea 70-15] gi|145013495|gb|EDJ98136.1| MGG_06932 [Magnaporthe grisea 70-15]
  misc_feature (1)..(173): NCBI GI: 240110803 Blast Desc: CPC735_036650 [Coccidioides posadasii C735 delta SOWgp]
  misc_feature (1)..(173): NCBI GI: 119196661 Blast Desc: CIMG_02705 [Coccidioides immitis RS]
  misc_feature (1)..(174): NCBI GI: 156064411 Blast Desc: SS1G_00213 [Sclerotinia sclerotiorum 1980] gi|154691075|gb|EDN90813.1| SS1G_00213 [Sclerotinia sclerotiorum 1980]
MTLLRDRQAERDQELRHSVEIKVLDHQRWNAGFVDLTANHMPKARGEKESSFRHARTEFLMTPPASSADSMDIDEAPPAPEKSLAPFVFKGITPEDSDQEEMPSFRRRIGRLNRMFIDRRRSQSRTGLISPPRESSSLQSDRWKYDQDDDDDEEPVYKMDTNSLEQMKFRSTIPPPPFLLRRPGMDPAQLQLAANRAALPQAQLQNQAQAQAQVQGQVQSQPQPNGRTPVPHPTLPGQTTKNASSASIVPQTSPGQMKQAAPAVQPVVVKK

SEQ ID NO: 27120 - DNA, 546 bp, Muscodor strobelii
  misc_feature: SGI cDNA ID NO. 569285
  misc_feature: Encodes the peptide sequence at SEQ ID NO 27121
atgccctccaacagagtcggacaatttggagatcaacctgtgttcgacctgctcgccatgtcagcaaataacaacatgggggatatcaatatccatcctcgcatcacgcgtgccaacaccgagatctcctttgtcaacaatgctttgggaatcgagctcgtcgaccgcaatcatacctatctcgcattgatccgtcaccacaactgtgggcacccattacgcggtggtgcggactgctcccgcttcatcgcacttgacttgactgaagccttcagaggcggaatgttgcctgaattgcctagcttcatggatgttgtggaacggcgtgtgaggagccattttgagatgtaccatcccacagatcgacaacagcttatagtgatgtactctgtggatgtccgatacgagcctcagaaccacagcatgcgtggcattaacttgatgcagcatccggaggccatcggcactgaggtatctctcattcgcaaccgcggctatcgcgatttcttgtacgtcgtgttcaccagtcatagtcgaggccagtga

SEQ ID NO: 27121 - protein, 181 aa, Muscodor strobelii
  misc_feature: SGI Peptide ID NO. 569285
MPSNRVGQFGDQPVFDLLAMSANNNMGDINIHPRITRANTEISFVNNALGIELVDRNHTYLALIRHHNCGHPLRGGADCSRFIALDLTEAFRGGMLPELPSFMDVVERRVRSHFEMYHPTDRQQLIVMYSVDVRYEPQNHSMRGINLMQHPEAIGTEVSLIRNRGYRDFLYVVFTSHSRGQ

SEQ ID NO: 27122 - DNA, 893 bp, Muscodor strobelii
  misc_feature: SGI EST ID NO. CUFF.64038.0
  misc_feature: Variant of the nucleotide sequence at SEQ ID NO 27120
gctcgctgtgtcattgtgcctaagtgaataatactctagctaagacagtaaccttgattgaacagatattcatccaggatagctgtaacagaagccagtgtgtgagctagctaagtccatgtgatcaactcaaggcagtctcatcaaatatacttagccacattcaacatactgcagagcatcctgcaaagcatccatgtagagtatggaatgcgttggtcaagtccatagtctgggaatcgcaggtaagccagaagcgaagagaaacgtcgaggcacatcatgccattcgatacttgaggtattacatcgaacttcatgaaggatgcttcacatttcatttgcctaggcaacatttgaatgggtcaaaatgagtgcctgtatctttggagaccgcgtggatagttgttcgcgctttgttgccgggctcgttgctgcttagcaacaattgaaacctcactcgaacgcgatctggttctctgatatattacgatccaagcagtctgaatcagttcactcctttcttcttctgtttcttcctcaggcacaagtgcagtacatctcacacgcctccccaacgcgccccaatgccctccaacagagtcggacaatttggagatcaacctgtgttcgacctgctcgccatgtcagcaaataacaacatgggggatatcaatatccatcctcgcatcacgcgtgccaacaccgagatctcctttgtcaacaatgctttgggaatcgagctcgtcgaccgcaatcatacctatctcgcattgatccgtcaccacaactgtgggcacccattacgcggtggtgcggactgctcccgcttcatcgcacttgacttgactgaagccttcagaggcggaatgttgcctgaattgcctagcttca

SEQ ID NO: 27123 - DNA, 525 bp, Muscodor strobelii
  misc_feature: SGI cDNA ID NO. 569286
  misc_feature: Encodes the peptide sequence at SEQ ID NO 27124
atgggtaacaccacgagtaccgtcttggacagcattgtccagggcaccaacttcgatcatgaggaagtagaacgtttgaggaagagatttatgaaactcgacaaagatcaatctggagctatcgagcgcgacgaattcctgagtttaccgcagatatcatcgaatcccctagcaacaaggctgatagcaatcttcgacgaagatggtggtggcgacattgatttccaggagttcgtgtcaggactgagcgcattcagcagcaaaggcaacaaggaacagaaactagagtttgcattcaaggtctacgacatcgaccgagacggcttcatcagcaatggcgagttgttcatcgtgctcaagatgatggtcggcagcaacttgaaggaccaacagctgcagcagatcgtcgacaagaccatcatggaggccgacctcgacaaggatgggaaaatcagctttgaggagtttacgaagatggtggagagtacagatattagcatgagcatgactctagatcaattctag

SEQ ID NO: 27124 - protein, 174 aa, Muscodor strobelii
  misc_feature: SGI Peptide ID NO. 569286
  misc_feature (135)..(163): Pfam Id: PF00036 Pfam Desc: EF hand
  misc_feature (94)..(122): Pfam Id: PF00036 Pfam Desc: EF hand
  misc_feature (25)..(53): Pfam Id: PF00036 Pfam Desc: EF hand
  misc_feature (57)..(85): Pfam Id: PF00036 Pfam Desc: EF hand
  misc_feature (1)..(174): NCBI GI: 255985329 Blast Desc: calcineurin regulatory subunit B [Beauveria bassiana] gi|255985331|gb|ACU46638.1| calcineurin regulatory subunit B [Beauveria bassiana]
  misc_feature (1)..(174): NCBI GI: 256730911 Blast Desc: [Nectria haematococca mpVI 77-13-4]
  misc_feature (1)..(174): NCBI GI: 261351527 Blast Desc: calcineurin subunit B [Verticillium albo-atrum VaMs.102]
  misc_feature (1)..(174): NCBI GI: 171694229 Blast Desc: protein product [Podospora anserina] gi|170947063|emb|CAP73868.1| protein product [Podospora anserina]
  misc_feature (1)..(174): NCBI GI: 154312082 Blast Desc: calcineurin regulatory subunit B [Botryotinia fuckeliana B05.10] gi|156064413|ref|XP_001598128.1| calcineurin B subunit [Sclerotinia sclerotiorum 1980] calcineurin [Botryotinia
  misc_feature (1)..(174): NCBI GI: 46126053 Blast Desc: CALB_NEUCR Calcineurin B subunit (Protein phosphatase 2B regulatory subunit) (Calcineurin regulatory subunit) [Gibberella zeae PH-1]
  misc_feature (1)..(174): NCBI GI: 2073454 Blast Desc: calcineurin regulatory subunit [Neurospora crassa]
  misc_feature (1)..(174): NCBI GI: 116198221 Blast Desc: calcineurin B subunit [Chaetomium globosum CBS 148.51] gi|88178545|gb|EAQ86013.1| calcineurin B subunit [Chaetomium globosum CBS 148.51]
  misc_feature (1)..(174): NCBI GI: 189209019 Blast Desc: calcineurin subunit B [Pyrenophora tritici-repentis Pt-1C-BFP] gi|134141161|gb|ABO61189.1| calcineurin B [Setosphaeria turcica] gi|187976935|gb|EDU43561.1| calcineurin B
  misc_feature (1)..(174): NCBI GI: 169598356 Blast Desc: SNOG_01980 [Phaeosphaeria nodorum SN15] gi|111069072|gb|EAT90192.1| SNOG_01980 [Phaeosphaeria nodorum SN15]
  misc_feature (15)..(166): SWISSPROT Homolog: EC 2.7.11.1 Non-specific serine/threonine protein kinase
MGNTTSTVLDSIVQGTNFDHEEVERLRKRFMKLDKDQSGAIERDEFLSLPQISSNPLATRLIAIFDEDGGGDIDFQEFVSGLSAFSSKGNKEQKLEFAFKVYDIDRDGFISNGELFIVLKMMVGSNLKDQQLQQIVDKTIMEADLDKDGKISFEEFTKMVESTDISMSMTLDQF

SEQ ID NO: 27125 - DNA, 1381 bp, Muscodor strobelii
  misc_feature: SGI EST ID NO. CUFF.64044.0
  misc_feature: Variant of the nucleotide sequence at SEQ ID NO 27123
cgcagaagtaacgaacatggatgcagtgtccagcttctagaagtcgcgcctaggccttgaggttccaggccgttggctgcctcgttggctgctgttgaagtgtcgttgaatcctcctgaccctggactttgttctaccccaccatcgacccgtcccccgttccagcccgcttctcagccttacctacacttgatcttctgctctacgacgaatacctacctcttcgcatattcgcgatcattaaactcggggccattttgacgctcgccgccctctttctaccgctacgacccggcctacctataccacctataccacgacctcctcacgagcttggcttgcctcctagctattaccgctgcagcttgctcccgtcaacacaaccacgcctctcaggggcacacgacacaatgggtaacaccacgagtaccgtcttggacagcattgtccagggcaccaacttcgatcatgaggaagtagaacgtttgaggaagagatttatgaaactcgacaaagatcaatctggagctatcgagcgcgacgaattcctgagtttaccgcagatatcatcgaatcccctagcaacaaggctgatagcaatcttcgacgaagatggtggtggcgacattgatttccaggagttcgtgtcaggactgagcgcattcagcagcaaaggcaacaaggaacagaaactagagtttgcattcaaggtctacgacatcgaccgagacggcttcatcagcaatggcgagttgttcatcgtgctcaagatgatggtcggcagcaacttgaaggaccaacagctgcagcagatcgtcgacaagaccatcatggaggccgacctcgacaaggatgggaaaatcagctttgaggagtttacgaagatggtggagagtacagatattagcatgagcatgactctagatcaattctaggatgacgaagacagggaattgcatcaactctgtatggtcctttcgcttcggaaggcgctctgctcaaggcgtgaatgcattactaaaccgatgaagctatgattaataccttgactttcaccaatggcatgacatagttggcgttattggctacctagaaatactggtatactgccaagtcatcttacagatttcaggcgcctaagaaagggtgcgagggttggactggtataggcaggagggatgaggcagcacaatgaatatagtcatgacagccctcatccttagaccgatgcgtaaatactctatatctacctgagagttttcaacgtgatcgccgtgcaagtggcggcgatttgaccatagagcaacgcgacaccaaactgcggcactcatctcccatgaactacagacgacgaatgatgactaatcaaaattttgactct

SEQ ID NO: 27126 - DNA, 456 bp, Muscodor strobelii
  misc_feature: SGI cDNA ID NO. 569287
  misc_feature: Encodes the peptide sequence at SEQ ID NO 27127
atgttccctggtaatcatcaaccatcatcattgatgccgtctgagcttcccactggcctcgcgaaaatcaagggtgtcaagatcgattgtctcggcgaccagaaaatgttcaacaagccgcaatttgaggagattggactggccgaaaccgacaacatctccagtaatcatgaggtctcgaatattgcaaagcgtattggcattctaatactgactaagcgctgctttacttgtgctatatcgatagatactaaacactcggttatctttggcggccagagccctggcaaaaaccaagatgccacgctcttacacttatgtattgatcctaatgcaaagcaagaagtctcacgcgacatcttgagttggggctggacatcagcgcaatggatgattggcgttgggagcacgattgtagtacagcaggataagaagccttgtcgcactgacatatga

SEQ ID NO: 27127 - protein, 151 aa, Muscodor strobelii
  misc_feature: SGI Peptide ID NO. 569287
  misc_feature (19)..(145): NCBI GI: 169602325 Blast Desc: SNOG_04159 [Phaeosphaeria nodorum SN15] gi|160706143|gb|EAT87919.2| SNOG_04159 [Phaeosphaeria nodorum SN15]
MFPGNHQPSSLMPSELPTGLAKIKGVKIDCLGDQKMFNKPQFEEIGLAETDNISSNHEVSNIAKRIGILILTKRCFTCAISIDTKHSVIFGGQSPGKNQDATLLHLCIDPNAKQEVSRDILSWGWTSAQWMIGVGSTIVVQQDKKPCRTDI

SEQ ID NO: 27128 - DNA, 954 bp, Muscodor strobelii
  misc_feature: SGI cDNA ID NO. 569288
  misc_feature: Encodes the peptide sequence at SEQ ID NO 27129
atgtctgtgttctcgttttctactacgggcattgaagtcgtcaacgccttccggcaccgtataagcggcaggacaattctaataaccggcccaagtgagggaagcattggcgcagaaattgcaatatccttagcccatggcgagccgctgcacttggttttgctgggaagaggcttaccaaaggctcagtctgtcatcgacactatcttagcgacaagcccttcgacgaaagtcgatttcattccaattgatctcagttcccagcgatccattcgagaagctaccgcgtcaattttaaccctagtatcaaaaattgacatcttgatcaacaacgctggtattatggcatgcccttggtccaagaccgaggacggcgttgaaagccaattcgccacgaactatcttggccatttccttctgacgaatctccttatcgagaagcttttgctcgtagatcacgcacgtgttgtcaacacaactagcaccggaggattcggggatgccatcgacttcaaagacgtgaatttcgaggatggaaagacatatgttcctgtagctggttatgcgcagtccaagcttgccatgatgctgttcagcaaggcattgtcgcaacgtttcgagccagcgaaactctcgtcttttgcggtccatcctggaaatattaagactaatctacaaatacatctgcaagatccttcggctttcaaatcggctgttgaatggattgtggccaagtctggtggcccttttcatcgagaggagttcaagacccttcagcaaggcgcgtctacaagtttagtcgcggcactagaccctacactcactgaggcatcaggacattatctcgcagacgcgcagctggtatcatcggaaaaatctgaagtcgaccaggttctgatagaacgtttgtggacactgagcgaagagcttgttgggcagaagtttgattggtag

SEQ ID NO: 27129 - protein, 317 aa, Muscodor strobelii
  misc_feature: SGI Peptide ID NO. 569288
  misc_feature (24)..(207): Pfam Id: PF00106 Pfam Desc: short chain dehydrogenase
  misc_feature (24)..(165): Pfam Id: PF00106 Pfam Desc: short chain dehydrogenase
  misc_feature (1)..(315): NCBI GI: 238496683 Blast Desc: short-chain dehydrogenase, [Aspergillus flavus NRRL3357] gi|220694457|gb|EED50801.1| short-chain dehydrogenase, [Aspergillus flavus NRRL3357]
  misc_feature (25)..(315): NCBI GI: 169774723 Blast Desc: [Aspergillus oryzae RIB40] gi|83769692|dbj|BAE59827.1| protein product [Aspergillus oryzae]
  misc_feature (4)..(316): NCBI GI: 154317021 Blast Desc: BC1G_03928 [Botryotinia fuckeliana B05.10] gi|150845540|gb|EDN20733.1| BC1G_03928 [Botryotinia fuckeliana B05.10]
  misc_feature (1)..(275): NCBI GI: 154315228 Blast Desc: BC1G_04653 [Botryotinia fuckeliana B05.10] gi|150847616|gb|EDN22809.1| BC1G_04653 [Botryotinia fuckeliana B05.10]
  misc_feature (1)..(317): NCBI GI: 145249970 Blast Desc: An14g07010 [Aspergillus niger] gi|134082009|emb|CAK46694.1| protein product [Aspergillus niger]
  misc_feature (1)..(317): NCBI GI: 119483786 Blast Desc: short-chain dehydrogenase [Neosartorya fischeri NRRL 181] gi|119409952|gb|EAW19899.1| short-chain dehydrogenase [Neosartorya fischeri NRRL 181]
  misc_feature (1)..(315): NCBI GI: 115443522 Blast Desc: [Aspergillus terreus NIH2624] gi|114188437|gb|EAU30137.1| [Aspergillus terreus NIH2624]
  misc_feature (25)..(316): NCBI GI: 85112940 Blast Desc: NCU09735 [Neurospora crassa OR74A] gi|28926219|gb|EAA35201.1| [Neurospora crassa OR74A]
  misc_feature (1)..(317): NCBI GI: 145247610 Blast Desc: An12g10060 [Aspergillus niger] gi|134080793|emb|CAL00907.1| protein product [Aspergillus niger]
  misc_feature (1)..(317): NCBI GI: 212539079 Blast Desc: short-chain dehydrogenase, [Penicillium marneffei ATCC 18224] gi|210069437|gb|EEA23528.1| short-chain dehydrogenase, [Penicillium marneffei ATCC 18224]
  misc_feature (24)..(232): SWISSPROT Homolog: EC 1.1.1.62 Estradiol 17-beta-dehydrogenase
  misc_feature (24)..(232): SWISSPROT Homolog: EC 1.1.1.270 3-keto-steroid reductase
MSVFSFSTTGIEVVNAFRHRISGRTILITGPSEGSIGAEIAISLAHGEPLHLVLLGRGLPKAQSVIDTILATSPSTKVDFIPIDLSSQRSIREATASILTLVSKIDILINNAGIMACPWSKTEDGVESQFATNYLGHFLLTNLLIEKLLLVDHARVVNTTSTGGFGDAIDFKDVNFEDGKTYVPVAGYAQSKLAMMLFSKALSQRFEPAKLSSFAVHPGNIKTNLQIHLQDPSAFKSAVEWIVAKSGGPFHREEFKTLQQGASTSLVAALDPTLTEASGHYLADAQLVSSEKSEVDQVLIERLWTLSEELVGQKFDW

SEQ ID NO: 27130 - DNA, 580 bp, Muscodor strobelii
  misc_feature: SGI EST ID NO. CUFF.64012.0
  misc_feature: Variant of the nucleotide sequence at SEQ ID NO 27128
gaaattgcaatatccttagcccatggcgagccgctgcacttggttttgctgggaagaggcttaccaaaggctcagtctgtcatcgacactatcttagcgacaagcccttcgacgaaagtcgatttcattccaattgatctcagttcccagcgatccattcgagaagctaccgcgtcaattttaaccctagtatcaaaaattgacatcttgatcaacaacgctggtattatggcatgcccttggtccaagaccgaggacggcgttgaaagccaattcgccacgaactatcttggccatttccttctgacgaatctccttatcgagaagcttttgctcgtagatcacgcacgtgttgtcaacacaactagcaccggaggattcggggatgccatcgacttcaaagacgtgaatttcgaggatggaaagacatatgttcctgtagctggttatgcgcagtccaagcttgccatgatgctgttcagcaaggcattgtcgcaacgtttcgagccagcgaaactctcgtcttttgcggtccatcctggaaatccttcggctttcaaatcggctgttgaatggattg

SEQ ID NO: 27131 - DNA, 1011 bp, Muscodor strobelii
  misc_feature: SGI cDNA ID NO. 569289
  misc_feature: Reduced expression when VOC is produced
  misc_feature: Encodes the peptide sequence at SEQ ID NO 27132
atggccgattatatccaggtggttgaaatgtcccatatgcgacacgctaaagatgatggagatgattgggccggagtatctaactacgcagctcggaaaaagcgacagaaccgcctcaatcaacgagctttgagtatgttgcagcattcacttggtgagatatggagtgttgacttacagcccatagggaagcgcaaggcagcggtgagacagatggaaaatgtcgcacatgaagagccccaatttcatcgtgcgacgatccagtccgcaacactttcgggtgcagactcggttgcaccgggggttcatcccgatgtgaatcgcgcagcaatgccccacgacatgaccttatggactcaaggactgtcaacaggtcccaacgtatcgcactgttatacgtcacagacttctcaggatgaggcggtcagcgggggtcgtaatagacaagagaggaagcagccacatttcgtagtgacccttgggccgactcggatcgcttttaatctctacgagtcatttcctttacctgctgatcacctcctaactctcgtgcgatacaatctctatcgggcctgcgccgctaatgcgcggctgctgggtgtcgatccgagggccatgcacgacgacataatctcaccatttaacaacgcagtagccggcgcgcatttgccgctacctcaatcgttagctccttcagacatacagcgaagaatagtccatcatccgtggatcgacgtatttcccttcagcaaggtgagagatagcgtaattgcggcggagggttgtttttctgacgatgagctctgcgctgatgttggaggaaaaaacgattcagcagagcacactggtcttatagtatggggtgaagcttgggacccgatgggatgggagatatcggcctttgtggcaatgaaatggggatggctctttcatgggtgcgaggaattgtttgctgctaccgattattggaggaagcagcgagatgagcctccattattctccgtcatgtga

SEQ ID NO: 27132 - protein, 336 aa, Muscodor strobelii
  misc_feature: SGI Peptide ID NO. 569289
  misc_feature (5)..(332): NCBI GI: 242821991 Blast Desc: conserved [Talaromyces stipitatus ATCC 10500] gi|218712714|gb|EED12139.1| conserved [Talaromyces stipitatus ATCC 10500]
  misc_feature (1)..(329): NCBI GI: 156036494 Blast Desc: SS1G_12936 [Sclerotinia sclerotiorum 1980] gi|154698341|gb|EDN98079.1| SS1G_12936 [Sclerotinia sclerotiorum 1980]
  misc_feature (5)..(333): NCBI GI: 256720429 Blast Desc: NECHADRAFT_94810 [Nectria haematococca mpVI 77-13-4]
  misc_feature (137)..(333): NCBI GI: 119474359 Blast Desc: NFIA_005200 [Neosartorya fischeri NRRL 181] gi|119407208|gb|EAW17158.1| conserved [Neosartorya fischeri NRRL 181]
  misc_feature (175)..(332): NCBI GI: 115396054 Blast Desc: [Aspergillus terreus NIH2624] gi|114193235|gb|EAU34935.1| [Aspergillus terreus NIH2624]
  misc_feature (5)..(332): NCBI GI: 255931371 Blast Desc: Pc12g03590 [Penicillium chrysogenum Wisconsin 54-1255] gi|211581861|emb|CAP79986.1| Pc12g03590 [Penicillium chrysogenum Wisconsin 54-1255]
  misc_feature (5)..(332): NCBI GI: 212546953 Blast Desc: conserved [Penicillium marneffei ATCC 18224] gi|210065150|gb|EEA19245.1| conserved [Penicillium marneffei ATCC 18224]
  misc_feature (21)..(333): NCBI GI: 154294835 Blast Desc: BC1G_13540 [Botryotinia fuckeliana B05.10] gi|150844498|gb|EDN19691.1| BC1G_13540 [Botryotinia fuckeliana B05.10]
  misc_feature (164)..(336): NCBI GI: 255943949 Blast Desc: Pc20g01830 [Penicillium chrysogenum Wisconsin 54-1255] gi|211587477|emb|CAP85512.1| Pc20g01830 [Penicillium chrysogenum Wisconsin 54-1255]
  misc_feature (20)..(333): NCBI GI: 255936509 Blast Desc: Pc13g08560 [Penicillium chrysogenum Wisconsin 54-1255] gi|211583901|emb|CAP91925.1| Pc13g08560 [Penicillium chrysogenum Wisconsin 54-1255]
  misc_feature: Useful for introducing or modulating the production of volatile compounds
MADYIQVVEMSHMRHAKDDGDDWAGVSNYAARKKRQNRLNQRALSMLQHSLGEIWSVDLQPIGKRKAAVRQMENVAHEEPQFHRATIQSATLSGADSVAPGVHPDVNRAAMPHDMTLWTQGLSTGPNVSHCYTSQTSQDEAVSGGRNRQERKQPHFVVTLGPTRIAFNLYESFPLPADHLLTLVRYNLYRACAANARLLGVDPRAMHDDIISPFNNAVAGAHLPLPQSLAPSDIQRRIVHHPWIDVFPFSKVRDSVIAAEGCFSDDELCADVGGKNDSAEHTGLIVWGEAWDPMGWEISAFVAMKWGWLFHGCEELFAATDYWRKQRDEPPLFSVM

SEQ ID NO: 27133 - DNA, 1178 bp, Muscodor strobelii
  misc_feature: SGI EST ID NO. CUFF.64014.0
  misc_feature: Variant of the nucleotide sequence at SEQ ID NO 27131
agttactagagattgtgcgacatggccgattatatccaggtggttgaaatgtcccatatgcgacacgctaaagatgatggagatgattgggccggagtatctaactacgcagctcggaaaaagcgacagaaccgcctcaatcaacgagctttgaggaagcgcaaggcagcggtgagacagatggaaaatgtcgcacatgaagagccccaatttcatcgtgcgacgatccagtccgcaacactttcgggtgcagactcggttgcaccgggggttcatcccgatgtgaatcgcgcagcaatgccccacgacatgaccttatggactcaaggactgtcaacaggtcccaacgtatcgcactgttatacgtcacagacttctcaggatgaggcggtcagcgggggtcgtaatagacaagagaggaagcagccacatttcgtagtgacccttgggccgactcggatcgcttttaatctctacgagtcatttcctttacctgctgatcacctcctaactctcgtgcgatacaatctctatcgggcctgcgccgctaatgcgcggctgctgggtgtcgatccgagggccatgcacgacgacataatctcaccatttaacaacgcagtagccggcgcgcatttgccgctacctcaatcgttagctccttcagacatacagcgaagaatagtccatcatccgtggatcgacgtatttcccttcagcaaggtgagagatagcgtaattgcggcggagggttgtttttctgacgatgagctctgcgctgatgttggaggaaaaaacgattcagcagagcacactggtcttatagtatggggtgaagcttgggacccgatgggatgggagatatcggcctttgtggcaatgaaatggggatggctctttcatgggtgcgaggaattgtttgctgctaccgattattggaggaagcagcgagatgagcctccattattctccgtcatgtgagaattctctaatcccaagcaagggccacatgggcatcgcaaagaattgtgttcgaccgtcaagcgatacgtatattgcttcgctcagcaatcctcgtcgtcttggttcaatcagagacagtggatacagagtgcattatggcgatgtaagacgctactcagtacctaggtaatcattgatagtagattctgtaaacaatc

SEQ ID NO: 27134 - DNA, 957 bp, Muscodor strobelii
  misc_feature: SGI cDNA ID NO. 569290
  misc_feature: Elevated expression when VOC is produced
  misc_feature: Encodes the peptide sequence at SEQ ID NO 27135
atggccgattatatccaggtggttgaaatgtcccatatgcgacacgctaaagatgatggagatgattgggccggagtatctaactacgcagctcggaaaaagcgacagaaccgcctcaatcaacgagctttgaggaagcgcaaggcagcggtgagacagatggaaaatgtcgcacatgaagagccccaatttcatcgtgcgacgatccagtccgcaacactttcgggtgcagactcggttgcaccgggggttcatcccgatgtgaatcgcgcagcaatgccccacgacatgaccttatggactcaaggactgtcaacaggtcccaacgtatcgcactgttatacgtcacagacttctcaggatgaggcggtcagcgggggtcgtaatagacaagagaggaagcagccacatttcgtagtgacccttgggccgactcggatcgcttttaatctctacgagtcatttcctttacctgctgatcacctcctaactctcgtgcgatacaatctctatcgggcctgcgccgctaatgcgcggctgctgggtgtcgatccgagggccatgcacgacgacataatctcaccatttaacaacgcagtagccggcgcgcatttgccgctacctcaatcgttagctccttcagacatacagcgaagaatagtccatcatccgtggatcgacgtatttcccttcagcaaggtgagagatagcgtaattgcggcggagggttgtttttctgacgatgagctctgcgctgatgttggaggaaaaaacgattcagcagagcacactggtcttatagtatggggtgaagcttgggacccgatgggatgggagatatcggcctttgtggcaatgaaatggggatggctctttcatgggtgcgaggaattgtttgctgctaccgattattggaggaagcagcgagatgagcctccattattctccgtcatgtga

SEQ ID NO: 27135 - protein, 318 aa, Muscodor strobelii
  misc_feature: SGI Peptide ID NO. 569290
  misc_feature (5)..(314): NCBI GI: 242821991 Blast Desc: conserved [Talaromyces stipitatus ATCC 10500] gi|218712714|gb|EED12139.1| conserved [Talaromyces stipitatus ATCC 10500]
  misc_feature (1)..(311): NCBI GI: 156036494 Blast Desc: SS1G_12936 [Sclerotinia sclerotiorum 1980] gi|154698341|gb|EDN98079.1| SS1G_12936 [Sclerotinia sclerotiorum 1980]
  misc_feature (5)..(315): NCBI GI: 256720429 Blast Desc: NECHADRAFT_94810 [Nectria haematococca mpVI 77-13-4]
  misc_feature (5)..(314): NCBI GI: 255931371 Blast Desc: Pc12g03590 [Penicillium chrysogenum Wisconsin 54-1255] gi|211581861|emb|CAP79986.1| Pc12g03590 [Penicillium chrysogenum Wisconsin 54-1255]
  misc_feature (32)..(315): NCBI GI: 119474359 Blast Desc: NFIA_005200 [Neosartorya fischeri NRRL 181] gi|119407208|gb|EAW17158.1| conserved [Neosartorya fischeri NRRL 181]
  misc_feature (5)..(314): NCBI GI: 212546953 Blast Desc: conserved [Penicillium marneffei ATCC 18224] gi|210065150|gb|EEA19245.1| conserved [Penicillium marneffei ATCC 18224]
  misc_feature (32)..(314): NCBI GI: 115396054 Blast Desc: [Aspergillus terreus NIH2624] gi|114193235|gb|EAU34935.1| [Aspergillus terreus NIH2624]
  misc_feature (20)..(315): NCBI GI: 255936509 Blast Desc: Pc13g08560 [Penicillium chrysogenum Wisconsin 54-1255] gi|211583901|emb|CAP91925.1| Pc13g08560 [Penicillium chrysogenum Wisconsin 54-1255]
  misc_feature (14)..(318): NCBI GI: 259481532 Blast Desc: TPA: conserved [Aspergillus nidulans FGSC A4]
  misc_feature (5)..(314): NCBI GI: 156062384 Blast Desc: SS1G_01308 [Sclerotinia sclerotiorum 1980] gi|154696644|gb|EDN96382.1| SS1G_01308 [Sclerotinia sclerotiorum 1980]
  misc_feature: Useful for introducing or modulating the production of volatile compounds
MADYIQVVEMSHMRHAKDDGDDWAGVSNYAARKKRQNRLNQRALRKRKAAVRQMENVAHEEPQFHRATIQSATLSGADSVAPGVHPDVNRAAMPHDMTLWTQGLSTGPNVSHCYTSQTSQDEAVSGGRNRQERKQPHFVVTLGPTRIAFNLYESFPLPADHLLTLVRYNLYRACAANARLLGVDPRAMHDDIISPFNNAVAGAHLPLPQSLAPSDIQRRIVHHPWIDVFPFSKVRDSVIAAEGCFSDDELCADVGGKNDSAEHTGLIVWGEAWDPMGWEISAFVAMKWGWLFHGCEELFAATDYWRKQRDEPPLFSVM

SEQ ID NO: 27136 - DNA, 1178 bp, Muscodor strobelii; identical to SEQ ID NO: 27133
  misc_feature: SGI EST ID NO. CUFF.64014.0
  misc_feature: Variant of the nucleotide sequence at SEQ ID NO 27134

SEQ ID NO: 27137 - DNA, 1899 bp, Muscodor strobelii
  misc_feature: SGI cDNA ID NO. 569291
  misc_feature: Encodes the peptide sequence at SEQ ID NO 27138
atgtcgcaccaggcaaaatctccgtcagactcggcggtctgtaagattcatgaagacgccaatctcgctgtcatagtccacgaaaaagatccgatgaaccacgacggaccagacgttgcaacgaaaactttcaagattgaccgcaacgtgctagctgctgcctcgccggtgtttagagccatgcttaccaatcccgggtttgtcgaatcgcgagggtccgaaatcattctcatcgaagacacaggcgtcacctgtagtgctattaacgtcttattgacagcactatactgcaagtctcagttcaattcgaaaacgccagacgaatgggaaagtatctgccgcgatggcaatgtactttacaaaatcacgtcggaggacatcatggagatcatcgacctcctctgtcttgcaccattagagggtgcttacggcatgtgccacgtatgctttgacaatgtggcgccgaaatatgatatcaagtcagcagtgaagctagaagaactatgtgcttggttggattacctttctgaggagacatccaatggctttcgcacgataaaacctcaccgctcgatgactctttctcgagagcagctgatctcttctatgcgtgagaagagaaaattattcagagattacgtcgtcgaagaacctctcacgtggcatggtgactcaatcgacgatcacatcagtgacaaagatgagcatgagaacgagacccaagacgctagtgccgaccagacaccaaagcaacgagatttcagcgaagaatacatgacgactcccttgcagatcgcccaattcgttcgcgaatactttagctctaggattgtatggagtgcggaacgagagaacattcttgttcaagagtttaagtcatttcaaatagcacaagaggaacatacaccacaggactcgtccactcacaagagcccaaatccttccaccgagtttagacttgcttccgattggatacagatggcgattgctgctgcattgaagggcaagtgtgcctgccaattagttgcctggaatataacggagtacttatggctccaaaattacccatacgaaggctatccaagcaagttagtacgcaaccaggaagccgatatcctcgagaggcatgcgcaagaccgagtcgaactatactgggctggatctcgagatgttctgtccttactgatcgccctggacaagtacgaaatccctttccatatgctctcggcatggttcggatggtggttcgaaatgaattgggaggagcttgttcaggagaaaaagccgacggctcgaatcgcgaagcaggcttggcttggacagtatctggctctgatacatgcagcatacaagtttgatcttgcaatgcccttccacgaggtgtcgctgtttcttgaaacctgtaccgacaacgatgagaaatctaatctcttcgcgaaatgtccgctccagaaactcgtcgcgaagtatccatatctggaggatgtcgtgaaacttgacgatgaaattgcaaggtgcttgaagagacctggtacttatggctccggacttcattgggaggggctttgcctggattgcttcaatgcctctctttacttttccggcaatcgcgaagttggaagagaggcgcaaaatcatgtgcagaagtgggcagatgaccacatgttatcatttgtgagacgtatccgcaaagacagatggattgccaattatgatggtcacatgactccagagaatcaatttggctgtagacaccatggtcgacattcaggttcatggaagagaagctgggtcgaggcacgagcaccgtcgatcacagagcgccagaagcaaatctatcataaggcgcaggagaagggatggttcattcttaccaaccacccgatatggctagattag

SEQ ID NO: 27138 - protein, 632 aa, Muscodor strobelii
  misc_feature: SGI Peptide ID NO. 569291
  misc_feature (38)..(80): Pfam Id: PF00651 Pfam Desc: BTB/POZ domain
MSHQAKSPSDSAVCKIHEDANLAVIVHEKDPMNHDGPDVATKTFKIDRNVLAAASPVFRAMLTNPGFVESRGSEIILIEDTGVTCSAINVLLTALYCKSQFNSKTPDEWESICRDGNVLYKITSEDIMEIIDLLCLAPLEGAYGMCHVCFDNVAPKYDIKSAVKLEELCAWLDYLSEETSNGFRTIKPHRSMTLSREQLISSMREKRKLFRDYVVEEPLTWHGDSIDDHISDKDEHENETQDASADQTPKQRDFSEEYMTTPLQIAQFVREYFSSRIVWSAERENILVQEFKSFQIAQEEHTPQDSSTHKSPNPSTEFRLASDWIQMAIAAALKGKCACQLVAWNITEYLWLQNYPYEGYPSKLVRNQEADILERHAQDRVELYWAGSRDVLSLLIALDKYEIPFHMLSAWFGWWFEMNWEELVQEKKPTARIAKQAWLGQYLALIHAAYKFDLAMPFHEVSLFLETCTDNDEKSNLFAKCPLQKLVAKYPYLEDVVKLDDEIARCLKRPGTYGSGLHWEGLCLDCFNASLYFSGNREVGREAQNHVQKWADDHMLSFVRRIRKDRWIANYDGHMTPENQFGCRHHGRHSGSWKRSWVEARAPSITERQKQIYHKAQEKGWFILTNHPIWLD

SEQ ID NO: 27139 - DNA, 1119 bp, Muscodor strobelii
  misc_feature: SGI cDNA ID NO. 569292
  misc_feature: Elevated expression when VOC is produced
  misc_feature: Encodes the peptide sequence at SEQ ID NO 27140
atggatccatcatggaaaaagcttctttatatcatcggacccttgtcgctcgtctccggagttcattgcgcttcgatcatcccgccgccaacagggccgtacggcgtcggcatgaagaggattgcaataccatatatcaacacagacgaccccatcgcaccaaataatgtaacaacggaattcttggccacggtctattaccccaccccggatcacttcgccggtcagcccgtgccttacttggatgcttctttggcggcactgttcgaagacgcttacaatgtgaccgcgggttctttcgcagatttaacgacggatgccatcattcaagatgccagctttctcggaggcacagcatatccgactctgcttttcgggccagcgggagttgggccacccgtcgccatgttttcaatcctactttctgacttggcttcctacggatatacagtgatcggagcggatcacccatacgaacagccattcataagatggccaaatgggacagcactatacgggctaccgccgttctcagaccctgattggtttgatgcagaaactttcataagtttccgcgtgaatgagacgaaggcagtgatcgacaacgctgatttgattgagcggtgcctcggaggtgctatcaacagaacccatatcgggaccttcggccactctgtgggaggcgctgcagctgccggcacactcgtgcatgataagcgtgttgattctgcgatagacatagacggaacattctggagtgaagatgaaaacaccgacgcaatgagacctgtgttgctattcagtgagccgagaattgacgatcactcttgggtcgcttttgcgtctgcacagactggatggtacaagcatctgagtgtcacgggctctttacatgtcgacttcactgacgagacattttggaagcaggttactgatgtgaaagcacatagtagctcgctcggcgacatcgacggcaaccgaatgatgaatattactcggaccttcgtacgatcattctttgattttacactgcgtggagtgcaagagccaattttgaacggtccctctaacgagtggccagatgtagtgtttgtgacgactgagaatggcacggcatag

SEQ ID NO: 27140 - protein, 372 aa, Muscodor strobelii
  misc_feature: SGI Peptide ID NO. 569292
  misc_feature (19)..(351): Pfam Id: PF03403 Pfam Desc: Platelet-activating factor acetylhydrolase, plasma/intracellular isoform II
  misc_feature (5)..(371): NCBI GI: 39977415 Blast Desc: MGG_06610 [Magnaporthe grisea 70-15] gi|145015942|gb|EDK00432.1| MGG_06610 [Magnaporthe grisea 70-15]
  misc_feature (27)..(365): NCBI GI: 271965670 Blast Desc: Sros_4221 [Streptosporangium roseum DSM 43021] gi|270508845|gb|ACZ87123.1| conserved [Streptosporangium roseum DSM 43021]
  misc_feature (50)..(363): NCBI GI: 115396058 Blast Desc: [Aspergillus terreus NIH2624] gi|114193237|gb|EAU34937.1| [Aspergillus terreus NIH2624]
  misc_feature (26)..(364): NCBI GI: 254390140 Blast Desc: lipase [Streptomyces clavuligerus ATCC 27064] gi|197703847|gb|EDY49659.1| lipase [Streptomyces clavuligerus ATCC 27064]
  misc_feature (23)..(366): NCBI GI: 225936774 Blast Desc: lipase [Streptomyces violaceoruber]
  misc_feature (28)..(362): NCBI GI: 119482435 Blast Desc: PAF acetylhydrolase family protein [Neosartorya fischeri NRRL 181] gi|119409400|gb|EAW19349.1| PAF acetylhydrolase family protein [Neosartorya fischeri NRRL 181]
  misc_feature (3)..(362): NCBI GI: 242805475 Blast Desc: PAF acetylhydrolase family protein [Talaromyces stipitatus ATCC 10500] gi|218715163|gb|EED14585.1| PAF acetylhydrolase family protein [Talaromyces stipitatus ATCC
  misc_feature (13)..(364): NCBI GI: 254393426 Blast Desc: conserved [Streptomyces clavuligerus ATCC 27064] gi|197707055|gb|EDY52867.1| conserved [Streptomyces clavuligerus ATCC 27064]
  misc_feature (27)..(365): NCBI GI: 261406689 Blast Desc: protein of function DUF214 [Geobacillus sp. Y412MC10] gi|261283152|gb|ACX65123.1| protein of function DUF214 [Geobacillus sp. Y412MC10]
  misc_feature (25)..(365): NCBI GI: 271966227 Blast Desc: Sros_4862 [Streptosporangium roseum DSM 43021] gi|270509402|gb|ACZ87680.1| conserved [Streptosporangium roseum DSM 43021]
  misc_feature: Useful for introducing or modulating the production of volatile compounds
MDPSWKKLLYIIGPLSLVSGVHCASIIPPPTGPYGVGMKRIAIPYINTDDPIAPNNVTTEFLATVYYPTPDHFAGQPVPYLDASLAALFEDAYNVTAGSFADLTTDAIIQDASFLGGTAYPTLLFGPAGVGPPVAMFSILLSDLASYGYTVIGADHPYEQPFIRWPNGTALYGLPPFSDPDWFDAETFISFRVNETKAVIDNADLIERCLGGAINRTHIGTFGHSVGGAAAAGTLVHDKRVDSAIDIDGTFWSEDENTDAMRPVLLFSEPRIDDHSWVAFASAQTGWYKHLSVTGSLHVDFTDETFWKQVTDVKAHSSSLGDIDGNRMMNITRTFVRSFFDFTLRGVQEPILNGPSNEWPDVVFVTTENGTA

SEQ ID NO: 27141 - DNA, 2525 bp, Muscodor strobelii
  misc_feature: SGI EST ID NO. CUFF.64032.0
  misc_feature: Variant of the nucleotide sequence at SEQ ID NO 27139
ctgaaagttgacctcatgccgatttgcgtcacaaacatggatccatcatggaaaaagcttctttatatcatcggacccttgtcgctcgtctccggagttcattgcgcttcgatcatcccgccgccaacagggccgtacggcgtcggcatgaagaggattgcaataccatatatcaacacagacgaccccatcgcaccaaataatgtaacaacggaattcttggccacggtctattaccccaccccggatcacttcgccggtcagcccgtgccttacttggatgcttctttggcggcactgttcgaagacgcttacaatgtgaccgcgggttctttcgcagatttaacgacggatgccatcattcaagatgccagctttctcggaggcacagcatatccgactctgcttttcgggccagcgggagttgggccacccgtcgccatgttttcaatcctactttctgacttggcttcctacggatatacagtgatcggagcggatcacccatacgaacagccattcataagatggccaaatgggacagcactatacgggctaccgccgttctcagaccctgattggtttgatgcagaaactttcataagtttccgcgtgaatgagacgaaggcagtgatcgacaacgctgatttgattgagcggtgcctcggaggtgctatcaacagaacccatatcgggaccttcggccactctgtgggaggcgctgcagctgccggcacactcgtgcatgataagcgtgttgattctgcgatagacatagacggaacattctggagtgaagatgaaaacaccgacgcaatgagacctgtgttgctattcagtgagccgagaattgacgatcactcttgggtcgcttttgcgtctgcacagactggatggtacaagcatctgagtgtcacgggctctttacatgtcgacttcactgacgagacattttggaagcaggttactgatgtgaaagcacatagtagctcgctcggcgacatcgacggcaaccgaatgatgaatattactcggaccttcgtacgatcattctttgattttacactgcgtggagtgcaagagccaattttgaacggtccctctaacgagtggccagatgtagtgtttgtgacgactgagaatggcacggcataggataacttatctttcctggcacgagtcagaggaacggcaattaaacatagccagttccagatattctgccatctgcaaatgacaaatcctagccgtaccgtggcctgttctatctagggcctaggaccgtcattgtacatctaagatgccctgttcatagtcgtatcacataccaacctttttgcatgtagatcactttcccctcagttatgcctttgaagctatgtcacgtccaatctcgccaattgccctgatcagaccatccacggtcccctctaacgtctgacaattgatcacgacccgaaagaagttgccgtggggacccggagagtgatcaatcatgaaaccccgcggtatcaatcgcttcacggcctgcactgttcgccttgtattcgcttcgacgtcttcgactagtacaccaccaggggcgtaatagaaacatacctgtagacacggaggagggtcattgctgactagttgcaattctggatgctgctggaccaacattgtaagcttggcagctattgtaaatgcatgatcaacttgtttctcaaacccgcccgctccgtaatagatccatgcaagcgctagcttcaacgcgtcgccccggcggccgcattgaagtgttaggtctgctaggtcccagtattctgttgcatcattctcatcatcattatcgctgtcgtcgttttcgtcgttgtgaaacaaatacccagcagctaacgtgttggccctcttaaacactcgcaaatcattcgtcagcaggaaggagcacgtcaaaggcacattcaacatcttgtgaggattgactgtcagtgagttggctaattcgctgccgtcaagtttaggtcgatgctttgctgagaatacgacgcttcctccccaagatccatcgatgtgtagccagaggccgaactccttgcagattgccgaaatggccctgattggatcgtatgagccgtagacggtagtaccggccgttgcgttcacgtagaacggggtcttgccgttatgctttgcctcaacaatagcatcgcggagcgcgctagggatgatgcaaccagcctcatctacgggtatggcaacgacggcggcttttccaaggccaagaattgttgctgccttctcaaccgagtagtgaccgtgctggcttgtgaacattacgaagtgatgacttccattgccattttctttgcagtctgggtagagtgtgttccgggccacgacgacggacgtgagattagaggacgaacctccttggcaagtgatccctccggcgcgtgggccattaaacccaaataaagcggcaagtgactttccagtttgtcgctcaatcactgttaaggctggtgagacattgtacacgtgca

SEQ ID NO: 27142 - DNA, 1554 bp, Muscodor strobelii
  misc_feature: SGI cDNA ID NO. 569293
  misc_feature: Encodes the peptide sequence at SEQ ID NO 27143
atgatcgcagatgcagatggctcggtcggcgtccacagcacgttgaacagggcatccgaagtcgacgagctgttgacagccgtgaaatccttgattgtgcccttcatcaaatctgcagacgatgcggtgctagatagagctgcgggcataagttcggcgcaacatggttgtctcgtcaatgcctacgcgcctcaagccttagctgaaaaactgtcgctttctctacctgcacaagaaggcgaagggcgggaggggctactggacacgatccagaccctgttagatcacagcgtaaatacttgggaccagggcttcctcgacaaactctactcaagcaccaatgctgtaggagtcatatcagagctgatactttccgttctgaatacaaatgtgcacgtgtacaatgtctcaccagccttaacagtgattgagcgacaaactggaaagtcacttgccgctttatttgggtttaatggcccacgcgccggagggatcacttgccaaggaggttcgtcctctaatctcacgtccgtcgtcgtggcccggaacacactctacccagactgcaaagaaaatggcaatggaagtcatcacttcgtaatgttcacaagccagcacggtcactactcggttgagaaggcagcaacaattcttggccttggaaaagccgccgtcgttgccatacccgtagatgaggctggttgcatcatccctagcgcgctccgcgatgctattgttgaggcaaagcataacggcaagaccccgttctacgtgaacgcaacggccggtactaccgtctacggctcatacgatccaatcagggccatttcggcaatctgcaaggagttcggcctctggctacacatcgatggatcttggggaggaagcgtcgtattctcagcaaagcatcgacctaaacttgacggcagcgaattagccaactcactgacagtcaatcctcacaagatgttgaatgtgcctttgacgtgctccttcctgctgacgaatgatttgcgagtgtttaagagggccaacacgttagctgctgggtatttgtttcacaacgacgaaaacgacgacagcgataatgatgatgagaatgatgcaacagaatactgggacctagcagacctaacacttcaatgcggccgccggggcgacgcgttgaagctagcgcttgcatggatctattacggagcgggcgggtttgagaaacaagttgatcatgcatttacaatagctgccaagcttacaatgttggtccagcagcatccagaattgcaactagtcagcaatgaccctcctccgtgtctacaggtatgtttctattacgcccctggtggtgtactagtcgaagacgtcgaagcgaatacaaggcgaacagtgcaggccgtgaagcgattgataccgcggggtttcatgattgatcactctccgggtccccacggcaacttctttcgggtcgtgatcaattgtcagacgttagaggggaccgtggatggtctgatcagggcaattggcgagattggacgtgacatagcttcaaaggcataa

SEQ ID NO: 27143 - protein, 517 aa, Muscodor strobelii
  misc_feature: SGI Peptide ID NO. 569293
  misc_feature (64)..(445): Pfam Id: PF00282 Pfam Desc: Pyridoxal-dependent decarboxylase conserved domain
  misc_feature (155)..(445): Pfam Id: PF00282 Pfam Desc: Pyridoxal-dependent decarboxylase conserved domain
  misc_feature (11)..(515): NCBI GI: 39943716 Blast Desc: MGG_03869 [Magnaporthe grisea 70-15] gi|145014558|gb|EDJ99126.1| MGG_03869 [Magnaporthe grisea 70-15]
  misc_feature (10)..(516): NCBI GI: 85094906 Blast Desc: NCU06112 [Neurospora crassa OR74A] gi|28921432|gb|EAA30738.1| NCU06112 [Neurospora crassa OR74A]
  misc_feature (13)..(512): NCBI GI: 256732597 Blast Desc: [Nectria haematococca mpVI 77-13-4]
  misc_feature (13)..(517): NCBI GI: 46125291 Blast Desc: FG07023.1 [Gibberella zeae PH-1]
  misc_feature (6)..(516): NCBI GI: 171679439 Blast Desc: protein product [Podospora anserina] gi|170939345|emb|CAP64573.1| protein product [Podospora anserina]
  misc_feature (9)..(516): NCBI GI: 121705704 Blast Desc: glutamate decarboxylase, [Aspergillus clavatus NRRL 1] gi|119399261|gb|EAW09689.1| glutamate decarboxylase, [Aspergillus clavatus NRRL 1]
  misc_feature (16)..(516): NCBI GI: 119491705 Blast Desc: glutamate decarboxylase, [Neosartorya fischeri NRRL 181] gi|119411507|gb|EAW21450.1| glutamate decarboxylase, [Neosartorya fischeri NRRL 181]
  misc_feature (16)..(516): NCBI GI: 145232897 Blast Desc: An02g06860 [Aspergillus niger] gi|134056742|emb|CAK44231.1| protein product [Aspergillus niger]
  misc_feature (16)..(516): NCBI GI: 159127521 Blast Desc: glutamate decarboxylase, [Aspergillus fumigatus A1163]
  misc_feature (16)..(516): NCBI GI: 70999580 Blast Desc: glutamate decarboxylase [Aspergillus fumigatus Af293] gi|66852144|gb|EAL92469.1| glutamate decarboxylase, [Aspergillus fumigatus Af293]
  misc_feature (58)..(513): SWISSPROT Homolog: EC 4.1.1.15 Glutamate decarboxylase
MIADADGSVGVHSTLNRASEVDELLTAVKSLIVPFIKSADDAVLDRAAGISSAQHGCLVNAYAPQALAEKLSLSLPAQEGEGREGLLDTIQTLLDHSVNTWDQGFLDKLYSSTNAVGVISELILSVLNTNVHVYNVSPALTVIERQTGKSLAALFGFNGPRAGGITCQGGSSSNLTSVVVARNTLYPDCKENGNGSHHFVMFTSQHGHYSVEKAATILGLGKAAVVAIPVDEAGCIIPSALRDAIVEAKHNGKTPFYVNATAGTTVYGSYDPIRAISAICKEFGLWLHIDGSWGGSVVFSAKHRPKLDGSELANSLTVNPHKMLNVPLTCSFLLTNDLRVFKRANTLAAGYLFHNDENDDSDNDDENDATEYWDLADLTLQCGRRGDALKLALAWIYYGAGGFEKQVDHAFTIAAKLTMLVQQHPELQLVSNDPPPCLQVCFYYAPGGVLVEDVEANTRRTVQAVKRLIPRGFMIDHSPGPHGNFFRVVINCQTLEGTVDGLIRAIGEIGRDIASKA

SEQ ID NO: 27144 - DNA, 463 bp, Muscodor strobelii
  misc_feature: SGI EST ID NO. CUFF.64036.0
  misc_feature: Variant of the nucleotide sequence at SEQ ID NO 27142
gctacatgaaacttacgcttagttcacaaaaaccccataactgctttgctgtatatgttagcatcaagatatctgttcatataaggcgcagtgaaacttttgagacaaaccagggaaagttcgagattgggcccacattaaaaaagaccacgaaatgatcgcagatgcagatggctcggtcggcgtccacagcacgttgaacagggcatccgaagtcgacgagctgttgacagccgtgaaatccttgattgtgcccttcatcaaatctgcagacgatgcggtgctagatagagctgcgggcataagttcggcgcaacatggttgtctcgtcaatgcctacgcgcctcaagccttagctgaaaaactgtcgctttctctacctgcacaagaaggcgaagggcgggaggggctactggacacgatccagaccctgttagatcacagcgtaaatacttgggaccag

SEQ ID NO: 27145 - DNA, 894 bp, Muscodor strobelii
  misc_feature: SGI cDNA ID NO. 569294
  misc_feature: Elevated expression when VOC is produced
  misc_feature: Encodes the peptide sequence at SEQ ID NO 27146
tttcagaagctcttggcactatcaccaaaacctagttggcgaacccgagggcttgaggcggccgccaagctcaccaggctctcgatcagcatacccgctcaaccccaaaatccagctgaactggtcgaagccttcagagggattcgtgtcaatggaagcgataagcacccaagtgaaggttcgggaagtgcctggatcgcgcacctcgatctgctcaaattcgtcatcgcatccgaatacgaaacggcgctcatactcgaggacgatgttgactgggacgtgcgattgaagagtcaaatgcaactcatctcggacaatgtacgcgcattcacgaacacgtcggacgatgacacaacgccgttcggccccgactgggatgtgctctggctcgggcactgcgggtccatgattgacgatgggatgacaccgacaccgatcagttatcgcgatgacacgcggtgcgagacggagctgtactcaggctggtcaacgcgcttcatccgagagaagatagaggaagggcatcgcttagtacagatcgccggctccacgacagtttgcagtttcggctacggggtcacgaagaaaagtgcgccgaagctgctagatcttctcggtaaaggtagtggtgtggcgtacgaccttcagatgcaagatctatgtcgcgaaagaaaattgcggtgtctgctcgtcaacccgcaggtgttcaaccattacgaaccgcccgctagcgtaggggatcagagcctagtgcacgccggtgatagggtcggcagcaaggacaatgagcaggatttcgagtccaaaaagggcacaacgggaaacatcatgaagagtgcgagatgtgaggcgttgtttgggtgcacttgcttgcgaccaccgtctgaaatatga

SEQ ID NO: 27146 - protein, 297 aa, Muscodor strobelii
  misc_feature: SGI Peptide ID NO. 569294
  misc_feature (1)..(287): NCBI GI: 67537776 Blast Desc: AN5058.2 [Aspergillus nidulans FGSC A4] gi|40740862|gb|EAA60052.1| AN5058.2 [Aspergillus nidulans FGSC A4] gi|259482062|tpe|CBF76181.1| TPA: conserved [Aspergillus FGSC
  misc_feature (1)..(292): NCBI GI: 169772373 Blast Desc: [Aspergillus oryzae RIB40] gi|83768516|dbj|BAE58653.1| protein product [Aspergillus oryzae]
  misc_feature (1)..(292): NCBI GI: 115384416 Blast Desc: conserved [Aspergillus terreus NIH2624] gi|114196447|gb|EAU38147.1| conserved [Aspergillus terreus NIH2624]
  misc_feature (1)..(292): NCBI GI: 169786351 Blast Desc: [Aspergillus oryzae RIB40] gi|83776384|dbj|BAE66503.1| protein product [Aspergillus oryzae]
  misc_feature (1)..(292): NCBI GI: 238507355 Blast Desc: conserved [Aspergillus flavus NRRL3357] gi|220689592|gb|EED45943.1| conserved [Aspergillus flavus NRRL3357]
  misc_feature (1)..(292): NCBI GI: 238490274 Blast Desc: conserved [Aspergillus flavus NRRL3357] gi|220696787|gb|EED53128.1| conserved [Aspergillus flavus NRRL3357]
  misc_feature (1)..(290): NCBI GI: 259479311 Blast Desc: TPA: conserved [Aspergillus nidulans FGSC A4]
  misc_feature (1)..(290): NCBI GI: 67540580 Blast Desc: AN6460.2 [Aspergillus nidulans FGSC A4] gi|40739292|gb|EAA58482.1| AN6460.2 [Aspergillus nidulans FGSC A4]
  misc_feature (1)..(287): NCBI GI: 238488291 Blast Desc: conserved [Aspergillus flavus NRRL3357] gi|220697771|gb|EED54111.1| conserved [Aspergillus flavus NRRL3357]
  misc_feature (1)..(254): NCBI GI: 189210010 Blast Desc: conserved [Pyrenophora tritici-repentis Pt-1C-BFP] gi|187977430|gb|EDU44056.1| conserved [Pyrenophora tritici-repentis Pt-1C-BFP]
  misc_feature: Useful for introducing or modulating the production of volatile compounds
FQKLLALSPKPSWRTRGLEAAAKLTRLSISIPAQPQNPAELVEAFRGIRVNGSDKHPSEGSGSAWIAHLDLLKFVIASEYETALILEDDVDWDVRLKSQMQLISDNVRAFTNTSDDDTTPFGPDWDVLWLGHCGSMIDDGMTPTPISYRDDTRCETELYSGWSTRFIREKIEEGHRLVQIAGSTTVCSFGYGVTKKSAPKLLDLLGKGSGVAYDLQMQDLCRERKLRCLLVNPQVFNHYEPPASVGDQSLVHAGDRVGSKDNEQDFESKKGTTGNIMKSARCEALFGCTCLRPPSEI

SEQ ID NO: 27147 - DNA, 1104 bp, Muscodor strobelii
  misc_feature: SGI EST ID NO. CUFF.64054.0
  misc_feature: Variant of the nucleotide sequence at SEQ ID NO 27145
tgacggtgccgcatcaaactcaatcaaagccgctctcgccaagagagtctgctgcaaatgaaaccctcggttttcagaagctcttggcactatcaccaaaacctagttggcgaacccgagggcttgaggcggccgccaagctcaccaggctctcgatcagcatacccgctcaaccccaaaatccagctgaactggtcgaagccttcagagggattcgtgtcaatggaagcgataagcacccaagtgaaggttcgggaagtgcctggatcgcgcacctcgatctgctcaaattcgtcatcgcatccgaatacgaaacggcgctcatactcgaggacgatgttgactgggacgtgcgattgaagagtcaaatgcaactcatctcggacaatgtacgcgcattcacgaacacgtcggacgatgacacaacgccgttcggccccgactgggatgtgctctggctcgggcactgcgggtccatgattgacgatgggatgacaccgacaccgatcagttatcgcgatgacacgcggtgcgagacggagctgtactcaggctggtcaacgcgcttcatccgagagaagatagaggaagggcatcgcttagtacagatcgccggctccacgacagtttgcagtttcggctacggggtcacgaagaaaagtgcgccgaagctgctagatcttctcggtaaaggtagtggtgtggcgtacgaccttcagatgcaagatctatgtcgcgaaagaaaattgcggtgtctgctcgtcaacccgcaggtgttcaaccattacgaaccgcccgctagcgtaggggatcagagcctagtgcacgccggtgatagggtcggcagcaaggacaatgagcaggatttcgagtccaaaaagggcacaacgggaaacatcatgaagagtgcgagatgtgaggcgttgtttgggtgcacttgcttgcgaccaccgtctgaaatatgaaggagacgccagttactgcttggagtaatactgagccggtccctgctagcatttacagatagacgacgataattaatgatgaaactacaatgatcctttgagcgaaaatactaccatgtagtcagatactgctgctact

SEQ ID NO: 27148 - DNA, 2481 bp, Muscodor strobelii
  misc_feature: SGI cDNA ID NO. 569295
  misc_feature: Reduced expression when VOC is produced
  misc_feature: Encodes the peptide sequence at SEQ ID NO 27149
atgcgttcttcactgatcctccagtctctgctgcctctggcacttgcagacaagctggtgattcccgctgtccaggaagctgtctctctccagttggcacagttcagcgagtatgttgatctcgcgaacgagacgactgagactacccactcctccatccctggtgtgttccatgagcccagggatgtcgagaaacgggcaactacttattggtatgagacgatcgctcaccagggtatttcggctttcaacgacgacaagacatataaggtttaccgaaatgtgaaggactacggcgcgaagggtgatggaaagacagacgacacgattgccatccagtccgccatcggcaatggaggtcgatgtgctccaggccaatgtgcttccagcagcacgacaaacgcggttgtctacttccctgctggaacatatatcgtatcctcgtcgatcatcgactactatgccacgatcttggtcggaaaccccaacgatatgcccgttctgaaggcgactgcttcgttctcaggatttggcattatagatggtgcgcagtaccagtctggtggtaaattacccttcggaggcgctacgaatatcttctggcgacagatcaagaactttgtcattgacatgactgcgattcctgcctcgagcgccgcgactggtattcattggcctaccagccaggctactagtctgcagaatatcgtgttcaagatgtcttctaatgctgggacgcagcaccaaggtctctttattgaggagggatctggtggattcttgaacgaccttgttttctatggtggtttgtacggtgctgtgttcggtaaccagcagttcactgttcggaatcttacgttctatgatgcggtcacggctatcagccagatctgggattggggctggacttacaagagtatctcggtgaacaactgcactgttggtttggatatggctacgcgagctgatgatggacacgagaccgtgggctctgtcacgttcttcgatggctcgtttacaaatacgaacattgccttcaatatctctcggaactcgaacacggtgccgaccacgggaggcggcatctcatttgagaatgttgcgctcaagaatgttggcactgcaatccagtacggaccaaccaaggcgaagctccttaccggcacgactggatccaagactatcactagctgggtaagcggaaactactatcacccgactggacctgtgaagtccgccggtacccagactgccttcacccgccctgcatctctcgtcagcggtggaaagttctacgaacgatcaaagccttcatacgcaagcttggctgccagctcgttctcctctgtccgcgtcggcggtgccaagggtgacggtgtcacggatgacactgcggctctccagaaagtgatcaatgccgcagtcacagccggtaaaattgtatacttcgacgcaggaacctacaaagtcacaaagactctcttgattccagccggtagcaagatcgtcggcgaggcatatcccgttatcatgtccagcggttcattcttcgccactatcagcaagccgcaggtcgtcgtgcaaatcggcaaggcaggtgatacgggtaccgtcgaatggagcgatatgattgtttcgacgcaaggagcgcaaggcggtgcggttctgatcgagtggaacctcgcctctacttcaagttctcctagtggaatgtgggatgtccatacgcgtatcggcgggttcaagggctctaacctttctcttgctaattgtcctacgactcccacttcagctacggtgaacacgaattgtatctccggtaaccttgccatgcacgtcaccaagtccgcgagcaatctatacatggagaacgtatggctttggaccgcagaccatgacgtcgacagcacctcgctgacaagaatcactgtctacgccggccgtggtctactcgtcgaatcgaccgttggaaacctctggctcgtaggcacttccgttgagcaccacgctcgttaccagtacaacttctacaacacgcagaacatcttcgccggacaaatccagaccgagacaccatattatcaaccaaacccgaccggtcgctcaccttaccctcttaatgccactctcggcgacccgaatttcgatgtttcatgtccttctggttcttccgaggcacgatgtgcagacgcgtggggcctgagtgtccaggcgagcaagaacattctcatctacggcgcaggactatactcattcttcaacaactacgacacgaagtgctccgacgccggagcaacgaccctatgtcaaatcggcatggtgatctacgacgcagcagccacaacaaacttccgtatctatggcttaaacactgtcggggcggcgggtatggtgtataaaggtacgacgagggtcgcgacttggagtgctaatactaatgtttatcctgctactgttcagcttttcagtagcgggaactag

SEQ ID NO: 27149 - protein, 826 aa, Muscodor strobelii
  misc_feature: SGI Peptide ID NO. 569295
  misc_feature (70)..(824): NCBI GI: 156045339 Blast Desc: SS1G_09858 [Sclerotinia sclerotiorum 1980] gi|154694253|gb|EDN93991.1| SS1G_09858 [Sclerotinia sclerotiorum 1980]
  misc_feature (67)..(824): NCBI GI: 154321772 Blast Desc: BC1G_01033 [Botryotinia fuckeliana B05.10] gi|150850280|gb|EDN25473.1| BC1G_01033 [Botryotinia fuckeliana B05.10]
  misc_feature (54)..(822): NCBI GI: 162707730 Blast Desc: beta 1,3 exoglucanase [Trichoderma asperellum]
  misc_feature (70)..(824): NCBI GI: 156045880 Blast Desc: SS1G_09216 [Sclerotinia sclerotiorum 1980] gi|154693612|gb|EDN93350.1| SS1G_09216 [Sclerotinia sclerotiorum 1980]
  misc_feature (70)..(824): NCBI GI: 154318684 Blast Desc: BC1G_02731 [Botryotinia fuckeliana B05.10] gi|150857861|gb|EDN33053.1| BC1G_02731 [Botryotinia fuckeliana B05.10]
  misc_feature (99)..(825): NCBI GI: 156062226 Blast Desc: SS1G_01229 [Sclerotinia sclerotiorum 1980] gi|154696565|gb|EDN96303.1| SS1G_01229 [Sclerotinia sclerotiorum 1980]
  misc_feature (54)..(822): NCBI GI: 2924313 Blast Desc: beta-1,3 exoglucanase [Hypocrea lixii]
  misc_feature (54)..(822): NCBI GI: 30575680 Blast Desc: beta-1,3-exoglucanase [Trichoderma hamatum]
  misc_feature (103)..(825): NCBI GI: 154314548 Blast Desc: BC1G_03983 [Botryotinia fuckeliana B05.10] gi|150848605|gb|EDN23798.1| BC1G_03983 [Botryotinia fuckeliana B05.10]
  misc_feature (70)..(824): NCBI GI: 70992457 Blast Desc: exo-beta-1,3-glucanase [Aspergillus fumigatus Af293] gi|66848710|gb|EAL89039.1| exo-beta-1,3-glucanase, [Aspergillus fumigatus Af293]
  misc_feature (70)..(825): SWISSPROT Homolog: EC 3.2.1.58 Glucan 1,3-beta-glucosidase
  misc_feature: Useful for introducing or modulating the production of volatile compounds
MRSSLILQSLLPLALADKLVIPAVQEAVSLQLAQFSEYVDLANETTETTHSSIPGVFHEPRDVEKRATTYWYETIAHQGISAFNDDKTYKVYRNVKDYGAKGDGKTDDTIAIQSAIGNGGRCAPGQCASSSTTNAVVYFPAGTYIVSSSIIDYYATILVGNPNDMPVLKATASFSGFGIIDGAQYQSGGKLPFGGATNIFWRQIKNFVIDMTAIPASSAATGIHWPTSQATSLQNIVFKMSSNAGTQHQGLFIEEGSGGFLNDLVFYGGLYGAVFGNQQFTVRNLTFYDAVTAISQIWDWGWTYKSISVNNCTVGLDMATRADDGHETVGSVTFFDGSFTNTNIAFNISRNSNTVPTTGGGISFENVALKNVGTAIQYGPTKAKLLTGTTGSKTITSWVSGNYYHPTGPVKSAGTQTAFTRPASLVSGGKFYERSKPSYASLAASSFSSVRVGGAKGDGVTDDTAALQKVINAAVTAGKIVYFDAGTYKVTKTLLIPAGSKIVGEAYPVIMSSGSFFATISKPQVVVQIGKAGDTGTVEWSDMIVSTQGAQGGAVLIEWNLASTSSSPSGMWDVHTRIGGFKGSNLSLANCPTTPTSATVNTNCISGNLAMHVTKSASNLYMENVWLWTADHDVDSTSLTRITVYAGRGLLVESTVGNLWLVGTSVEHHARYQYNFYNTQNIFAGQIQTETPYYQPNPTGRSPYPLNATLGDPNFDVSCPSGSSEARCADAWGLSVQASKNILIYGAGLYSFFNNYDTKCSDAGATTLCQIGMVIYDAAATTNFRIYGLNTVGAAGMVYKGTTRVATWSANTNVYPATVQLFSSGN

SEQ ID NO: 27150 - DNA, 3121 bp, Muscodor strobelii
  misc_feature: SGI EST ID NO. CUFF.64110.2
  misc_feature: Variant of the nucleotide sequence at SEQ ID NO 27148
cgttaggatctggacctgcatacgcgattagcttggcgcgcaacatgtctcccactcgccccattgacctgtcatcgcgtggcgagccacgacactaggggagaccagctgagctgagatgcgacgagaatggcttggtatggggttagcctgggtctattgaaaatgccgttttctacggagtaataaagactcccttgcccccctgatccgagggcatcgtggttatccgtcccatctttgctaccccagttctcgttgagactgtgtcattcgtttcaagatgcgttcttcactgatcctccagtctctgctgcctctggcacttgcagacaagctggtgattcccgctgtccaggaagctgtctctctccagttggcacagttcagcgagtatgttgatctcgcgaacgagacgactgagactacccactcctccatccctggtgtgttccatgagcccagggatgtcgagaaacgggcaactacttattggtatgagacgatcgctcaccagggtatttcggctttcaacgacgacaagacatataaggtttaccgaaatgtgaaggactacggcgcgaagggtgatggaaagacagacgacacgattgccatccagtccgccatcggcaatggaggtcgatgtgctccaggccaatgtgcttccagcagcacgacaaacgcggttgtctacttccctgctggaacatatatcgtatcctcgtcgatcatcgactactatgccacgatcttggtcggaaaccccaacgatatgcccgttctgaaggcgactgcttcgttctcaggatttggcattatagatggtgcgcagtaccagtctggtggtaaattacccttcggaggcgctacgaatatcttctggcgacagatcaagaactttgtcattgacatgactgcgattcctgcctcgagcgccgcgactggtattcattggcctaccagccaggctactagtctgcagaatatcgtgttcaagatgtcttctaatgctgggacgcagcaccaaggtctctttattgaggagggatctggtggattcttgaacgaccttgttttctatggtggtttgtacggtgctgtgttcggtaaccagcagttcactgttcggaatcttacgttctatgatgcggtcacggctatcagccagatctgggattggggctggacttacaagagtatctcggtgaacaactgcactgttggtttggatatggctacgcgagctgatgatggacacgagaccgtgggctctgtcacgttcttcgatggctcgtttacaaatacgaacattgccttcaatatctctcggaactcgaacacggtgccgaccacgggaggcggcatctcatttgagaatgttgcgctcaagaatgttggcactgcaatccagtacggaccaaccaaggcgaagctccttaccggcacgactggatccaagactatcactagctgggtaagcggaaactactatcacccgactggacctgtgaagtccgccggtacccagactgccttcacccgccctgcatctctcgtcagcggtggaaagttctacgaacgatcaaagccttcatacgcaagcttggctgccagctcgttctcctctgtccgcgtcggcggtgccaagggtgacggtgtcacggatgacactgcggctctccagaaagtgatcaatgccgcagtcacagccggtaaaattgtatacttcgacgcaggaacctacaaagtcacaaagactctcttgattccagccggtagcaagatcgtcggcgaggcatatcccgttatcatgtccagcggttcattcttcgccactatcagcaagccgcaggtcgtcgtgcaaatcggcaaggcaggtgatacgggtaccgtcgaatggagcgatatgattgtttcgacgcaaggagcgcaaggcggtgcggttctgatcgagtggaacctcgcctctacttcaagttctcctagtggaatgtgggatgtccatacgcgtatcggcgggttcaagggctctaacctttctcttgctaattgtcctacgactcccacttcagctacggtgaacacgaattgtatctccggtaaccttgccatgcacgtcaccaagtccgcgagcaatctatacatggagaacgtatggctttggaccgcagaccatgacgtcgacagcacctcgctgacaagaatcactgtctacgccggccgtggtctactcgtcgaatcgaccgttggaaacctctggctcgtaggcacttccgttgagcaccacgctcgttaccagtacaacttctacaacacgcagaacatcttcgccggacaaatccagaccgagacaccatattatcaaccaaacccgaccggtcgctcaccttaccctcttaatgccactctcggcgacccgaatttcgatgtttcatgtccttctggttcttccgaggcacgatgtgcagacgcgtggggcctgagtgtccaggcgagcaagaacattctcatctacggcgcaggactatactcattcttcaacaactacgacacgaagtgctccgacgccggagcaacgaccctatgtcaaatcggcatggtgatctacgacgcagcagccacaacaaacttccgtatctatggcttaaacactgtcggggcggcgggtatggtgtataaaggtacgacgagggtcgcgacttggagtgctaatactaatgtttatcctgctactgttcagcttttcagtagcgggaactagaaaataagcaatggcttgcaaaagtttggttatagatagataatttagttcattgataccccgtgcaaccggttctagatacatactcatgtacttcttttgtattgaaagtacacacgttggtattgactcacaagataggtgttagcattgaatgtaatacacacatctcaataatgagctgaagttcaaaaaaacaccccaccaaaaaaacagtcatcctagatggcttagtggtccagtcgccagactttccacattagagataccagaccaccggttcgagccccgcaccagtcaagttcaatttgacatgtcggaaggtgcataccgacctgtataactatctcacaaaag

SEQ ID NO: 27151 - DNA, 1611 bp, Muscodor strobelii
  misc_feature: SGI cDNA ID NO. 569296
  misc_feature: Reduced expression when VOC is produced
  misc_feature: Encodes the peptide sequence at SEQ ID NO 27152
atgaagttccacgctctcataaccggctcccttgccacatccccagtcctcgcctcgtccatcgctccaagcatagagatatctcgatctcgggcgccacaaatcttcaacgctgtgcataactccatgagacaatggggttcatccctacaccataatggcatgtcctttttcctcgcaacagtaccaaagggcgttctactacatcacgggaactcgagcccggattcgcctacggaaccagattggctggcttacgagattgaacatgcggagggttttgctcgtgggaggagaaacttcccgcctggtgggtcgggtgatggaggtcaaaagcccatgagaggagagcgagaggatgatgaggagtcccatggatatctacatgtttatcggactgtgagaccgatgaagtatatctatgttgatgggatgggcggtggtaagacgtcgatggggactttggattcgcaggattttcttctaagagggaagacgcctgatgatactgatccgaacccttgggcgagacataaagatgatgacgagaaatcgccgaaaggacctcgtaggggcggacccatggatgaacgtgcgcgcgcggatgagctttgtgagatgactagacaatggggtctcgatggtattatccggatggaagcagggtttgagatcatccaatgcgatttctccaatgggctggagcaggtacaggtccttcagcgacccggtgctggcggccgatcgggaatgcctgggaattttggatttgggggcctcgaatggctgcgaggtctctcagcgcggtatcaggggataggatcaacgagaaccattgtggattactcgtcaatggtttctgcattttggtttcctgtcaatctcacaaatcctgatcctacgcgcgatgatctgccgcgactctactctgtcggacaggatgagttgactgtgattaaggagtatgttggcaagatggttcttgagaggagagatgaggagatcaggacgatcgattggcaggacgtcgcggatatcatcgtcgcaagatacggtgacaggttgaagtacatggctacgggtgtcgatagcctggagcttatggccagcgaggttgcgtttctgacaactgtctttgttgatgggacagatatgcaaggaacggagaaagctgtcgatcgatgctcacagttttatcttgaatcggtcacgcccgttactaaatccgacttccttataaaagcagcatttgagacgataacgcgtgcgatctgcaatgcgctcttcgacgttcggtcgctggtcattgataatgaagttgccggcgaaagttcacttgacaccgcggtcaggatattgaaagagcttacggagtatcttcgctgggctcatttcaagcgttgcccaccatgcgcactcaacgaggtgtgcgcaatacctatgtggccatttggctcggtagagcaataccataacccacgatgctcaaatggaacggacgtagacgcgggggaaagctattgggggcatggacccggcagaggtccccctggaggcgagccaggcgatggggatcgtaaggactcgtccttctcggggacagagctgtag

SEQ ID NO: 27152 - protein, 536 aa, Muscodor strobelii
  misc_feature: SGI Peptide ID NO. 569296
  misc_feature (1)..(508): NCBI GI: 171679850 Blast Desc: protein product [Podospora anserina] gi|170939551|emb|CAP64778.1| protein product [Podospora anserina]
  misc_feature (4)..(516): NCBI GI: 261356365 Blast Desc: conserved [Verticillium albo-atrum VaMs.102]
  misc_feature (55)..(511): NCBI GI: 156053499 Blast Desc: SS1G_06917 [Sclerotinia sclerotiorum 1980] gi|154704695|gb|EDO04434.1| SS1G_06917 [Sclerotinia sclerotiorum 1980]
  misc_feature (55)..(511): NCBI GI: 154290611 Blast Desc: BC1G_15470 [Botryotinia fuckeliana B05.10] gi|150847500|gb|EDN22693.1| BC1G_15470 [Botryotinia fuckeliana B05.10]
  misc_feature (21)..(504): NCBI GI: 145611676 Blast Desc: MGG_00209 [Magnaporthe grisea 70-15] gi|145018929|gb|EDK03208.1| MGG_00209 [Magnaporthe grisea 70-15]
  misc_feature (32)..(509): NCBI GI: 119498005 Blast Desc: NFIA_034310 [Neosartorya fischeri NRRL 181] gi|119413924|gb|EAW23863.1| conserved [Neosartorya fischeri NRRL 181]
  misc_feature (18)..(508): NCBI GI: 46117230 Blast Desc: FG04457.1 [Gibberella zeae PH-1]
  misc_feature (16)..(521): NCBI GI: 115398632 Blast Desc: conserved [Aspergillus terreus NIH2624] gi|114191788|gb|EAU33488.1| conserved [Aspergillus terreus NIH2624]
  misc_feature (43)..(508): NCBI GI: 169783264 Blast Desc: [Aspergillus oryzae RIB40] gi|83774838|dbj|BAE64961.1| protein product [Aspergillus oryzae]
  misc_feature (23)..(523): NCBI GI: 256729320 Blast Desc: NECHADRAFT_63138 [Nectria haematococca mpVI 77-13-4]
  misc_feature: Useful for introducing or modulating the production of volatile compounds
MKFHALITGSLATSPVLASSIAPSIEISRSRAPQIFNAVHNSMRQWGSSLHHNGMSFFLATVPKGVLLHHGNSSPDSPTEPDWLAYEIEHAEGFARGRRNFPPGGSGDGGQKPMRGEREDDEESHGYLHVYRTVRPMKYIYVDGMGGGKTSMGTLDSQDFLLRGKTPDDTDPNPWARHKDDDEKSPKGPRRGGPMDERARADELCEMTRQWGLDGIIRMEAGFEIIQCDFSNGLEQVQVLQRPGAGGRSGMPGNFGFGGLEWLRGLSARYQGIGSTRTIVDYSSMVSAFWFPVNLTNPDPTRDDLPRLYSVGQDELTVIKEYVGKMVLERRDEEIRTIDWQDVADIIVARYGDRLKYMATGVDSLELMASEVAFLTTVFVDGTDMQGTEKAVDRCSQFYLESVTPVTKSDFLIKAAFETITRAICNALFDVRSLVIDNEVAGESSLDTAVRILKELTEYLRWAHFKRCPPCALNEVCAIPMWPFGSVEQYHNPRCSNGTDVDAGESYWGHGPGRGPPGGEPGDGDRKDSSFSGTEL

SEQ ID NO: 27153 - DNA, 1488 bp, Muscodor strobelii
  misc_feature: SGI cDNA ID NO. 569297
  misc_feature: Encodes the peptide sequence at SEQ ID NO 27154
atggctaggaaaggtagcgcgaaagtgagaaccggctgtctaacttgcaaagtgcgaaaggtgaagtgtgatgagggcaaaccacactgcaaacgttgcacggggaccggccgcacatgtgacggatacggtccgaccccagaatcgtctgccataacctggcatcggccccggcatatgttctccaacgttgacgacgtatcggagcggcgcagccttgagtttttctgcaaggtcgcagcacccgccctgtcgggtcctctagatccctatttctggacgcatttagtcatgcagttcagtaatttcgaacctgctgtccgtcactcgatcattgccgttgggtcactatacgagcagattaaccgcgatccggtaatagaaacctcggaatttgatcacaaattcgtgctcacgcattacaatgctgcgatacggcatctcagctccatggagaacgagtctctagtactactggtctgtgtgttattcatctgtgtcgaatttcttcgtggcgatcgagaagcagcaatcgctcacgctaatcacggaggatcgattttaaaaagagtggaaaagtcattcccgtgggcgaaagagtatttatcaccactgttccgtcgtctaaacttactaccatacttcttctttatacctgacaccccatcacctgaaatcttaggcttggatgatgacctgccttcgtctttcacggattttggccaagcagaatactacttagatcctattgttgctcgcacgatacgtctcgtccgaagcggagatatgtttcgctataacaacatccaactcgaaggcggcccgcaagcggtgatagccgagcaagatgccacccgggcaaagctggaggcctggtatttaaaatttgccgaattgcttatcagcgccgagagttgggacacaaaagcgagtctgcgaattaacatgatggtccgctaccaagtctgttcgatatgggtcgagacagctctcgattctagagaaaccatttacgacgattacatggatatattccgctcgatagtcgaccaagcctgcaggatcgggtttgacaatccattcgtgtttaccttcgagacgggatttataccattactttacttcgtcgtcatgaagtgcagagacctaagcattcggctccgagctctggccgtaatgagaagcttaggcgcggcgagagagaacatgtgggatctgataactctctacgctgccgcaaagcgtatgatagagatcgagcatggtgctaacatagacgcaaatggagagctagtcggagaggctaataatcccggcctcccgccagatgagcttaggatacgggattcgacaacagaaccttaccccgtctacgaggaggtagacggtgaggagcggcgtgggaggttagcgggcttcttcatgatggatgacaaagggaatatttctgtgaggtcggagttcttgatcgagccggtgaggatatga

SEQ ID NO: 27154 - protein, 495 aa, Muscodor strobelii
  misc_feature: SGI Peptide ID NO. 569297
  misc_feature (11)..(50): Pfam Id: PF00172 Pfam Desc: Fungal Zn(2)-Cys(6) binuclear cluster domain
  misc_feature (11)..(43): Pfam Id: PF00172 Pfam Desc: Fungal Zn(2)-Cys(6) binuclear cluster domain
  misc_feature (1)..(489): NCBI GI: 256735679 Blast Desc: NECHADRAFT_75777 [Nectria haematococca mpVI 77-13-4]
  misc_feature (1)..(488): NCBI GI: 261358238 Blast Desc: conserved [Verticillium albo-atrum VaMs.102]
  misc_feature (1)..(489): NCBI GI: 256728059 Blast Desc: NECHADRAFT_46033 [Nectria haematococca mpVI 77-13-4]
  misc_feature (1)..(489): NCBI GI: 46127085 Blast Desc: FG07920.1 [Gibberella zeae PH-1]
  misc_feature (1)..(448): NCBI GI: 46122695 Blast Desc: FG05725.1 [Gibberella zeae PH-1]
  misc_feature (1)..(493): NCBI GI: 256726744 Blast Desc: NECHADRAFT_103320 [Nectria haematococca mpVI 77-13-4]
  misc_feature (1)..(449): NCBI GI: 85112958 Blast Desc: NCU09739 [Neurospora crassa OR74A] gi|28926223|gb|EAA35205.1| [Neurospora crassa OR74A]
  misc_feature (1)..(453): NCBI GI: 39941334 Blast Desc: MGG_05578 [Magnaporthe grisea 70-15] gi|145022250|gb|EDK06270.1| MGG_05578 [Magnaporthe grisea 70-15]
  misc_feature (46)..(495): NCBI GI: 261353736 Blast Desc: [Verticillium albo-atrum VaMs.102]
  misc_feature (2)..(420): NCBI GI: 85082880 Blast Desc: NCU00017 [Neurospora crassa OR74A] gi|28918087|gb|EAA27768.1| [Neurospora crassa OR74A]
MARKGSAKVRTGCLTCKVRKVKCDEGKPHCKRCTGTGRTCDGYGPTPESSAITWHRPRHMFSNVDDVSERRSLEFFCKVAAPALSGPLDPYFWTHLVMQFSNFEPAVRHSIIAVGSLYEQINRDPVIETSEFDHKFVLTHYNAAIRHLSSMENESLVLLVCVLFICVEFLRGDREAAIAHANHGGSILKRVEKSFPWAKEYLSPLFRRLNLLPYFFFIPDTPSPEILGLDDDLPSSFTDFGQAEYYLDPIVARTIRLVRSGDMFRYNNIQLEGGPQAVIAEQDATRAKLEAWYLKFAELLISAESWDTKASLRINMMVRYQVCSIWVETALDSRETIYDDYMDIFRSIVDQACRIGFDNPFVFTFETGFIPLLYFVVMKCRDLSIRLRALAVMRSLGAARENMWDLITLYAAAKRMIEIEHGANIDANGELVGEANNPGLPPDELRIRDSTTEPYPVYEEVDGEERRGRLAGFFMMDDKGNISVRSEFLIEPVRI

SEQ ID NO: 27155 - DNA, 3733 bp, Muscodor strobelii
  misc_feature: SGI EST ID NO. CUFF.64060.0
  misc_feature: Variant of the nucleotide sequence at SEQ ID NO 27153
gggcaaaccacactgcaaacgttgcacggggaccggccgcacatgtgacggatacggtccgaccccagaatcgtctgccataacctggcatcggccccggcatatgttctccaacgttgacgacgtatcggagcggcgcagccttgagtttttctgcaaggtcgcagcacccgccctgtcgggtcctctagatccctatttctggacgcatttagtcatgcagttcagtaatttcgaacctgctgtccgtcactcgatcattgccgttgggtcactatacgagcagattaaccgcgatccggtaatagaaacctcggaatttgatcacaaattcgtgctcacgcattacaatgctgcgatacggcatctcagctccatggagaacgagtctctagtactactggtctgtgtgttattcatctgtgtcgaatttcttcgtggcgatcgagaagcagcaatcgctcacgctaatcacggaggatcgattttaaaaagagtggaaaagtcattcccgtgggcgaaagagtatttatcaccactgttccgtcgtctaaacttactaccatacttcttctttatacctgacaccccatcacctgaaatcttaggcttggatgatgacctgccttcgtctttcacggattttggccaagcagaatactacttagatcctattgttgctcgcacgatacgtctcgtccgaagcggagatatgtttcgctataacaacatccaactcgaaggcggcccgcaagcggtgatagccgagcaagatgccacccgggcaaagctggaggcctggtatttaaaatttgccgaattgcttatcagcgccgagagttgggacacaaaagcgagtctgcgaattaacatgatggtccgctaccaagtctgttcgatatgggtcgagacagctctcgattctagagaaaccatttacgacgattacatggatatattccgctcgatagtcgaccaagcctgcaggatcgggtttgacaatccattcgtgtttaccttcgagacgggatttataccattactttacttcgtcgtcatgaagtgcagagacctaagcattcggctccgagctctggccgtaatgagaagcttaggcgcggcgagagagaacatgtgggatctgataactctctacgctgccgcaaagcgtatgatagagatcgagcatggtgctaacatagacgcaaatggagagctagtcggagaggctaataatcccggcctcccgccagatgagcttaggatacgggattcgacaacagaaccttaccccgtctacgaggaggtagacggtgaggagcggcgtgggaggttagcgggcttcttcatgatggatgacaaagggaatatttctgtgaggtcggagttcttgatcgagccggctgctccgccaaattcgttgtgcctgttccagccccagatgcctgcgaaacttcatcggaaccaaactttacagggcactgtaagcgaacttgctgtggaactcacaggaacattctccttcttctttcagagagtgtgtccatacgacatcctaggctcgactaggtactccttgccatcgtcttgagacccgtcagacacgatttcctcaacttgaggaagaataaataaggactgtcacacaacgtgattaatacgactaaatgcacctgacatcacgatatcccaatgtgatggatgtgagccccttcggattgcaaacgaatgcgagaaccaatgaacgcgatgcatacctcggactattcacggagttgtcaatgcaggacatcggaaatattcaagcattatacggtgtcatgcttctgcaaaatgtgttaaacgtaagaaatctaacgttgggtatattcacatatatgctgtacaatctcgtaagccctccggttcgttcccgctacgcacgtatgtgtatgaggtgatctatcataatgtgtacgccacatcccgatatgcctgaccttgcccaactcctgcctacccgttccaacgaaaagaactctacagctctgtccccgagaaggacgagtccttacgatccccatcgcctggctcgcctccagggggacctctgccgggtccatgcccccaatagctttcccccgcgtctacgtccgttccatttgagcatcgtgggttatggtattgctctaccgagccaaatggccacataggtattgcgcacacctcgttgagtgcgcatggtgggcaacgcttgaaatgagcccagcgaagatactccgtaagctctttcaatatcctgaccgcggtgtcaagtgaactttcgccggcaacttcattatcaatgaccagcgaccgaacgtcgaagagcgcattgcagatcgcacgcgttatcgtctcaaatgctgcttttataaggaagtcggatttagtaacgggcgtgaccgattcaagataaaactgtgagcatcgatcgacagctttctccgttccttgcatatctgtcccatcaacaaagacagttgtcagaaacgcaacctcgctggccataagctccaggctatcgacacccgtagccatgtacttcaacctgtcaccgtatcttgcgacgatgatatccgcgacgtcctgccaatcgatcgtcctgatctcctcatctctcctctcaagaaccatcttgccaacatactccttaatcacagtcaactcatcctgtccgacagagtagagtcgcggcagatcatcgcgcgtaggatcaggatttgtgagattgacaggaaaccaaaatgcagaaaccattgacgagtaatccacaatggttctcgttgatcctatcccctgataccgcgctgagagacctcgcagccattcgaggcccccaaatccaaaattcccaggcattcccgatcggccgccagcaccgggtcgctgaaggacctgtacctgctccagcccattggagaaatcgcattggatgatctcaaaccctgcttccatccggataataccatcgagaccccattgtctagtcatctcacaaagctcatccgcgcgcgcacgttcatccatgggtccgcccctacgaggtcctttcggcgatttctcgtcatcatctttatgtctcgcccaagggttcggatcagtatcatcaggcgtcttccctcttagaagaaaatcctgcgaatccaaagtccccatcgacgtcttaccaccgcccatcccatcaacatagatatacttcatcggtctcacagtccgataaacatgtagatatccatgggactcctcatcatcctctcgctctcctctcatgggcttttgacctccatcacccgacccaccaggcgggaagtttctcctcccacgagcaaaaccctccgcatgttcaatctcgtaagccagccaatctggttccgtaggcgaatccgggctcgagttcccgtgatgtagtagaacgccctttggtactgttgcgaggaaaaaggacatgccattatggtgtagggatgaaccccattgtctcatggagttatgcacagcgttgaagatttgtggcgcccgagatcgagatatctctatgcttggagcgatggacgaggcgaggactggggatgtggcaagggagccggttatgagagcgtggaacttcatcacgtcggtagttctcgttccaacggaggataaataagtagaataagaatatagatagaacagaaggaaagaaataggaaattattaaacaagtctggatgag

SEQ ID NO: 27156 - DNA, 573 bp, Muscodor strobelii
  misc_feature: SGI cDNA ID NO. 569298
  misc_feature: Encodes the peptide sequence at SEQ ID NO 27157
atgaagctgatgaacaccgccctcatcgccctcggtcttgccgccagcaatgtccaggctgttcctaccaccgccaatggcctaagcctctacaagcttaaggtctccgatgactctatgtttgccggccaatatcttgccttgcgcggctctactgtcggtatctacggtaatgatacctcccctgtccaggtctaccagagcaagagtcgacagcccggctgcatggagcttcacacctaccccgttggcattgtcgatcacagtcttggtcttgtcggccagcctggcttccttgccttcacagacctagtcaaccctgagcgaacgagctccggagtcatgaaggaggatggcgacgtctaccactgggacaccttcgtcgttgacagcgaccacatgctcgaagacgctagtcaaggtgactggcgtgcctatccctccactggagacaactttggcgacggcaactatgacgtgaaatacgttagcggtgacaccatctcgactgaggactacatgccgattaagattgagatggaggccgctggcgatggtcgttatggtcgctag

SEQ ID NO: 27157 - protein, 190 aa, Muscodor strobelii
  misc_feature: SGI Peptide ID NO. 569298
  misc_feature (3)..(181): NCBI GI: 171687221 Blast Desc: protein product [Podospora anserina] gi|170943572|emb|CAP69224.1| protein product [Podospora anserina]
MKLMNTALIALGLAASNVQAVPTTANGLSLYKLKVSDDSMFAGQYLALRGSTVGIYGNDTSPVQVYQSKSRQPGCMELHTYPVGIVDHSLGLVGQPGFLAFTDLVNPERTSSGVMKEDGDVYHWDTFVVDSDHMLEDASQGDWRAYPSTGDNFGDGNYDVKYVSGDTISTEDYMPIKIEMEAAGDGRYGR

SEQ ID NO: 27158 - DNA, 2041 bp, Muscodor strobelii
  misc_feature: SGI EST ID NO. CUFF.64066.0
  misc_feature: Variant of the nucleotide sequence at SEQ ID NO 27156
gtgattttatattgtgaactatcagtacccgattcaattgacccaatcagtcagaatcgcatccagtaactgaatgagtgaacgacagttggcctagattcgactgactcgcacattccatgttagctacctctgtagcttggtgacacttgcctcggttttgtctaagaatttgaccagcttgcctcgtggtttccatttggcagtgaatgagtgacctttccaatggtcaccaatcttacatcattgaatgaggctgctgcgacccctagccatttcagtgaacaaccatcgtaccttcggcaacgacgtttatagtgcctcccacacctaccctctgcagtagattggctgtataaatatcctctacctcttcccgttctcgtttgtgcccagggtccaaatacctggaacatcatcgcgcatcccttagggaccacccagcgtcgatcacctcaacatcttcaacccaagcccttcaccactccagcattgcatcgactgtcttcacaatgaagctgatgaacaccgccctcatcgccctcggtcttgccgccagcaatgtccaggctgttcctaccaccgccaatggcctaagcctctacaagcttaaggtctcgtaagtcttccctatgagcacgaaacactcttcggtgctcccaatagttgacatcgacgtctagcgatgactctatgtttgccggccaatatcttgccttgcgcggctctactgtcggtatctacggtaatgatacctcccctgtccaggtctaccagagcaagagtcgacagcccggctgcatggagcttcacacctaccccgttggcattgtcgatcacagtcttggtcttgtcggccagcctggcttccttgccttcacagacctagtcaaccctgagcgaacgagctccggagtcatgaaggaggatggcgacgtctaccactgggacaccttcgtcgttgacagcgaccacatgctcgaagacgctagtcaaggtgactggcgtgcctatccctccactggagacaactttggcgacggcaactatgacgtgaaatacgttagcggtgacaccatctcgactgaggactacatgccgattaagattgagatggaggccgctggcgatggtcgttatggtcgctagacacgaatcccgagaatgttgagagaagattggaatgatcacggcaggatcaggcgcatttctcgtatcacgtcgctccaataatggttattcagagacttaactttcggccgagcaaaatgttaacgcaagtcaactgccttacgtcgacctcgatcgtccctgggaatgtgggggtgatctcgtgtgatccaagcaggacgaaggtagcaaaggacgatcctaccaacacgaagtatcaaattagaacccatccacgactgttatggtacctcaaaagaaaatgcgaagtgaagttcaaatgttatgtgcatggtttctaccatttccatgtagacctcaagaattcgagtgaaccgatgagctcaattcttcgaaaatcatgccacagatttggtgttgtatcggttctgctgtctccagttctcagattagatatctaagccgggcgacacctatattccttttttacgatctgcgcgtttcgtatgtgacttggcgcaacacttcggcgctccgcaggtgattgcacccagctcgcccgaaacaacaatacccgattgaccaaaagaatatcgtattgttttgtcgatgtagtctcttagcaggtctagtttttcatcgcgtaaagcgtcttcaaaggaagtttccgtaggatcaccgggtacgcgttgctttcaaacagctactgaaaagaatgccgtagattgcaactattggagctagaaaatagcatcgcgtagcgcttcctaccccatagatactacgctctaagaggcttagcctccgcaaaaactggacctgctaagagaccatatcgacaaaacaatacggcacagagacggcacaggtatgcatcaacgacaaagcgaggtatgacaacatgcaaaag

SEQ ID NO: 27159 - DNA, 771 bp, Muscodor strobelii
  misc_feature: SGI cDNA ID NO. 569299
  misc_feature: Encodes the peptide sequence at SEQ ID NO 27160
atggccaccaccgatgagcccaagactagccaatcgcccgccatacccgactatatgagagatccaaatgctgtcttgaaagatgaggatgcccaatggagatacaaaaatgctcctgactacaagaagacgcgacaatatttcgaagaaaccaagtcgtgcaatcatgcggccggtagtctcgaagagatggtcgagaaccttgtcaagaactgggaaatagaggcctcatacaaaactcgtctcaatgactggcggacggtcgacctgagccagtacacttttgccaacaatggacaaacaccgcattcggccgagcacatgcttcgggttggtacatacaatgcgatgcttacgccttcgtcgtattatgatcctggtggaatggactttggtaccagccacaaagtcttcaagcgcatgatgcccacgttcgcatgggaggtcgtagaggtctatactggacctcctagcgtgtcgttcaagtggagacactgggggcgatttgagaaagattacactgctgttaataatgcgaacgagcgagttgaagtcaaagcgactgggaagctcattgatctcactggcattacggtggcaacattgaacgaccaaatgcaaatcacgaagctcaagacttggttcgggccggaggagatgtggaagcaaatcgaccctgaaaataaggccaccagagtgccgatgggttcttgtccgatggcaaacatcggtggcgaggggtcaaatgctccagatctgaatgtagcctga

SEQ ID NO: 27160 - protein, 256 aa, Muscodor strobelii
  misc_feature: SGI Peptide ID NO. 569299
  misc_feature (14)..(230): NCBI GI: 119483750 Blast Desc: NFIA_095010 [Neosartorya fischeri NRRL 181] gi|119409934|gb|EAW19881.1| conserved [Neosartorya fischeri NRRL 181]
  misc_feature (15)..(244): NCBI GI: 121715051 Blast Desc: conserved [Aspergillus clavatus NRRL 1] gi|119403291|gb|EAW13709.1| conserved [Aspergillus clavatus NRRL 1]
  misc_feature (15)..(227): NCBI GI: 189199266 Blast Desc: conserved [Pyrenophora tritici-repentis Pt-1C-BFP] gi|187983069|gb|EDU48557.1| conserved [Pyrenophora tritici-repentis Pt-1C-BFP]
  misc_feature (12)..(241): NCBI GI: 169780958 Blast Desc: [Aspergillus oryzae RIB40] gi|83773683|dbj|BAE63810.1| protein product [Aspergillus oryzae]
  misc_feature (10)..(241): NCBI GI: 115390949 Blast Desc: conserved [Aspergillus terreus NIH2624] gi|114193903|gb|EAU35603.1| conserved [Aspergillus terreus NIH2624]
  misc_feature (14)..(229): NCBI GI: 70983055 Blast Desc: conserved [Aspergillus fumigatus Af293] gi|66844680|gb|EAL85017.1| conserved [Aspergillus fumigatus Af293] gi|159123941|gb|EDP49060.1| conserved [Aspergillus A1163]
  misc_feature (12)..(249): NCBI GI: 119195199 Blast Desc: CIMG_01974 [Coccidioides immitis RS]
  misc_feature (12)..(249): NCBI GI: 238504818 Blast Desc: conserved [Aspergillus flavus NRRL3357] gi|220689752|gb|EED46102.1| conserved [Aspergillus flavus NRRL3357]
  misc_feature (12)..(241): NCBI GI: 145241486 Blast Desc: An09g00650 [Aspergillus niger] gi|134077927|emb|CAL00325.1| protein product [Aspergillus niger]
  misc_feature (12)..(256): NCBI GI: 240104992 Blast Desc: CPC735_045550 [Coccidioides posadasii C735 delta SOWgp]
MATTDEPKTSQSPAIPDYMRDPNAVLKDEDAQWRYKNAPDYKKTRQYFEETKSCNHAAGSLEEMVENLVKNWEIEASYKTRLNDWRTVDLSQYTFANNGQTPHSAEHMLRVGTYNAMLTPSSYYDPGGMDFGTSHKVFKRMMPTFAWEVVEVYTGPPSVSFKWRHWGRFEKDYTAVNNANERVEVKATGKLIDLTGITVATLNDQMQITKLKTWFGPEEMWKQIDPENKATRVPMGSCPMANIGGEGSNAPDLNVA

SEQ ID NO: 27161 - DNA, 1611 bp, Muscodor strobelii
  misc_feature: SGI cDNA ID NO. 569300
  misc_feature: Encodes the peptide sequence at SEQ ID NO 27162
atgccactcgttcaaaatcccatcctgccggggttcaaccctgacccttcaatccttcgggtcggggatgactactacatcgcaacctcgactttcgagtggtatcctggggttcagatccatcactcaaaggatctcgcaaactgggatcttatcattcgtccgctgaaccggaaaagtcagcttgacatgcgcggtaatccagatagctgtggcgtttgggctccttgtctcacgcacgatggtgacaagttctggttggtgtacacggatgtcaaacgcaaggatggctcattcaaagatacgcataactacatagttcactcgccatcaatcatgggcccgtggtctgatccgatttatataaactcttcgggattcgacccgtcattatttcatgatcaagatggcaagaaatggtttgtaaacatgcttgcagatcaccgcaggcgaccacgcgcattcgctggcattgtgctacaagagtttgatcctatttccgaaaagttagtcggcccgaggaagaacgtattcaccggcacagatttggatcttgttgagggaccacatttataccaacggaacggatggtactacttactcacagcagagggtggcacaggctactatcacgcctgtacacttgcacggtctcgagatatatggggtccttatgaggtacatccgaagaacccaattctgacgtcaaaagatcatccgcttgcccctttgcagagagctggccatggcgacatagttgagtccggagacggtagaacatacctggtgcacttgatgggacggcctactactcaagaacgacgttgcgttttaggtcgcgagacatccattcaagaagcatactgggaagatgactggctttacgtgaagaacggtcccgtcccgtcactgaaagtcgatctacccggacagcaagattatgatctcagcaagacgtatactttcaagaacgagctgcacaaagacttccaatggctcaggacgccggagacagaacgtatatttgcccttgaagatgaaaatcttgttttattcggtagagaatcaatcggctcgtggtttgaacaggccctcgttgcaagacgacaaacagatttctcttttgaggccaagaccttggtgaacttctcgccaactgatgagcgacaatacgccggactcacgctctactatagtcgatacaactttttctatctcacggttacagcacactcggacggccaacgcgagctgttgatcttgacatctgaggcatcgtggccagaaggcaagttgaaatttccgcttaccgaaccggtatcaatacctaacgagggtgatgtcttaatggcggcgagggttcacgggcgggatttgcagttcttttacggactcgatggatccgatgaactccgaccgattggacctgtcttcgatgcgtccattgtatctgacgagtgcggagggcatcaggtccatggcagtttcacaggcgcattcgtgggaatggcttgctcggatctaaatggcactgcacttcccgctcggtttcggcacttcagctattttcccacaaaagaccctggatcggcagagtcggaagaaaaatag

SEQ ID NO: 27162 - protein, 536 aa, Muscodor strobelii
  misc_feature: SGI Peptide ID NO. 569300
  misc_feature (4)..(294): Pfam Id: PF04616 Pfam Desc: Glycosyl hydrolases family 43
  misc_feature (1)..(526): NCBI GI: 261359043 Blast Desc: beta-xylosidase [Verticillium albo-atrum VaMs.102]
  misc_feature (1)..(525): NCBI GI: 116197308 Blast Desc: conserved [Chaetomium globosum CBS 148.51] gi|88181165|gb|EAQ88633.1| conserved [Chaetomium globosum CBS 148.51]
  misc_feature (1)..(526): NCBI GI: 171676726 Blast Desc: protein product [Podospora anserina] gi|170936430|emb|CAP61087.1| protein product [Podospora anserina]
  misc_feature (1)..(531): NCBI GI: 85091062 Blast Desc: NCU09652 [Neurospora crassa OR74A] gi|28920100|gb|EAA29482.1| NCU09652 [Neurospora crassa OR74A]
  misc_feature (1)..(527): NCBI GI: 46138933 Blast Desc: FG10981.1 [Gibberella zeae PH-1]
  misc_feature (1)..(527): NCBI GI: 56555509 Blast Desc: xylanase 33 [Gibberella zeae]
  misc_feature (1)..(527): NCBI GI: 67901754 Blast Desc: AN7864.2 [Aspergillus nidulans FGSC A4] gi|40739719|gb|EAA58909.1| AN7864.2 [Aspergillus nidulans FGSC A4] gi|259480609|tpe|CBF73411.1| TPA: conserved [Aspergillus FGSC
  misc_feature (1)..(526): NCBI GI: 145616518 Blast Desc: xylan 1,4-beta-xylosidase, [Magnaporthe grisea 70-15] gi|145010072|gb|EDJ94728.1| xylan 1,4-beta-xylosidase, [Magnaporthe grisea 70-15]
  misc_feature (1)..(526): NCBI GI: 212538829 Blast Desc: beta-xylosidase, [Penicillium marneffei ATCC 18224] gi|210069312|gb|EEA23403.1| beta-xylosidase, [Penicillium marneffei ATCC 18224]
  misc_feature (1)..(525): NCBI GI: 256728843 Blast Desc: glycoside hydrolase family 43 [Nectria haematococca mpVI 77-13-4]
  misc_feature (4)..(522): SWISSPROT Homolog: EC 3.2.1.37 Xylan 1,4-beta-xylosidase
MPLVQNPILPGFNPDPSILRVGDDYYIATSTFEWYPGVQIHHSKDLANWDLIIRPLNRKSQLDMRGNPDSCGVWAPCLTHDGDKFWLVYTDVKRKDGSFKDTHNYIVHSPSIMGPWSDPIYINSSGFDPSLFHDQDGKKWFVNMLADHRRRPRAFAGIVLQEFDPISEKLVGPRKNVFTGTDLDLVEGPHLYQRNGWYYLLTAEGGTGYYHACTLARSRDIWGPYEVHPKNPILTSKDHPLAPLQRAGHGDIVESGDGRTYLVHLMGRPTTQERRCVLGRETSIQEAYWEDDWLYVKNGPVPSLKVDLPGQQDYDLSKTYTFKNELHKDFQWLRTPETERIFALEDENLVLFGRESIGSWFEQALVARRQTDFSFEAKTLVNFSPTDERQYAGLTLYYSRYNFFYLTVTAHSDGQRELLILTSEASWPEGKLKFPLTEPVSIPNEGDVLMAARVHGRDLQFFYGLDGSDELRPIGPVFDASIVSDECGGHQVHGSFTGAFVGMACSDLNGTALPARFRHFSYFPTKDPGSAESEEK

SEQ ID NO: 27163 - DNA, 912 bp, Muscodor strobelii
  misc_feature: SGI EST ID NO. CUFF.64089.0
  misc_feature: Variant of the nucleotide sequence at SEQ ID NO 27161
gtgcacttgatgggacggcctactactcaagaacgacgttgcgttttaggtcgcgagacatccattcaagaagcatactgggaagatgactggctttacgtgaagaacggtcccgtcccgtcactgaaagtcgatctacccggacagcaagattatgatctcagcaagacgtatactttcaagaacgagctgcacaaagacttccaatggctcaggacgccggagacagaacgtatatttgcccttgaagatgaaaatcttgttttattcggtagagaatcaatcggctcgtggtttgaacaggccctcgttgcaagacgacaaacagatttctcttttgaggccaagaccttggtgaacttctcgccaactgatgagcgacaatacgccggactcacgctctactatagtcgatacaactttttctatctcacggttacagcacactcggacggccaacgcgagctgttgatcttgacatctgaggcatcgtggccagaaggcaagttgaaatttccgcttaccgaaccggtatcaatacctaacgagggtgatgtcttaatggcggcgagggttcacgggcgggatttgcagttcttttacggactcgatggatccgatgaactccgaccgattggacctgtcttcgatgcgtccattgtatctgacgagtgcggagggcatcaggtccatggcagtttcacaggcgcattcgtgggaatggcttgctcggatctaaatggcactgcacttcccgctcggtttcggcacttcagctattttcccacaaaagaccctggatcggcagagtcggaagaaaaatagagtaatgcgcttaggacgaggaacacttatgcgctagagtgttgtctgggaaagacaactcaacaagactgctcaatcaatcccaac

SEQ ID NO: 27164 - DNA, 474 bp, Muscodor strobelii
  misc_feature: SGI cDNA ID NO. 569301
  misc_feature: Encodes the peptide sequence at SEQ ID NO 27165
atgtacacaagccttgcactgctcgccgcgactgctggtctggccgcagccatcccgaccagtgccaaccatgctcgctcgacttacactgcgaccaatcttcattacgccggtggactcttcacaggtgattttggcgctggattcaatctcgctgtccctgctgggtatttgcctgacgcgccagctttcgacgtaacctgcgatgccatcttcacgtacgccgatcaatacatcgatcagatcaagccatgtacttggaacgttgcacagccagctggtgcttcagtgaaagcatggacaaacacaatcgactttgtcgttcatgtccaaaccaaatggcttgcgaatggcgcgacaaatgtctcgaacggaacctcgacctctgatttacccatcgaaaatcatgacgttgataatcctctgactggaagcatcgacatcgccttcaacggtcccgtgatccaaggttaa

SEQ ID NO: 27165 - protein, 157 aa, Muscodor strobelii
  misc_feature: SGI Peptide ID NO. 569301
MYTSLALLAATAGLAAAIPTSANHARSTYTATNLHYAGGLFTGDFGAGFNLAVPAGYLPDAPAFDVTCDAIFTYADQYIDQIKPCTWNVAQPAGASVKAWTNTIDFVVHVQTKWLANGATNVSNGTSTSDLPIENHDVDNPLTGSIDIAFNGPVIQG

SEQ ID NO: 27166 - DNA, 789 bp, Muscodor strobelii
  misc_feature: SGI cDNA ID NO. 569302
  misc_feature: Encodes the peptide sequence at SEQ ID NO 27167
atgaagttctccctagtcgcgaacgccctgctctgcgcgagtacctcgcttgctgcaccggggacggcagcacggagacagcgagcgcttgagagcaggcttcgtcgaacaaacccagctgtccctgtgccagtcgggagcgcactgaatgtgcaggatgcaaatgccgagtacacgcaaaactgggccggtgctgtcttgctcggcactgggtacacgacagtatcgggcacgatcgtagtcccgaagcccgcaataccagctggaggaagtactgcaaaatcctacgcggctgcagcgtgggttggtattgatgggagcacgtgtcagtcggccatcttgcagacaggtgtcgacttcatgatgaaaaacggcgttgcatcttatgaaggatggtatgagtggtaccccgattactcgtacaccttcacagggttcaagatctccgccggagatacaatagcgatgagcgtcacaacaacgagcaagaacagcggcagcgtcacgctggacaataaaacaacagggaaatctgtttcgcacagcttcaccaatcaggaaggcgatctgtgccagacgaacgctgagtggattgttgaggacttcctccaggggaatagtctcgttcccttggtagactttgcgacagtgaccttcacgaacgcgaccgtcaatggaaaagccgatctgactggtgcaacgatttacgatatcaagcagggaaatacagtctatacgaagtgctctgccgtaggttcaacaggcgtgacatgcgcatatgcgggttag

SEQ ID NO: 27167 - protein, 262 aa, Muscodor strobelii
  misc_feature: SGI Peptide ID NO. 569302
  misc_feature (59)..(261): Pfam Id: PF01828 Pfam Desc: Peptidase A4 family
  misc_feature (61)..(261): Pfam Id: PF01828 Pfam Desc: Peptidase A4 family
  misc_feature (1)..(260): NCBI GI: 73543258 Blast Desc: acidic protease 1 [Botryotinia fuckeliana]
  misc_feature (1)..(260): NCBI GI: 154293948 Blast Desc: BC1G_14153 [Botryotinia fuckeliana B05.10] gi|150845125|gb|EDN20318.1| BC1G_14153 [Botryotinia fuckeliana B05.10]
  misc_feature (1)..(254): NCBI GI: 242789335 Blast Desc: aspergillopepsin, [Talaromyces stipitatus ATCC 10500] gi|218717927|gb|EED17347.1| aspergillopepsin, [Talaromyces stipitatus ATCC 10500]
  misc_feature (1)..(260): NCBI GI: 67901056 Blast Desc: AN7515.2 [Aspergillus nidulans FGSC A4] gi|40742905|gb|EAA62095.1| AN7515.2 [Aspergillus nidulans FGSC A4] gi|259483831|tpe|CBF79544.1| TPA: aspergillopepsin, nidulans
  misc_feature (1)..(246): NCBI GI: 145251555 Blast Desc: An15g07700 [Aspergillus niger] gi|134082826|emb|CAK42657.1| protein product [Aspergillus niger]
  misc_feature (1)..(260): NCBI GI: 255940586 Blast Desc: Pc16g07360 [Penicillium chrysogenum Wisconsin 54-1255] gi|211585685|emb|CAP93406.1| Pc16g07360 [Penicillium chrysogenum Wisconsin 54-1255]
  misc_feature (1)..(241): NCBI GI: 121711990 Blast Desc: aspergillopepsin, [Aspergillus clavatus NRRL 1] gi|119401762|gb|EAW12184.1| aspergillopepsin, [Aspergillus clavatus NRRL 1]
  misc_feature (1)..(244): NCBI GI: 119474281 Blast Desc: aspergillopepsin, [Neosartorya fischeri NRRL 181] gi|119407169|gb|EAW17119.1| aspergillopepsin, [Neosartorya fischeri NRRL 181]
  misc_feature (1)..(262): NCBI GI: 238499183 Blast Desc: aspergillopepsin, [Aspergillus flavus NRRL3357] gi|220692579|gb|EED48925.1| aspergillopepsin, [Aspergillus flavus NRRL3357]
  misc_feature (27)..(260): NCBI GI: 212534108 Blast Desc: aspergillopepsin, [Penicillium marneffei ATCC 18224] gi|210069609|gb|EEA23699.1| aspergillopepsin, [Penicillium marneffei ATCC 18224]
  misc_feature (55)..(260): SWISSPROT Homolog: EC 3.4.23.19 Aspergillopepsin II
MKFSLVANALLCASTSLAAPGTAARRQRALESRLRRTNPAVPVPVGSALNVQDANAEYTQNWAGAVLLGTGYTTVSGTIVVPKPAIPAGGSTAKSYAAAAWVGIDGSTCQSAILQTGVDFMMKNGVASYEGWYEWYPDYSYTFTGFKISAGDTIAMSVTTTSKNSGSVTLDNKTTGKSVSHSFTNQEGDLCQTNAEWIVEDFLQGNSLVPLVDFATVTFTNATVNGKADLTGATIYDIKQGNTVYTKCSAVGSTGVTCAYAG

SEQ ID NO: 27168 - DNA, 702 bp, Muscodor strobelii
  misc_feature: SGI cDNA ID NO. 569303
  misc_feature: Elevated expression when VOC is produced
  misc_feature: Encodes the peptide sequence at SEQ ID NO 27169
atgacgcgttcaaaagattgcaagaggtcagctgaggttcataacaatggcaccaatccaagaccactcgcgagtgatccagaccagatcgcgcgcaacatgcccaaggccgtgatgaatgccaccggtcacgagtcattagagctgttcaaagtcggctgcatgctattgaaagtccaagacgatgaagactgcagcctcgaagacttagcatattttgtgtcaaaagaatggcggatgccaacgggtgactatgcggttgatcttctggatcgagttcaagtcggaatacatgcgccttgtcagttcttggaaagactcgtatttgcaggtctcgagctggtcaacagttatagcgacggccctcatcaagtccaggaaattgtggcgcgaatgggacatgcgaagaaaataccaaggatgatgggtccagtagtctctgtagcggagtataagacgatattggctgcggagatttggtgcagttgggcgcataggaataacaatccgctgccgcccaagagtcatttcattcaattgtttgggcaagagattgctattccgctggcacagttctcaaagcggtttctgaaagtctgggaatcgagcaaggaattccagaagtatgttcgccagtggtatggactggatgtgtcaatagtagtgagggcagaggcattgaacgaattggcgacggactag

SEQ ID NO: 27169 - protein, 233 aa, Muscodor strobelii
  misc_feature: SGI Peptide ID NO. 569303
  misc_feature: Useful for introducing or modulating the production of volatile compounds
MTRSKDCKRSAEVHNNGTNPRPLASDPDQIARNMPKAVMNATGHESLELFKVGCMLLKVQDDEDCSLEDLAYFVSKEWRMPTGDYAVDLLDRVQVGIHAPCQFLERLVFAGLELVNSYSDGPHQVQEIVARMGHAKKIPRMMGPVVSVAEYKTILAAEIWCSWAHRNNNPLPPKSHFIQLFGQEIAIPLAQFSKRFLKVWESSKEFQKYVRQWYGLDVSIVVRAEALNELATD

SEQ ID NO: 27170 - DNA, 2651 bp, Muscodor strobelii
  misc_feature: SGI EST ID NO. CUFF.64193.0
  misc_feature: Variant of the nucleotide sequence at SEQ ID NO 27168
tagcggccgcattcacatgccaaagcaaaattccggacagaatccggggtgctgggcccgtcttttgggggtttggggtctcgtggcttcatgacatcgtccgcgctttgtcaagcacgattcaggacggcagtgaatcgcatgtggtggtgaggcactgaattatctcggtcaatttgatatccagaaagcattttcataatacggaagtccgtgaatgaacctggctacgtagtatggggccgaatagctgattgatagatagggcgacctctccaatcttcatactgagctatgttgccgacgatatgcgagaatcacatcgaattgggtatgtgatatgtcttgttattggcactgcgtgtcaccgtgacagatgctgtgccgtagaattcgtgatgggctcgactatatattgctggagatctgtccctctcggcttgcgctcctgatcgttcggtccgatgcatagccaaattcagtcttccaattcttcccggtgggctcggcaggatttgacgagccgcgttgacaatattatcaccgcttgcatttctcacgataaacgaagacccaatgtgcaattctccaaatccgactgccgtattgccggattggtcacattccagccaacagtcatgcataccggtcttccctcgcattctacacgtggcgcactagagctgagaatataggtcgatcagttccatgaagagctgaacttgaagaaactgatagatctgattggggaagtcggcatcgatccgagatcgatgtttcatttcctgcatccttcagtattgcgatcatgtagttccaacaggacaatgctggcttgaaacttggatgtttggccctccaaacacagcccatctgatctcgtaatccaatggacaaacttctacctcgtcaatttcgcgacatggagagctcatcgaagtctctatacctatcaccaagggcagagttctgctcgtatgtgatgcgcggcaaagctgacgccaagagctgacacagaaggctttattgatgtcagattagtttcgcacgctactggcgtcagacagagtcgcagcttcgcagccaccatctagcctgatgagtgatggttgcctgcggattaggcgcaaaagtcgcccgtgtagtcgcacataatcaatcatcaatggggctcaggttgcggtaggttcctcagggaacctgtgtcacgtcagacaagtgtgagtgcaggaagattgctactgggctatgttaaatcccacgacttcggttcggaatactgcatctgtcataacccgcctattgcccatcacaaacaggtgagttggcaccaacaaggagttttctgggaatcgaacgacgagtcgtttctcttgcgctttcggaaggagatatctattttcgttctcattccagatactttgatcccttcgtccaattggtcccctgttctgtgttagtatccctggcagtcttttagagcgaaactcgctcccagacctagagaccaagcgtcgctggcgggaccaattgctcaatcatcgcaattgaagtcctaggaaatactagtatatcagagacgatgacgcgttcaaaagattgcaagaggtcagctgaggttcataacaatggcaccaatccaagaccactcgcgagtgatccagaccagatcgcgcgcaacatgcccaaggccgtgatgaatgccaccggtcacgagtcattagagctgttcaaagtcggctgcatgctattgaaagtccaagacgatgaagactgcagcctcgaagacttagcatattttgtgtcaaaagaatggcggatgccaacgggtgactatgcggttgatcttctggatcgagttcaagtcggaatacatgcgccttgtcagttcttggaaagactcgtatttgcaggtctcgagctggtcaacagttatagcgacggccctcatcaagtccaggaaattgtggcgcgaatgggacatgcgaagaaaataccaaggatgatgggtccagtagtctctgtagcggagtataagacgatattggctgcggagatttggtgcagttgggcgcataggaataacaatccgctgccgcccaagagtcatttcattcaattgtttgggcaagagattgctattccgctggcacagttctcaaagcggtttctgaaagtctgggaatcgagcaaggaattccagaagtatgttcgccagtggtatggactggatgtgtcaatagtagtgagggcagaggcattgaacgaattggcgacggactagcaagcaatgggatacggattcgagaaccgagcgagtgaagagtgcattagcataaggagaagtgacaggaccgggtgacacacaggtttgcctgcaggttgcatgtcgtcaagatgtctgtaatacatggagttccgggatgtctcgattaggtgttggtatttcaaattagaaaggagcttctggtctgttcataaataagtagtaggtaatgtgcgtcaggatctgtttccaatgttgaggcccttcagcaaggtattggttgatgaactcggaagtattgccaatcatctgttcagctgccgcaggactcaaccggtgcgtttggtgcgcaactccatgtgagtgtttttcatttccggtactt

SEQ ID NO: 27171 - DNA, 1254 bp, Muscodor strobelii
  misc_feature: SGI cDNA ID NO. 569304
  misc_feature: Encodes the peptide sequence at SEQ ID NO 27172
atggcagccctcgacagattgacacagatcggcaaccagatctctggttccaagtcggcccgcgacaagatcctgcagaagagccccgatgacattgtcgtgacggcatgtctccgcactgctttcaccaagggcggcaagggccagttcaaggacacgtccgccgctgacttgatggctggtgccttgaagggcataattgagcgctccaagattgacccgactctggtcgaggatgtctgtgtcggcgaggtccttgctcccggcggtggcgcaaccgagatgcgtgctgctgccctcgtggctggattcccagagagcactgctgtgcgcacactcaaccgacagtgctcctctggtctccaggcctgcgttgatgtcgccaaccagatccgttcaggtatgatcgaggttggtatcggtgctggcgtcgagagcatgacttcacactacggccctgccgccgtctcagaattctccgagctcctcgaatcccaccccgagtccgcaaactgcaaagtccccatgggcgtcctgtccgacaacatggccaaagaccgcaacatcacccgctcctcccaagacgccttcgccgcctcctcctaccaaaaagccatcaaggcacaagaatccggcctcttcaacgaggaaattcatcccttgaccgtcaagttcgaagaccccaagtccggcgagacaaagaccatcaccgtctccaaagacgacggtgttcgccctggcgtcaccgctcaatctctcagcaagatcaagcctgcattcgcagaagatggctccatccacggcggcaacgcctcacagatcagcgacggcgccgcagccgtcctgatgatgaagcgcagcacggcagagaagctcggccagcctatcctcggtaaatacgtcgccgcgtccatcgtcggcgtcaagcccctcctcatgggtattggaccctggaaggcgatccccaaggtcttcgagcttaccggcttgaacaaagatgatgtcgatatcttcgaggtcaacgaggcattcgcatctcaatgcttgtggtgcgcgaatgagttgggtctgcctatggagaagattaatcccaagggtggtgctattgcttttggtcatcctctggggtgcactggcgcgagacaggtatctacactgctttatgagttgaggaggaggggagagaaggtgggtgttactagtatgtgtgtgggtaccggtatgggtatggctgctgtttgggttgctgagtaa

SEQ ID NO: 27172 - protein, 417 aa, Muscodor strobelii
  misc_feature: SGI Peptide ID NO. 569304
  misc_feature (294)..(416): Pfam Id: PF02803 Pfam Desc: Thiolase, C-terminal domain
  misc_feature (29)..(287): Pfam Id: PF00108 Pfam Desc: Thiolase, N-terminal domain
  misc_feature (1)..(417): NCBI GI: 85097316 Blast Desc: 3-ketoacyl-CoA thiolase [Neurospora crassa OR74A] gi|164428290|ref|XP_001728442.1| 3-ketoacyl-CoA thiolase [Neurospora crassa OR74A] gi|28921913|gb|EAA31186.1| thiolase
  misc_feature (1)..(417): NCBI GI: 145602622 Blast Desc: 3-ketoacyl-coA thiolase peroxisomal A precursor [Magnaporthe grisea 70-15] gi|145011012|gb|EDJ95668.1| 3-ketoacyl-coA thiolase peroxisomal A precursor [Magnaporthe
  misc_feature (1)..(417): NCBI GI: 171681892 Blast Desc: protein product [Podospora anserina] gi|111607551|gb|ABH10693.1| peroxisomal 3-keto-acyl-CoA thiolase [Podospora anserina] gi|170940905|emb|CAP66555.1| protein product
  misc_feature (2)..(417): NCBI GI: 154322579 Blast Desc: BC1G_00632 [Botryotinia fuckeliana B05.10] gi|150847966|gb|EDN23159.1| BC1G_00632 [Botryotinia fuckeliana B05.10]
  misc_feature (2)..(417): NCBI GI: 156064909 Blast Desc: SS1G_00464 [Sclerotinia sclerotiorum 1980] gi|154691324|gb|EDN91062.1| SS1G_00464 [Sclerotinia sclerotiorum 1980]
  misc_feature (2)..(417): NCBI GI: 70993772 Blast Desc: 3-ketoacyl-coA thiolase peroxisomal A precursor [Aspergillus fumigatus Af293] gi|66849367|gb|EAL89695.1| 3-ketoacyl-coA thiolase peroxisomal A precursor [Aspergillus A
  misc_feature (2)..(417): NCBI GI: 119500286 Blast Desc: 3-ketoacyl-coA thiolase peroxisomal A precursor [Neosartorya fischeri NRRL 181] gi|119415065|gb|EAW25003.1| 3-ketoacyl-coA thiolase peroxisomal A precursor [Neosartorya NRRL
  misc_feature (2)..(417): NCBI GI: 169771491 Blast Desc: [Aspergillus oryzae RIB40] gi|83768074|dbj|BAE58213.1| protein product [Aspergillus oryzae]
  misc_feature (2)..(417): NCBI GI: 238485934 Blast Desc: 3-ketoacyl-coA thiolase peroxisomal A precursor [Aspergillus flavus NRRL3357] gi|220699084|gb|EED55423.1| 3-ketoacyl-coA thiolase peroxisomal A precursor [Aspergillus
  misc_feature (2)..(417): NCBI GI: 121707861 Blast Desc: 3-ketoacyl-coA thiolase peroxisomal A precursor [Aspergillus clavatus NRRL 1] gi|119400110|gb|EAW10536.1| 3-ketoacyl-coA thiolase peroxisomal A precursor [Aspergillus NRRL
  misc_feature (4)..(417): SWISSPROT Homolog: EC 2.3.1.16 Acetyl-CoA C-acyltransferase
  misc_feature: Useful for fungicidal and/or biocontrol applications
MAALDRLTQIGNQISGSKSARDKILQKSPDDIVVTACLRTAFTKGGKGQFKDTSAADLMAGALKGIIERSKIDPTLVEDVCVGEVLAPGGGATEMRAAALVAGFPESTAVRTLNRQCSSGLQACVDVANQIRSGMIEVGIGAGVESMTSHYGPAAVSEFSELLESHPESANCKVPMGVLSDNMAKDRNITRSSQDAFAASSYQKAIKAQESGLFNEEIHPLTVKFEDPKSGETKTITVSKDDGVRPGVTAQSLSKIKPAFAEDGSIHGGNASQISDGAAAVLMMKRSTAEKLGQPILGKYVAASIVGVKPLLMGIGPWKAIPKVFELTGLNKDDVDIFEVNEAFASQCLWCANELGLPMEKINPKGGAIAFGHPLGCTGARQVSTLLYELRRRGEKVGVTSMCVGTGMGMAAVWVAE

SEQ ID NO: 27173 - DNA, 3674 bp, Muscodor strobelii
  misc_feature: SGI EST ID NO. CUFF.64375.2
  misc_feature: Variant of the nucleotide sequence at SEQ ID NO 27171
acgaactccaaaatggcagccctcgacagattgacacagatcggcaaccagatctctggttccaagtcggcccgcgacaagatcctgcagaagagccccgatgacattgtcgtgacggcatgtctccgcactgctttcaccaagggcggcaagggccagttcaaggacacgtccgccgctgacttgatggctggtgccttgaagggcataattgagcgctccaagattgacccgactctggtcgaggatgtctgtgtcggcgaggtccttgctcccggcggtggcgcaaccgagatgcgtgctgctgccctcgtggctggattcccagagagcactgctgtgcgcacactcaaccgacagtgctcctctggtctccaggcctgcgttgatgtcgccaaccagatccgttcaggtatgatcgaggttggtatcggtgctggcgtcgagagcatgacttcacactacggccctgccgccgtctcagaattctccgagctcctcgaatcccaccccgagtccgcaaactgcaaagtccccatgggcgtcctgtccgacaacatggccaaagaccgcaacatcacccgctcctcccaagacgccttcgccgcctcctcctaccaaaaagccatcaaggcacaagaatccggcctcttcaacgaggaaattcatcccttgaccgtcaagttcgaagaccccaagtccggcgagacaaagaccatcaccgtctccaaagacgacggtgttcgccctggcgtcaccgctcaatctctcagcaagatcaagcctgcattcgcagaagatggctccatccacggcggcaacgcctcacagatcagcgacggcgccgcagccgtcctgatgatgaagcgcagcacggcagagaagctcggccagcctatcctcggtaaatacgtcgccgcgtccatcgtcggcgtcaagcccctcctcatgggtattggaccctggaaggcgatccccaaggtcttcgagcttaccggcttgaacaaagatgatgtcgatatcttcgaggtcaacgaggcattcgcatctcaatgcttgtggtgcgcgaatgagttgggtctgcctatggagaagattaatcccaagggtggtgctattgcttttggtcatcctctggggtgcactggcgcgagacaggtatctacactgctttatgagttgaggaggaggggagagaaggtgggtgttactagtatgtgtgtgggtaccggtatgggtatggctgctgtttgggttgctgagtaagggggtattaatgagaggaaagagtttgtggggagtgagaagttgtatctgtagctgtatctttatgacatatcggtaccctaactcgcggatgagcgatgctgcggaatacattggcataactctatctgcatatgcacaagagagaattcatgattgacaagctgtagttcttcgtctcgtagaagcacgatgtactgaaatcaggtgaactcatcattaagagatggcttaccatgtcaaaatgttcaatttggagtatctatctctatgctcagttcagacacgcgagatgctttccccagcccaatgatgtaaaactcccaaggtgcaatgcttttcagatcgctacaccacctcacgaccagatgctgaacttttgattctcccactctttcgcggctgggaaacaagacacgcctctaataagattccctcctcaactcccttttcactctccccagcggcgacttcgtcaagagcgaatagttaatagtcgcaggctccagatcatccattatctcagatatcggcgtcgactgtcttcgtggaccgcgtaaattcggaaagctgttagatagacgactatattcataatgtcagcaactctgagtcatttgattgctttgaggaagaaggggaaaatgatctcaccgtctcatcttcccacccctaggactctcactcccagaactggcccgttccgtcgaactctcctcatcactagtcacttcaccactcttttcattctcccgactctcacgcacactcccccaactccgaccacagctcttacagcgctcaggcccattatcgtccatcaccccctcgctctaagaggagaaattctcgacatggctcccgactccccgtgctttggcgagtttcacgatttctaatccaaccactagatccatgaggccgaaacctaccgacttgtatatcacgttgccggaggttaaccatcgtgctagatggtcgtctctttcttcttttttcgcggaacttgagctgtttgtgcgcttgtggtgctttagagaggggagatggaagccggagccgctttttcgtttgtcgtcgttgttgctgtcgcggcgcgtgcgggttggtgattgggaggttgaacgcttggtgcttgatgtatcggaggagccgaagactgttgacattgcggaacccgaagacgttaggtccagcttggtgaaggattcggagatggaggagccttcgtcgcttggggagtgcatgtagtcttcttcttcttttgctaggcggtgaatcatggctagttctcctagtctgattacttgtcagtattgcgtgccgttttcgaagcgtccctcagaaaaagcagagggagaaaagggtatacttactcgacaagctgattaggttgcagtccagcatcgatgatctcaccggcctccttcaagcatccatctaacgagtcaacaacaataacaccgccctccgtggcatgtctatggaagtgcatatgaccacccgaatgcttcacagcctggagcagtaactccttgggcaattctcgcatatggggttgataactcccaacagcaacgatcaatcgcccctttcttcgaccctcgtgactcgtcaaaatattcccgtcgaacagatcttctgtactcggggtgcagcagtaaatcacatctgcagcacggatatgctcctttatcagtctgtcgtattctccgtagccaggcgtcaacacattaaattccgcctgttcccatccttcgcgctgtttttgctcttgaggcacggaatagagtctcttcattattccctttgcgttttcgctgaagcggcggttgatgatgttgattgcttttatagtgtttccacgcagcatcagcgccagacggacgtgccagtatgcttggaggccggacccgaagacggttatggtctgtactttggctcgctttgtgaggagacatgaagaggcgagggcggtgcggaatgcggtcatggtctgggcgtggaggaagccgacggggctgccttcgggcgagtatagtgttacggaaccagttggtcggatcgcggggagtgtggagtcggcgttgggcgatgagacggttacgactatggatagatagaagtcagatcttcatcaatagcacaggccttggggagcagtaatggtttgatatgttctctcccaacgtgacactgacctttgactccatggcctataggactatatgacggcatgaaaagcgtcgtggcgcccgtggtatctgagtatacagatgtacgctctggctgattaaaaaagctggcatcgagcgattgcgtgccggtcgagtattcgtgtaaggcacactttaacgaatgcgcgaaggcttcggcttcttctcgacttaagccctctaacaagtttc

SEQ ID NO: 27174 - DNA, 1440 bp, Muscodor strobelii
  misc_feature: SGI cDNA ID NO. 569305
  misc_feature: Encodes the peptide sequence at SEQ ID NO 27175
atgtcgctcacggtcctctctgatgaggtcattcgaaacttgttagagggcttaagtcgagaagaagccgaagccttcgcgcattcgttaaagtgtgccttacacgaatactcgaccggcacgcaatcgctcgatgccagcttttttaatcagccagagcgtacatctgtatactcagataccacgggcgccacgacgcttttcatgccgtcatatagtcctataggccatggagtcaaagtcgtaaccgtctcatcgcccaacgccgactccacactccccgcgatccgaccaactggttccgtaacactatactcgcccgaaggcagccccgtcggcttcctccacgcccagaccatgaccgcattccgcaccgccctcgcctcttcatgtctcctcacaaagcgagccaaagtacagaccataaccgtcttcgggtccggcctccaagcatactggcacgtccgtctggcgctgatgctgcgtggaaacactataaaagcaatcaacatcatcaaccgccgcttcagcgaaaacgcaaagggaataatgaagagactctattccgtgcctcaagagcaaaaacagcgcgaaggatgggaacaggcggaatttaatgtgttgacgcctggctacggagaatacgacagactgataaaggagcatatccgtgctgcagatgtgatttactgctgcaccccgagtacagaagatctgttcgacgggaatattttgacgagtcacgagggtcgaagaaaggggcgattgatcgttgctgttgggagttatcaaccccatatgcgagaattgcccaaggagttactgctccaggctgtgaagcattcgggtggtcatatgcacttccatagacatgccacggagggcggtgttattgttgttgactcgttagatggatgcttgaaggaggccggtgagatcatcgatgctggactgcaacctaatcagcttgtcgaactaggagaactagccatgattcaccgcctagcaaaagaagaagaagactacatgcactccccaagcgacgaaggctcctccatctccgaatccttcaccaagctggacctaacgtcttcgggttccgcaatgtcaacagtcttcggctcctccgatacatcaagcaccaagcgttcaacctcccaatcaccaacccgcacgcgccgcgacagcaacaacgacgacaaacgaaaaagcggctccggcttccatctcccctctctaaagcaccacaagcgcacaaacagctcaagttccgcgaaaaaagaagaaagagacgaccatctagcacgatggttaacctccggcaacgtgatatacaagtcggtaggtttcggcctcatggatctagtggttggattagaaatcgtgaaactcgccaaagcacggggagtcgggagccatgtcgagaatttctcctcttag

SEQ ID NO: 27175 - protein, 479 aa, Muscodor strobelii
  misc_feature: SGI Peptide ID NO. 569305
  misc_feature (9)..(340): Pfam Id: PF02423 Pfam Desc: Ornithine cyclodeaminase/mu-crystallin family
  misc_feature (68)..(156): Pfam Id: PF02423 Pfam Desc: Ornithine cyclodeaminase/mu-crystallin family
  misc_feature (1)..(477): NCBI GI: 39945250 Blast Desc: MGG_04607 [Magnaporthe grisea 70-15] gi|145021453|gb|EDK05582.1| MGG_04607 [Magnaporthe grisea 70-15]
  misc_feature (1)..(477): NCBI GI: 256727693 Blast Desc: NECHADRAFT_34345 [Nectria haematococca mpVI 77-13-4]
  misc_feature (1)..(475): NCBI GI: 164426024 Blast Desc: NCU04777 [Neurospora crassa OR74A] gi|157071169|gb|EAA30990.2| [Neurospora crassa OR74A]
  misc_feature (1)..(469): NCBI GI: 39979204 Blast Desc: conserved [Neurospora crassa]
  misc_feature (1)..(477): NCBI GI: 46135977 Blast Desc: FG09504.1 [Gibberella zeae PH-1]
  misc_feature (1)..(476): NCBI GI: 156064279 Blast Desc: SS1G_00147 [Sclerotinia sclerotiorum 1980] gi|154691009|gb|EDN90747.1| SS1G_00147 [Sclerotinia sclerotiorum 1980]
  misc_feature (1)..(272): NCBI GI: 171681942 Blast Desc: protein product [Podospora anserina] gi|170940930|emb|CAP66580.1| protein product [Podospora anserina]
  misc_feature (1)..(350): NCBI GI: 169606350 Blast Desc: SNOG_06212 [Phaeosphaeria nodorum SN15] gi|111064923|gb|EAT86043.1| SNOG_06212 [Phaeosphaeria nodorum SN15]
  misc_feature (1)..(355): NCBI GI: 169771113 Blast Desc: [Aspergillus oryzae RIB40] gi|83767885|dbj|BAE58024.1| protein product [Aspergillus oryzae]
  misc_feature (1)..(366): NCBI GI: 255940850 Blast Desc: Pc16g08750 [Penicillium chrysogenum Wisconsin 54-1255] gi|211585817|emb|CAP93545.1| Pc16g08750 [Penicillium chrysogenum Wisconsin 54-1255]
MSLTVLSDEVIRNLLEGLSREEAEAFAHSLKCALHEYSTGTQSLDASFFNQPERTSVYSDTTGATTLFMPSYSPIGHGVKVVTVSSPNADSTLPAIRPTGSVTLYSPEGSPVGFLHAQTMTAFRTALASSCLLTKRAKVQTITVFGSGLQAYWHVRLALMLRGNTIKAINIINRRFSENAKGIMKRLYSVPQEQKQREGWEQAEFNVLTPGYGEYDRLIKEHIRAADVIYCCTPSTEDLFDGNILTSHEGRRKGRLIVAVGSYQPHMRELPKELLLQAVKHSGGHMHFHRHATEGGVIVVDSLDGCLKEAGEIIDAGLQPNQLVELGELAMIHRLAKEEEDYMHSPSDEGSSISESFTKLDLTSSGSAMSTVFGSSDTSSTKRSTSQSPTRTRRDSNNDDKRKSGSGFHLPSLKHHKRTNSSSSAKKEERDDHLARWLTSGNVIYKSVGFGLMDLVVGLEIVKLAKARGVGSHVENFSS

SEQ ID NO: 27176 - DNA, 4109 bp, Muscodor strobelii
  misc_feature: SGI EST ID NO. CUFF.64376.1
  misc_feature: Variant of the nucleotide sequence at SEQ ID NO 27174
ttgagctccgatatagtccctccagtcgcacatatccggagctaacaatccagaatatagctcgccaagcttcaacaccacattctcaaccagactttagtcatgacgcggtcttggtatgagcgcgaactgaactagcaacattggcaaagaggagtcaatccgtacatgtcgtcaccttgagagccttaccgacgagagcttctagaagtatattagtcttcgcaatggcgtcaaatgggatgtctcaaccattagaagaggaagaaacgatgtcgctcacggtcctctctgatgaggtcattcgaaacttgttagagggcttaagtcgagaagaagccgaagccttcgcgcattcgttaaagtgtgccttacacgaatactcgaccggcacgcaatcgctcgatgccagcttttttaatcagccagagcgtacatctgtatactcagataccacgggcgccacgacgcttttcatgccgtcatatagtcctataggccatggagtcaaagtcgtaaccgtctcatcgcccaacgccgactccacactccccgcgatccgaccaactggttccgtaacactatactcgcccgaaggcagccccgtcggcttcctccacgcccagaccatgaccgcattccgcaccgccctcgcctcttcatgtctcctcacaaagcgagccaaagtacagaccataaccgtcttcgggtccggcctccaagcatactggcacgtccgtctggcgctgatgctgcgtggaaacactataaaagcaatcaacatcatcaaccgccgcttcagcgaaaacgcaaagggaataatgaagagactctattccgtgcctcaagagcaaaaacagcgcgaaggatgggaacaggcggaatttaatgtgttgacgcctggctacggagaatacgacagactgataaaggagcatatccgtgctgcagatgtgatttactgctgcaccccgagtacagaagatctgttcgacgggaatattttgacgagtcacgagggtcgaagaaaggggcgattgatcgttgctgttgggagttatcaaccccatatgcgagaattgcccaaggagttactgctccaggctgtgaagcattcgggtggtcatatgcacttccatagacatgccacggagggcggtgttattgttgttgactcgttagatggatgcttgaaggaggccggtgagatcatcgatgctggactgcaacctaatcagcttgtcgaactaggagaactagccatgattcaccgcctagcaaaagaagaagaagactacatgcactccccaagcgacgaaggctcctccatctccgaatccttcaccaagctggacctaacgtcttcgggttccgcaatgtcaacagtcttcggctcctccgatacatcaagcaccaagcgttcaacctcccaatcaccaacccgcacgcgccgcgacagcaacaacgacgacaaacgaaaaagcggctccggcttccatctcccctctctaaagcaccacaagcgcacaaacagctcaagttccgcgaaaaaagaagaaagagacgaccatctagcacgatggttaacctccggcaacgtgatatacaagtcggtaggtttcggcctcatggatctagtggttggattagaaatcgtgaaactcgccaaagcacggggagtcgggagccatgtcgagaatttctcctcttagagcgagggggtgatggacgataatgggcctgagcgctgtaagagctgtggtcggagttgggggagtgtgcgtgagagtcgggagaatgaaaagagtggtgaagtgactagtgatgaggagagttcgacggaacgggccagttctgggagtgagagtcctaggggtgggaagatgagacgtcgtctatctaacagctttccgaatttacgcggtccacgaagacagtcgacgccgatatctgagataatggatgatctggagcctgcgactattaactattcgctcttgacgaagtcgccgctggggagagtgaaaagggagttgaggagggaatcttattagaggcgtgtcttgtttcccagccgcgaaagagtgggagaatcaaaagttcagcatctggtcgtgaggtggtgtagcgatctgaaaagcattgcaccttgggagttttacatcattgggctggggaaagcatctcgcgtgtctgaactgagcatagagatagatactccaaattgaacattttgacatggtaagccatctcttaatgatgagttcacctgatttcagtacatcgtgcttctacgagacgaagaactacagcttgtcaatcatgaattctctcttgtgcatatgcagatagagttatgccaatgtattccgcagcatcgctcatccgcgagttagggtaccgatatgtcataaagatacagctacagatacaacttctcactccccacaaactctttcctctcattaatacccccttactcagcaacccaaacagcagccatacccataccggtacccacacacatactagtaacacccaccttctctcccctcctcctcaactcataaagcagtgtagatacctgtctcgcgccagtgcaccccagaggatgaccaaaagcaatagcaccacccttgggattaatcttctccataggcagacccaactcattcgcgcaccacaagcattgagatgcgaatgcctcgttgacctcgaagatatcgacatcatctttgttcaagccggtaagctcgaagaccttggggatcgccttccagggtccaatacccatgaggaggggcttgacgccgacgatggacgcggcgacgtatttaccgaggataggctggccgagcttctctgccgtgctgcgcttcatcatcaggacggctgcggcgccgtcgctgatctgtgaggcgttgccgccgtggatggagccatcttctgcgaatgcaggcttgatcttgctgagagattgagcggtgacgccagggcgaacaccgtcgtctttggagacggtgatggtctttgtctcgccggacttggggtcttcgaacttgacggtcaagggatgaatttcctcgttgaagaggccggattcttgtgccttgatggctttttggtaggaggaggcggcgaaggcgtcttgggaggagcgggtgatgttgcggtctttggccatgttgtcggacaggacgcccatggggactttgcagtttgcggactcggggtgggattcgaggagctcggagaattctgagacggcggcagggctgtgggaagtattttattagcttcttcttcaggtttctagaatagttgatctggtggaaggagagtataaacatacccgtagtgtgaagtcatgctctcgacgccagcaccgataccaacctcgatcatacctgaacggatctggttggcgacatcaacgcaggcctggagaccagaggagcactgtcggttgagtgtgcgcacagcagtgctctctgggaatccagccacgagggcagcagcacgcatctcggttgcgccaccgccgggagcaaggacctcgccgacacagacatcctcgaccagagtcgggtcaatcttggagcgctcaattatgcccttcaaggcaccagccatcaagtcagcggcggacgtgtccttgaactggcccttgccgcccttggtgaaagcagtgcggagacatgccgtcacgacaatgtcatcggggctcttctgcaggatcttgtcgcgggccgacttggaaccagagatctggttgccgatctgtgtcaatctgtcgagggctgccattttggagttcgttgtcagcgaagagagaaggaaatgtaggaaacggcaagaagagagggaaggagaatcaagacggaggagaagctacattgaagactcacctcccattttgtatttgacgatccactaattactgcggagggttttgattctgcgggtgtctgttctctatcacgacaaggtagaggtctcaagtggatagtatcagaaaacaagcggtgttgaaatcagattcactgtgtaaaaaagagtatatcctccgtgagcagcgacgacgaaacccgaccaagctcaagcgtcat

SEQ ID NO: 27177 - DNA, 1125 bp, Muscodor strobelii
  misc_feature: SGI cDNA ID NO. 569306
  misc_feature: Encodes the peptide sequence at SEQ ID NO 27178
atgggtcgtcttgcgatgattacgccctgggctgtcgccttttgctcttctatcgtcgccgccacatcccctgtgtgcacgacgcaggacgcaccgaacctgttgacgaacccctcatgggaagatggcataaatggttggacctacatcacgccaggcggaagtgcatctatctcgaatgcccaagctctcgatggtagtcagtctcttcttgtccctgctacggccacatacagtcttgttcagcaagctcttagtggtcttgtggttggcgacacgtacaccatttcaatcaactataaaggggttgtaagcccagcttacggaataacggagcagtgtatcatgtatctctaccacgatactttgactacagagaatctcatcagttatgggactgttcagtttaatcacaatttgaacactgactggcagacaattggaggttcatatacggcgacaagttctggtcttacgctcggctattacacttactgcaacccatacaagacccccacggtctggaatctctacgtcgacagtgctgtcgtgaaaggtccttcagtcgaggtgtgcgttactccggagccaacgccagagccaacgccggaaccgactccggaaccgacgccaactcccgagaacacgccgacaccatcgccatcgtctgtgcctgcgccttcatcggtgcctccgcacagcagctatccagctccatctagttatccagctttcttctcacccggtgccaccttcaagcactcctacttcgactacttcaacttcttcgtcatcaagtacgccctcgtccagtattcctgcttccagcaccccaatcacctcaccatcgaccacgcctgcttcgaacactccgtcatcaagcagcccagtttcttctccgacgagctcacctacgaccggctcgccttatcccacaaactcgcacccctgcagctcaccaacgcccactccaacacggagaccttgcaggagcaagaagagccgcattcaaggttctcaataacattcttcagcgtagagataaaagggtccttagagcaggcgctgaacatagacttgatacccctggaaatccctcagctgagctactattgctgtagatga

SEQ ID NO: 27178 - protein, 374 aa, Muscodor strobelii
  misc_feature: SGI Peptide ID NO. 569306
  misc_feature (32)..(187): Pfam Id: PF02018 Pfam Desc: Carbohydrate binding domain
  misc_feature (32)..(97): Pfam Id: PF02018 Pfam Desc: Carbohydrate binding domain
  misc_feature (35)..(180): NCBI GI: 242793934 Blast Desc: protein HEG precursor, [Talaromyces stipitatus ATCC 10500] gi|218718855|gb|EED18275.1| protein HEG precursor, [Talaromyces stipitatus ATCC 10500]
  misc_feature (9)..(167): NCBI GI: 121712192 Blast Desc: carbohydrate binding domain protein [Aspergillus clavatus NRRL 1] gi|119401863|gb|EAW12285.1| carbohydrate binding domain protein [Aspergillus clavatus NRRL 1]
  misc_feature (26)..(167): NCBI GI: 212541226 Blast Desc: conserved [Penicillium marneffei ATCC 18224] gi|210068067|gb|EEA22159.1| conserved [Penicillium marneffei ATCC 18224]
MGRLAMITPWAVAFCSSIVAATSPVCTTQDAPNLLTNPSWEDGINGWTYITPGGSASISNAQALDGSQSLLVPATATYSLVQQALSGLVVGDTYTISINYKGVVSPAYGITEQCIMYLYHDTLTTENLISYGTVQFNHNLNTDWQTIGGSYTATSSGLTLGYYTYCNPYKTPTVWNLYVDSAVVKGPSVEVCVTPEPTPEPTPEPTPEPTPTPENTPTPSPSSVPAPSSVPPHSSYPAPSSYPAFFSPGATFKHSYFDYFNFFVIKYALVQYSCFQHPNHLTIDHACFEHSVIKQPSFFSDELTYDRLALSHKLAPLQLTNAHSNTETLQEQEEPHSRFSITFFSVEIKGSLEQALNIDLIPLEIPQLSYYCCR

SEQ ID NO: 27179 - DNA, 2215 bp, Muscodor strobelii
  misc_feature: SGI EST ID NO. CUFF.64135.0
  misc_feature: Variant of the nucleotide sequence at SEQ ID NO 27177
actgaatgccatcttttgacgcgtggcgccggtgatattatcgaaaatctgcagaaggaaatcttagtcaggggaatatgctaacaaaaaacgtggcgttctagaccaccgttcagctgccccaatctatcgactaacaacctggctagtcaggcactgatgtggattgagtggatgcagctatcttcgacttggaatagcacaacgatctggctggcctgcggcttgcgccgcgaatgctatgggagtcggaagcgaaataatgtcgcgatgccctcgacctcgacaatggaggcattctctaggtgctcggacgaaatgacccgctctggtcatgacctcgcgcaagcgtctgcccgtccactgtacggcatataaatacggcggtagacaaaaccaggcgaacaacctcttacagctttgatctcgagatttggcttttcgataccaccaagtcattcgctgtctaattttccggtgcgtattgaaacatgggtcgtcttgcgatgattacgccctgggctgtcgccttttgctcttctatcgtcgccgccacatcccctgtgtgcacgacgcaggacgcaccgaacctgttgacgaacccctcatgggaagatggcataaatggttggacctacatcacgccaggcggaagtgcatctatctcgaatgcccaagctctcgatggtagtcagtctcttcttgtccctgctacggccacatacagtcttgttcagcaagctcttagtggtcttgtggttggcgacacgtacaccatttcaatcaactataaaggggttgtaagcccagcttacggaataacggagcagtgtatcatgtatctctaccacgatactttgactacagagaatctcatcagttatgggactgttcagtttaatcacaatttgaacactgactggcagacaattggaggttcatatacggcgacaagttctggtcttacgctcggctattacacttactgcaacccatacaagacccccacggtctggaatctctacgtcgacagtgctgtcgtgaaaggtccttcagtcgaggtgtgcgttactccggagccaacgccagagccaacgccggaaccgactccggaaccgacgccaactcccgagaacacgccgacaccatcgccatcgtctgtgcctgcgccttcatcggtgcctccgcacagcagctatccagctccatctagttatccagcgtattcaagttacgcgacctattcaagctatcccgcctattctagctatgcggcctattcgagttaccctgcctactccagttattatccatattccagttatcctgtcccatccagttatccagcttattcgagctacgcggcttattcgagctatcctatctactccagctattatccatattcgagttatccggcgccatcttcctaccctgccccttcaagcttccccgcgccttcatccgtgcctccaaccacatctttgcctgcgctgccttcgtctgtgccgcctcattcgagctacccagcgccatcgagctatccggcatacagctactcagtcgtcccttcgagctacccagcatatagctatcctgtccctccttccagtgccccatactcgagttatccagtttcttctcacccggtgccaccttcaagcactcctacttcgactacttcaacttcttcgtcatcaagtacgccctcgtccagtattcctgcttccagcaccccaatcacctcaccatcgaccacgcctgcttcgaacactccgtcatcaagcagcccagtttcttctccgacgagctcacctacgaccggctcgccttatcccacaaactcgcacccctgcagctcaccaacgcccactccaacacggagaccttgcaggagcaagaagagccgcattcaaggttctcaataacattcttcagcgtagagataaaagggtccttagagcaggcgctgaacatagacttgatacccctggaaatccctcagctgagctactattgctgtagatgatggattttattgtatgtgtgtgtatagatttgtgttttttgatccataataaagtaatgtctaataagccgcttgctctcgtgatcatcaaggcgtttgtgattttgtgaacgcagtatcaagaatgtgtcaccgtggcaaggccgcagcatcgaaggctcttccgatagcaaaacggtgtggggt

SEQ ID NO: 27180 - DNA, 1161 bp, Muscodor strobelii
  misc_feature: SGI cDNA ID NO. 569307
  misc_feature: Encodes the peptide sequence at SEQ ID NO 27181
atggcaccagacgccaccgacgactctgttgagggtctctctgtcgtcactaacagcacgaacgctcttattacccagttcgagactctcctgcactctatcgccctcgacaaacctgttgcgcactcgcccccggcgtccgacactcccgacgtcaccggttcggttgatgcccttgcgctcgcccacgattctgcaagcttggtgaaggcgcacaccaccaagctgtcgcttctcatcatcaacgagccatttactccctctgccatcgtcaagatcctccgcgagctagttgctggacctataccaggccttgcatccgctgttcaggtctgcgaaatacgtagctatacctctatcacgcgccatgagcttgcctggagatgttaccgcgtactgaaagagctgcggggcttcatagagctcatcccactggacggcaaaaccctgtctgcaaacaagaagaatggcgcaaagggagacaaagggagcatggtttccactggtgttatttgggccgcttgcgacgatgttattctactcaagaagctcggcatcgccggattgctggtaaagaaggctgaagagtatagagatacactccaagatgtgctggacgagctcaaagaatggagcgaagaggtcgaggaagaggatgatgacgatgacgatgacgacgaagaagacggacaggtacagggtgtggccgaccagatgaattccacccacctctctgcccaagagatgattgacgatctcatgactgcacagcacattccccgaggtgacccggacaaaatccgcgaacgcctagactcatgtctcaagcgactgcgtctcaccactctactctattcggccatcattaagcggcgtctgaaggcactaccccctctgaacgacaccaactcatcggtcatgcagcgactcgatgaattattccctatactcaaacgtctgcccctaagatttggagacgctgcttgtgccttttacgaattagatccggtggctatagataatgccttggacacctgtttcttcgatgccttcgctgcagcggagatgctaaaggcgccatgggacaggatgaaagggactagcgacgagttcacaacatgggttgacaagttccagacaagtattaaaaagcctgactag

SEQ ID NO: 27181 - protein, 386 aa, Muscodor strobelii
  misc_feature: SGI Peptide ID NO. 569307
  misc_feature (6)..(386): NCBI GI: 116201677 Blast Desc: CHGG_08723 [Chaetomium globosum CBS 148.51] gi|88177241|gb|EAQ84709.1| CHGG_08723 [Chaetomium globosum CBS 148.51]
  misc_feature (1)..(384): NCBI GI: 256722449 Blast Desc: NECHADRAFT_34917 [Nectria haematococca mpVI 77-13-4]
  misc_feature (9)..(384): NCBI GI: 85098053 Blast Desc: NCU05605 [Neurospora crassa OR74A] gi|28922060|gb|EAA31331.1| conserved [Neurospora crassa OR74A]
  misc_feature (1)..(384): NCBI GI: 261361109 Blast Desc: conserved [Verticillium albo-atrum VaMs.102]
  misc_feature (5)..(384): NCBI GI: 171678042 Blast Desc: protein product [Podospora anserina] gi|170937090|emb|CAP61748.1| protein product [Podospora anserina]
  misc_feature (1)..(384): NCBI GI: 46127499 Blast Desc: FG08127.1 [Gibberella zeae PH-1]
  misc_feature (123)..(384): NCBI GI: 156058073 Blast Desc: SS1G_04768 [Sclerotinia sclerotiorum 1980] gi|154702553|gb|EDO02292.1| SS1G_04768 [Sclerotinia sclerotiorum 1980]
  misc_feature (123)..(384): NCBI GI: 154298993 Blast Desc: BC1G_11809 [Botryotinia fuckeliana B05.10] gi|150857512|gb|EDN32704.1| BC1G_11809 [Botryotinia fuckeliana B05.10]
  misc_feature (56)..(214): NCBI GI: 145615458 Blast Desc: MGG_05601 [Magnaporthe grisea 70-15] gi|145022279|gb|EDK06299.1| MGG_05601 [Magnaporthe grisea 70-15]
  misc_feature (16)..(382): NCBI GI: 169598710 Blast Desc: SNOG_02160 [Phaeosphaeria nodorum SN15] gi|111069252|gb|EAT90372.1| SNOG_02160 [Phaeosphaeria nodorum SN15]
MAPDATDDSVEGLSVVTNSTNALITQFETLLHSIALDKPVAHSPPASDTPDVTGSVDALALAHDSASLVKAHTTKLSLLIINEPFTPSAIVKILRELVAGPIPGLASAVQVCEIRSYTSITRHELAWRCYRVLKELRGFIELIPLDGKTLSANKKNGAKGDKGSMVSTGVIWAACDDVILLKKLGIAGLLVKKAEEYRDTLQDVLDELKEWSEEVEEEDDDDDDDDEEDGQVQGVADQMNSTHLSAQEMIDDLMTAQHIPRGDPDKIRERLDSCLKRLRLTTLLYSAIIKRRLKALPPLNDTNSSVMQRLDELFPILKRLPLRFGDAACAFYELDPVAIDNALDTCFFDAFAAAEMLKAPWDRMKGTSDEFTTWVDKFQTSIKKPD

SEQ ID NO: 27182 - DNA, 1263 bp, Muscodor strobelii
  misc_feature: SGI cDNA ID NO. 569308
  misc_feature: Encodes the peptide sequence at SEQ ID NO 27183
atgttgttgaaacagctcttaccccttgtcgcctgtttggcaaaggcagctttggcccaggacaagaaagtgtttgctcactacatcgtcggtctcacgaacggacagtcgcaagatcagtggcagcttgatatctcgcaggccattgagtcaggtatcgacggtttcgctctcaacattggttctcaggacagttacaacgatgcccaattgaagctcgcctatgagactgctgagtccaacaacttcgaagtgttcctatcgttcgatcaaggtgcttcgacatgggaccaaggctcgatcgtgacgtacattaacaactacaagggctactcgtctcaagccaaagtcaacaacctgcctctcgtctcgacattcgagggtccttcgtctgctagcatctggccagctgtgcgcgatgcaactggtggtattttcttcgttcctgactggtcgtccctcggtgcctctggagttggtgctcaaagccagtacatcgatggcgccttcaactggggagcctggcccaacgcaaaccagtacaccattgataccggcaatgatgttgcatacaagaacaccctcggcagcaaggcatacatgatgggtgtcagcccctatttctacacggatctaccccagtacaacaagaactggtattcgtcttctgattccctctggtttgaccgctggagccaggtcttcgatatcaatccaactttcatcgagattatcacctggaatgattatggcgagtcgagctacatcaatgcaccggttcctgcccagatcgtgtccggagcagagggatacatcaatggcttcgaccacaccgctttccgatttgtcctcccatacttcatcagcgcatacaaggctggcaacactaacgttgccgtgccctccactggtgccatggcctggtaccgcactacgcccaagtccgtgtgtggcgatggcggcaccgtttggggacaaggcggaggtgcctctgctaccggcggaactgaagatgtgatctccatcattggcttggccgattcagctcagtctttccaagtccagatcggtggcggtgccgtgaaaacgctcacggctaccaagacagctgggaaggcatcgttctaccagacttcgttcaatggccagactggcgctgtcaagatcacctacaatggaaagacaacgactggccctgagattaccaataactgtcccacgacaggccatgtcaacttcaactctgttgcaattcaggtataa

SEQ ID NO: 27183 - protein, 420 aa, Muscodor strobelii
  misc_feature: SGI Peptide ID NO. 569308
  misc_feature (23)..(398): Pfam Id: PF03659 Pfam Desc: Glycosyl hydrolase family 71
  misc_feature (145)..(315): Pfam Id: PF03659 Pfam Desc: Glycosyl hydrolase family 71
  misc_feature (24)..(128): Pfam Id: PF03659 Pfam Desc: Glycosyl hydrolase family 71
  misc_feature (2)..(420): NCBI GI: 171678054 Blast Desc: protein product [Podospora anserina] gi|170937096|emb|CAP61754.1| protein product [Podospora anserina]
  misc_feature (1)..(417): NCBI GI: 258570971 Blast Desc: conserved [Uncinocarpus reesii 1704] gi|237904559|gb|EEP78960.1| conserved [Uncinocarpus reesii 1704]
  misc_feature (1)..(415): NCBI GI: 259481040 Blast Desc: TPA: alpha 1,3 glucanase, GH71 family (Eurofung) [Aspergillus nidulans FGSC A4]
  misc_feature (2)..(415): NCBI GI: 121718215 Blast Desc: aspartyl aminopeptidase [Aspergillus clavatus NRRL 1] gi|119404333|gb|EAW14709.1| aspartyl aminopeptidase [Aspergillus clavatus NRRL 1]
  misc_feature (16)..(405): NCBI GI: 240274391 Blast Desc: glycosyl hydrolase family 71 protein [Ajellomyces capsulatus H143]
  misc_feature (5)..(405): NCBI GI: 67902530 Blast Desc: AN8252.2 [Aspergillus nidulans FGSC A4] gi|40739800|gb|EAA58990.1| AN8252.2 [Aspergillus nidulans FGSC A4]
  misc_feature (1)..(405): NCBI GI: 154282319 Blast Desc: [Ajellomyces capsulatus NAm1] gi|150410135|gb|EDN05523.1| [Ajellomyces capsulatus NAm1]
  misc_feature (1)..(416): NCBI GI: 242792950 Blast Desc: alpha-1,3-glucanase, [Talaromyces stipitatus ATCC 10500] gi|218718650|gb|EED18070.1| alpha-1,3-glucanase, [Talaromyces stipitatus ATCC 10500]
  misc_feature (1)..(417): NCBI GI: 212535406 Blast Desc: alpha-1,3-glucanase, [Penicillium marneffei ATCC 18224] gi|210070258|gb|EEA24348.1| alpha-1,3-glucanase, [Penicillium marneffei ATCC 18224]
  misc_feature (1)..(415): NCBI GI: 239612199 Blast Desc: alpha-1,3-glucanase [Ajellomyces dermatitidis ER-3]
  misc_feature (21)..(317): SWISSPROT Homolog: EC 3.2.1.59 Glucan endo-1,3-alpha-glucosidase
MLLKQLLPLVACLAKAALAQDKKVFAHYIVGLTNGQSQDQWQLDISQAIESGIDGFALNIGSQDSYNDAQLKLAYETAESNNFEVFLSFDQGASTWDQGSIVTYINNYKGYSSQAKVNNLPLVSTFEGPSSASIWPAVRDATGGIFFVPDWSSLGASGVGAQSQYIDGAFNWGAWPNANQYTIDTGNDVAYKNTLGSKAYMMGVSPYFYTDLPQYNKNWYSSSDSLWFDRWSQVFDINPTFIEIITWNDYGESSYINAPVPAQIVSGAEGYINGFDHTAFRFVLPYFISAYKAGNTNVAVPSTGAMAWYRTTPKSVCGDGGTVWGQGGGASATGGTEDVISIIGLADSAQSFQVQIGGGAVKTLTATKTAGKASFYQTSFNGQTGAVKITYNGKTTTGPEITNNCPTTGHVNFNSVAIQV

SEQ ID NO: 27184 - DNA, 3206 bp, Muscodor strobelii
  misc_feature: SGI EST ID NO. CUFF.64224.0
  misc_feature: Variant of the nucleotide sequence at SEQ ID NO 27182
tgtggagcgagatttagggaccgcacgaacctgctccattgaccgggactggcatgtttagatccccaatgacgattcacttacaccccaaacaggaaagtcgattataggaatggcaaccctatgcgcgcaaccttcttccttttggaccgtggatggaccgtcagctgcctgcatggtactactcgccactcttgaaacatgctactactacaaatcacagtgggtttacagcggccattcgccttacgtacgtagtggccggttcgccgttgtgaccttgagttattcttagtgttctgtttcgagctgtttgcataggcagagctcgatggtgctaattgtatataactacgagttcggaatgattatcatgaactgaaactcttagcttgctatcgggttttcaccgtggtcactcactcgtcaagtctccgttgtttgctggaacgatagcaaaatgttgttgaaacagctcttaccccttgtcgcctgtttggcaaaggcagctttggcccaggacaagaaagtgtttgctcactacatcgtcggtctcacgaacggacagtcgcaagatcagtggcagcttgatatctcgcaggccattgagtcaggtatcgacggtttcgctctcaacattggttctcaggacagttacaacgatgcccaattgaagctcgcctatgagactgctgagtccaacaacttcgaagtgttcctatcgttcgatcaaggtgcttcgacatgggaccaaggctcgatcgtgacgtacattaacaactacaagggctactcgtctcaagccaaagtcaacaacctgcctctcgtctcgacattcgagggtccttcgtctgctagcatctggccagctgtgcgcgatgcaactggtggtattttcttcgttcctgactggtcgtccctcggtgcctctggagttggtgctcaaagccagtacatcgatggcgccttcaactggggagcctggcccaacgcaaaccagtacaccattgataccggcaatgatgttgcatacaagaacaccctcggcagcaaggcatacatgatgggtgtcagcccctatttctacacggatctaccccagtacaacaagaactggtattcgtcttctgattccctctggtttgaccgctggagccaggtcttcgatatcaatccaactttcatcgagattatcacctgtaagtcttgtctgccaagtgttgattggaagtgtagtactaacttcgttagggaatgattatggcgagtcgagctacatcaatgcaccggttcctgcccagatcgtgtccggagcagagggatacatcaatggcttcgaccacaccgctttccgatttgtcctcccatacttcatcagcgcatacaaggctggcaacactaacgttgccgtgccctccactggtgccatggcctggtaccgcactacgcccaagtccgtgtgtggcgatggcggcaccgtttggggacaaggcggaggtgcctctgctaccggcggaactgaagatgtgatctccatcattggcttggccgattcagctcagtctttccaagtccagatcggtggcggtgccgtgaaaacgctcacggctaccaagacagctgggaaggcatcgttctaccagacttcgttcaatggccagactggcgctgtcaagatcacctacaatggaaagacaacgactggccctgagattaccaataactgtcccacgacaggccatgtcaacttcaactctgttgcaattcaggtataaggttctgtagcaaccgtgtgttcgactttgatgggttgtgcaacaatgattttggggtgtaggacgggtcgggcaaagaatacttgtatatacagaccacagcaacgagaataacgagtatacgatgacaaatttgtgattttctttgcgtagctatgggtatgattgacacggtttcctctagtcaggctttttaatacttgtctggaacttgtcaacccatgttgtgaactcgtcgctagtccctttcatcctgtcccatggcgcctttagcatctccgctgcagcgaaggcatcgaagaaacaggtgtccaaggcattatctatagccaccggatctaattcgtaaaaggcacaagcagcgtctccaaatcttaggggcagacgtttgagtatagggaataattcatcgagtcgctgcatgaccgatgagttggtgtcgttcagagggggtagtgccttcagacgccgcttaatgatggccgaatagagtagagtggtgagacgcagtcgcttgagacatgagtctaggcgttcgcggattttgtccgggtcacctcggggaatgtgctgtgcagtcatgagatcgtcaatcatctcttgggcagagaggtgggtggaattcatctggtcggccacaccctgtacctgtccgtcttcttcgtcgtcatcgtcatcgtcatcatcctcttcctcgacctcttcgctccattctttgagctcgtccagcacatcttggagtgtatctctatactcttcagccttctttaccagcaatccggcgatgccgagcttcttgagtagaataacatcgtcgcaagcggcccaaataacaccagtggaaaccatgctccctttgtctccctttgcgccattcttcttgtttgcagacagggttttgccgtccagtgggatgagctctatgaagccccgcagctctttcagtacgcggtaacatctccaggcaagctcatggcgcgtgatagaggtatagctacgtatttcgcagacctgaacagcggatgcaaggcctggtataggtccagcaactagctcgcggaggatcttgacgatggcagagggagtaaatggctcgttgatgatgagaagcgacagcttggtggtgtgcgccttcaccaagcttgcagaatcgtgggcgagcgcaagggcatcaaccgaaccggtgacgtcgggagtgtcggacgccgggggcgagtgcgcaacaggtttgtcgagggcgatagagtgcaggagagtctcgaactgggtaataagagcgttcgtgctgttagtgacgacagagagaccctcaacagagtcgtcggtggcgtctggtgccatatctatctgttgcacggccaaagactggtaacatcgaggacagaagagaagaatcgagatcgagtgattgaaatcaccactgaaattttt

SEQ ID NO: 27185 - DNA, 1581 bp, Muscodor strobelii
  misc_feature: SGI cDNA ID NO. 569309
  misc_feature: Encodes the peptide sequence at SEQ ID NO 27186
atgttattccaaaggtacttgacctgcatactcgcattcgcacttcctgctttcgctgccttcgggttcaccaaatcaggaaacaactatgtagttgacgcaggatcgtctgactcgctcgtcttcaccgtgagcggaaccagttgcgacattacatctatcaaataccgggggacagagttgcagggtgcatcaaaaggaacacatctgtcatcggggcttgggactgccacggtgactgcagaaacgattagtggcaaatacgtcaaagtgacatgcacgacttcaacgttgacgcactacatggtcgccaggtcaggcgatagcatcatatacctagcgacatacatcaaagccgaacccgatattggcgagctgcgtttcatcgcgcgactcaagtcggcacaactaccaaatgagtatccttacggctcggtatccacaaccgccggatctagctcgactgtcgaaggatcagatgtatttgttgtgaacggtcagacacgatccaaattttactcgagcacgaggttcatcgacaaggatgcgcaatgtgtatatggcggctcggatgtgattcatgtctgcatgcttgctccacagcccgagtcttcatctggcgggccgttctttagagacattgagtctaacaatgctggtgatgacacgaacctctactggtacatgaacagcggccatgttcaaacggaagcctaccgcacaaatgtgctacacggaccttacttgatgcaattttcgagatctggagtacctagcgtgaaagacgccgatacatcattcttctctgagcttagcatcacagggttcgtccctgtttccggacgaggttatgtatcaggcaccgcatcaggcgttccgagcaatcttcagacagttgtgcactggtataactcagcagcacaatactggactatcgcatcctccgatggctcattcaagtctccggctatgaaaccaggtacctataccatggtactgtaccaaggcgagtacaaagtggcctccacaagtggcgtcagcgtcagcgcaggggctacgacatcaaagagtattgctagtacagatgtcaagagaacgacactgtggaaaattggcgagttcgatggccagcctacgggatttatgaacgcggacaagttcctccgtatgcatccctctgattcacggatgactgcctggtcccctgcgacatacacggtgggttcgtcgtcgcttgcgcagttcccgatggcgatcttccaaaatgtgaataatccagttaccatcaagtttaatctcgggtccgctcctggcgcagcgactctgcgaattgccacgacactgtcctttgcaggctctcgtccgcaggcaaaagtgaactcgtggtcaggtccatcaccttctgcgccaacaaagattgacagtcgcggtgtcacgagaggcgcttatcgtgggtatggtgaggtatatgatgttagtatcccagcaggcacgcttgtttctggatccaacaccatcacgatttcttcgctctcagggagcagtggaaccacgtttttgaacccgaatatcgtaagttga

SEQ ID NO: 27186 - protein, 526 aa, Muscodor strobelii
  misc_feature: SGI Peptide ID NO. 569309
  misc_feature (21)..(275): Pfam Id: PF09284 Pfam Desc: Rhamnogalacturonase B, N-terminal
  misc_feature (5)..(525): NCBI GI: 116201691 Blast Desc: CHGG_08730 [Chaetomium globosum CBS 148.51] gi|88177248|gb|EAQ84716.1| CHGG_08730 [Chaetomium globosum CBS 148.51]
  misc_feature (2)..(525): NCBI GI: 3913110 Blast Desc: ASD1_NEUCR RecName: Full= rhamnogalacturonase; AltName: Full=Rhamnogalacturonan lyase; Short=RGase; AltName: Full=Ascus development protein 1; Short=Asd-I; Flags: Precursor 1
  misc_feature (2)..(524): NCBI GI: 164425530 Blast Desc: rhamnogalacturonase B precursor [Neurospora crassa OR74A] gi|157070963|gb|EAA31324.2| rhamnogalacturonase B precursor [Neurospora crassa OR74A]
  misc_feature (2)..(525): NCBI GI: 171678058 Blast Desc: protein product [Podospora anserina] gi|170937098|emb|CAP61756.1| protein product [Podospora anserina]
  misc_feature (7)..(525): NCBI GI: 67541943 Blast Desc: RHGB_ASPAC Rhamnogalacturonase B precursor (Rhamnogalacturonan lyase) (RGase B) (RHG B) [Aspergillus nidulans FGSC A4] gi|40742197|gb|EAA61387.1| RHGB_ASPAC B lyase)
  misc_feature (1)..(525): NCBI GI: 121714469 Blast Desc: rhamnogalacturonase B, [Aspergillus clavatus NRRL 1] gi|119402999|gb|EAW13419.1| rhamnogalacturonase B, [Aspergillus clavatus NRRL 1]
  misc_feature (1)..(525): NCBI GI: 2494820 Blast Desc: RHGB_ASPAC RecName: Full=Rhamnogalacturonase B; AltName: Full=Rhamnogalacturonan lyase; AltName: Full=RGase B; AltName: Full=RHG B; Flags: Precursor gi|558315|gb|AAA64368.1| B
  misc_feature (1)..(525): NCBI GI: 70982073 Blast Desc: rhamnogalacturonase B [Aspergillus fumigatus Af293] gi|66844188|gb|EAL84527.1| rhamnogalacturonase B, [Aspergillus fumigatus Af293] gi|159122201|gb|EDP47323.1| rhamnogalacturonase
  misc_feature (20)..(525): NCBI GI: 49258320 Blast Desc: rhamnogalacturonase B [Aspergillus fumigatus Af293] gi|66844188|gb|EAL84527.1| rhamnogalacturonase B, [Aspergillus fumigatus Af293] gi|159122201|gb|EDP47323.1| rhamnogalacturonase
  misc_feature (1)..(525): NCBI GI: 119487144 Blast Desc: rhamnogalacturonase B, [Neosartorya fischeri NRRL 181] gi|119410584|gb|EAW20530.1| rhamnogalacturonase B, [Neosartorya fischeri NRRL 181]
MLFQRYLTCILAFALPAFAAFGFTKSGNNYVVDAGSSDSLVFTVSGTSCDITSIKYRGTELQGASKGTHLSSGLGTATVTAETISGKYVKVTCTTSTLTHYMVARSGDSIIYLATYIKAEPDIGELRFIARLKSAQLPNEYPYGSVSTTAGSSSTVEGSDVFVVNGQTRSKFYSSTRFIDKDAQCVYGGSDVIHVCMLAPQPESSSGGPFFRDIESNNAGDDTNLYWYMNSGHVQTEAYRTNVLHGPYLMQFSRSGVPSVKDADTSFFSELSITGFVPVSGRGYVSGTASGVPSNLQTVVHWYNSAAQYWTIASSDGSFKSPAMKPGTYTMVLYQGEYKVASTSGVSVSAGATTSKSIASTDVKRTTLWKIGEFDGQPTGFMNADKFLRMHPSDSRMTAWSPATYTVGSSSLAQFPMAIFQNVNNPVTIKFNLGSAPGAATLRIATTLSFAGSRPQAKVNSWSGPSPSAPTKIDSRGVTRGAYRGYGEVYDVSIPAGTLVSGSNTITISSLSGSSGTTFLNPNIVS

SEQ ID NO: 27187 - DNA, 857 bp, Muscodor strobelii
  misc_feature: SGI EST ID NO. CUFF.64153.0
  misc_feature: Variant of the nucleotide sequence at SEQ ID NO 27185
aaacaactatgtagttgacgcaggatcgtctgactcgctcgtcttcaccgtgagcggaaccagttgcgacattacatctatcaaataccgggggacagagttgcagggtgcatcaaaaggaacacatctgtcatcggggcttgggactgccacggtgactgcagaaacgattagtggcaaatacgtcaaagtgacatgcacgacttcaacgttgacgcactacatggtcgccaggtcaggcgatagcatcatatacctagcgacatacatcaaagccgaacccgatattggcgagctgcgtttcatcgcgcgactcaagtcggcacaactaccaaatgagtatccttacggctcggtatccacaaccgccggatctagctcgactgtcgaaggatcagatgtatttgttgtgaacggtcagacacgatccaaattttactcgagcacgaggttcatcgacaaggatgcgcaatgtgtatatggcggctcggatgtgattcatgtctgcatgcttgctccacagcccgagtcttcatctggcgggccgttctttagagacattgagtctaacaatgctggtgatgacacgaacctctactggtacatgaacagcggccatgttcaaacggaagcctaccgcacaaatgtgctacacggaccttacttgatgcaattttcgagatctggagtacctagcgtgaaagacgccgatacatcattcttctctgagcttagcatcacagggttcgtccctgtttccggacgaggttatgtatcaggcaccgcatcaggcgttccgagcaatcttcagacagttgtgcactggtataactcagcagcacaatactggactatcg

SEQ ID NO: 27188 - DNA, 1605 bp, Muscodor strobelii
  misc_feature: SGI cDNA ID NO. 569310
  misc_feature: Encodes the peptide sequence at SEQ ID NO 27189
atgttattccaaaggtacttgacctgcatactcgcattcgcacttcctgctttcgctgccttcgggttcaccaaatcaggaaacaactatgtagttgacgcaggatcgtctgactcgctcgtcttcaccgtgagcggaaccagttgcgacattacatctatcaaataccgggggacagagttgcagggtgcatcaaaaggaacacatctgtcatcggggcttgggactgccacggtgactgcagaaacgattagtggcaaatacgtcaaagtgacatgcacgacttcaacgttgacgcactacatggtcgccaggtcaggcgatagcatcatatacctagcgacatacatcaaagccgaacccgatattggcgagctgcgtttcatcgcgcgactcaagtcggcacaactaccaaatgagtatccttacggctcggtatccacaaccgccggatctagctcgactgtcgaaggatcagatgtatttgttgtgaacggtcagacacgatccaaattttactcgagcacgaggttcatcgacaaggatgcgcaatgtgtatatggcggctcggatgtgattcatgtctgcatgcttgctccacagcccgagtcttcatctggcgggccgttctttagagacattgagtctaacaatgctggtgatgacacgaacctctactggtacatgaacagcggccatgttcaaacggaagcctaccgcacaaatgtgctacacggaccttacttgatgcaattttcgagatctggagtacctagcgtgaaagacgccgatacatcattcttctctgagcttagcatcacagggttcgtccctgtttccggacgaggttatgtatcaggcaccgcatcaggcgttccgagcaatcttcagacagttgtgcactggtataactcagcagcacaatactggactatcgcatcctccgatggctcattcaagtctccggctatgaaaccaggtacctataccatggtactgtaccaaggcgagtacaaagtggcctccacaagtggcgtcagcgtcagcgcaggggctacgacatcaaagagtattgctagtacagatgtcaagagaacgacactgtggaaaattggcgagttcgatggccagcctacgggatttatgaacgcggacaagttcctccgtatgcatccctctgattcacggatgactgcctggtcccctgcgacatacacggtgggttcgtcgtcgcttgcgcagttcccgatggcgatcttccaaaatgtgaataatccagttaccatcaagtttaatctcgggtccgctcctggcgcagcgactctgcgaattgccacgacactgtcctttgcaggctctcgtccgcaggcaaaagtgaactcgtggtcaggtccatcaccttctgcgccaacaaagattgacagtcgcggtgtcacgagaggcgcttatcgtgggtatggtgaggtatatgatgttagtatcccagcaggcacgcttgtttctggatccaacaccatcacgatttcttcgctctcagggagcagtggaaccacgtttttgaacccgaatatcatattcgatgctgttgagctctttactaaatga

SEQ ID NO: 27189 - protein, 534 aa, Muscodor strobelii
  misc_feature: SGI Peptide ID NO. 569310
  misc_feature (21)..(275): Pfam Id: PF09284 Pfam Desc: Rhamnogalacturonase B, N-terminal
  misc_feature (5)..(525): NCBI GI: 116201691 Blast Desc: CHGG_08730 [Chaetomium globosum CBS 148.51] gi|88177248|gb|EAQ84716.1| CHGG_08730 [Chaetomium globosum CBS 148.51]
  misc_feature (2)..(532): NCBI GI: 3913110 Blast Desc: ASD1_NEUCR RecName: Full= rhamnogalacturonase; AltName: Full=Rhamnogalacturonan lyase; Short=RGase; AltName: Full=Ascus development protein 1; Short=Asd-I; Flags: Precursor 1
  misc_feature (2)..(532): NCBI GI: 171678058 Blast Desc: protein product [Podospora anserina] gi|170937098|emb|CAP61756.1| protein product [Podospora anserina]
  misc_feature (2)..(524): NCBI GI: 164425530 Blast Desc: rhamnogalacturonase B precursor [Neurospora crassa OR74A] gi|157070963|gb|EAA31324.2| rhamnogalacturonase B precursor [Neurospora crassa OR74A]
  misc_feature (7)..(532): NCBI GI: 67541943 Blast Desc: RHGB_ASPAC Rhamnogalacturonase B precursor (Rhamnogalacturonan lyase) (RGase B) (RHG B) [Aspergillus nidulans FGSC A4] gi|40742197|gb|EAA61387.1| RHGB_ASPAC B lyase)
  misc_feature (1)..(532): NCBI GI: 121714469 Blast Desc: rhamnogalacturonase B, [Aspergillus clavatus NRRL 1] gi|119402999|gb|EAW13419.1| rhamnogalacturonase B, [Aspergillus clavatus NRRL 1]
  misc_feature (1)..(532): NCBI GI: 2494820 Blast Desc: RHGB_ASPAC RecName: Full=Rhamnogalacturonase B; AltName: Full=Rhamnogalacturonan lyase; AltName: Full=RGase B; AltName: Full=RHG B; Flags: Precursor gi|558315|gb|AAA64368.1| B
  misc_feature (1)..(532): NCBI GI: 70982073 Blast Desc: rhamnogalacturonase B [Aspergillus fumigatus Af293] gi|66844188|gb|EAL84527.1| rhamnogalacturonase B, [Aspergillus fumigatus Af293] gi|159122201|gb|EDP47323.1| rhamnogalacturonase
  misc_feature (20)..(532): NCBI GI: 49258320 Blast Desc: rhamnogalacturonase B [Aspergillus fumigatus Af293] gi|66844188|gb|EAL84527.1| rhamnogalacturonase B, [Aspergillus fumigatus Af293] gi|159122201|gb|EDP47323.1| rhamnogalacturonase
  misc_feature (1)..(532): NCBI GI: 119487144 Blast Desc: rhamnogalacturonase B, [Neosartorya fischeri NRRL 181] gi|119410584|gb|EAW20530.1| rhamnogalacturonase B, [Neosartorya fischeri NRRL 181]
MLFQRYLTCILAFALPAFAAFGFTKSGNNYVVDAGSSDSLVFTVSGTSCDITSIKYRGTELQGASKGTHLSSGLGTATVTAETISGKYVKVTCTTSTLTHYMVARSGDSIIYLATYIKAEPDIGELRFIARLKSAQLPNEYPYGSVSTTAGSSSTVEGSDVFVVNGQTRSKFYSSTRFIDKDAQCVYGGSDVIHVCMLAPQPESSSGGPFFRDIESNNAGDDTNLYWYMNSGHVQTEAYRTNVLHGPYLMQFSRSGVPSVKDADTSFFSELSITGFVPVSGRGYVSGTASGVPSNLQTVVHWYNSAAQYWTIASSDGSFKSPAMKPGTYTMVLYQGEYKVASTSGVSVSAGATTSKSIASTDVKRTTLWKIGEFDGQPTGFMNADKFLRMHPSDSRMTAWSPATYTVGSSSLAQFPMAIFQNVNNPVTIKFNLGSAPGAATLRIATTLSFAGSRPQAKVNSWSGPSPSAPTKIDSRGVTRGAYRGYGEVYDVSIPAGTLVSGSNTITISSLSGSSGTTFLNPNIIFDAVELFTK

SEQ ID NO: 27190 - DNA, 857 bp, Muscodor strobelii; identical to SEQ ID NO: 27187
  misc_feature: SGI EST ID NO. CUFF.64153.0
  misc_feature: Variant of the nucleotide sequence at SEQ ID NO 27188

SEQ ID NO: 27191 - DNA, 1644 bp, Muscodor strobelii
  misc_feature: SGI cDNA ID NO. 569311
  misc_feature: Encodes the peptide sequence at SEQ ID NO 27192
atggctacaccacaaaagacatcggtcattatcgtaggcgggagcactgtcggtctaacgactgcgctgcttctcgctgccaaacgagtcccgttcattctgctcgagcggcatccctccagttcgtcacatccgcgagcgattggttggacgcaccgtactatggagatatttcggtcggtcggccttgataaatcaattcccatgcctaaaggggccggaaagccgcgtcgcgtggctacgaagacattgaatagagaatggtctgatgagacacattggacaaaggcgaatgattccggtgcaaaggacgggaaaccgcagggaggagcaggtcccagaggtcctcccggtcctcctgacctcagcagcatcactccggtgcgtgatgcggctattgcccaggatgccttggaacccatcatcagaaacaaggtccttgaactcggcggtgaccttcgactgggctataaaatgacttcttggtctcaagacgcgaacggcgtcagcgctaccgccaccaaggccgatggaagtgaattcaccgtaattggagattatctggtcgcatgcgacggtgctcgcagctcaatccgcgaacagctcggtattacagaatcatatggggtgggatatctgcgcacgttacgtagtattctgttccggtgcccaagcatcgaccactatctctcgcgcgggattcatcaatggtctataaaaaacgatgacgttgatgccttcatggtcacctattctgatgggcgatgggctctcatgtcatacgatgctgatcaagacgcacttgatgaagaatgccagaaatcctatatccagaaagcaattggagagcccgtgacagacatcgagctgctgtcctacggtaaatgggacttaggtgcatctatcttcgactccttttcatctggtcgcgtgttccttgcgggtgatgcagctcacacgttacctcccagtcgtggtggctacggtgccaacacaggaatcgcagatgcgcacaacattgcgtggaaattagcagcagtgatctccggagagtcgaaggcctcgcttctcgagacatatgatgcggagcgtcgatcaatcgcattagtacgccatgatcagatctttgcgcgcgacgattacaaggcatacgctggagattctgactgggctcgaacgaataaattcgcagaagtcattgacgacattgctatggaacttggtcagatctatcgctcatcagccattctaggctcggaagacaagtctcttcctgacgcgaagacacctgccgaatggattggacagcctgggacccgagcgccacatgttgctctcaagttccctacagacgacaacgagatctcgagtttagatttgtttaatgatggatggactgtgctttcttatgatgccaagtggctgataccgcagtgccgattgattcagatcggcacagatgtgaaggaggttaagaacggtgcattcgcaagcgcctttggcgtcgattctacaggagctgtgctggttcgaccggatggatatatcgccgcgaggtggcaacaagcgccgaacaatccgggtcaagagattaaagaggcttttatacgagttgcgcatgtggcaaacgagtggaaacagtag

SEQ ID NO: 27192 - protein, 547 aa, Muscodor strobelii
  misc_feature: SGI Peptide ID NO. 569311
  misc_feature (6)..(373): Pfam Id: PF01494 Pfam Desc: FAD binding domain
  misc_feature (277)..(373): Pfam Id: PF01494 Pfam Desc: FAD binding domain
  misc_feature (6)..(67): Pfam Id: PF01494 Pfam Desc: FAD binding domain
  misc_feature (131)..(205): Pfam Id: PF01494 Pfam Desc: FAD binding domain
  misc_feature (1)..(539): NCBI GI: 256733415 Blast Desc: NECHADRAFT_77482 [Nectria haematococca mpVI 77-13-4]
  misc_feature (5)..(539): NCBI GI: 162455304 Blast Desc: 2,4-dichlorophenol 6-monooxygenase [Sorangium cellulosum 'So ce 56'] gi|161165886|emb|CAN97191.1| 2,4-dichlorophenol 6-monooxygenase [Sorangium cellulosum 'So ce
  misc_feature (2)..(543): NCBI GI: 238507676 Blast Desc: conserved [Aspergillus flavus NRRL3357] gi|220688558|gb|EED44910.1| conserved [Aspergillus flavus NRRL3357]
  misc_feature (1)..(543): NCBI GI: 169785080 Blast Desc: [Aspergillus oryzae RIB40] gi|83775748|dbj|BAE65868.1| protein product [Aspergillus oryzae]
  misc_feature (6)..(541): NCBI GI: 121700412 Blast Desc: FAD binding domain protein [Aspergillus clavatus NRRL 1] gi|119396613|gb|EAW07045.1| FAD binding domain protein [Aspergillus clavatus NRRL 1]
  misc_feature (1)..(526): NCBI GI: 242767599 Blast Desc: tetracenomycin polyketide synthesis hydroxylase tcmG, [Talaromyces stipitatus ATCC 10500] gi|218724597|gb|EED24014.1| tetracenomycin polyketide synthesis hydroxylase tcmG, stipitatus
  misc_feature (1)..(522): NCBI GI: 266628426 Blast Desc: monooxygenase FAD-binding [Caulobacter segnis ATCC 21756] gi|264673450|gb|EEZ36847.1| monooxygenase FAD-binding [Caulobacter segnis ATCC 21756]
  misc_feature (9)..(530): NCBI GI: 22477120 Blast Desc: RubL [Streptomyces collinus]
  misc_feature (7)..(528): NCBI GI: 21039507 Blast Desc: AF509565_20 FAD-dependent monooxygenase GrhO5 [Streptomyces sp. JP95]
  misc_feature (5)..(538): NCBI GI: 21039511 Blast Desc: AF509565_24 FAD-dependent oxidoreductase GrhO9 [Streptomyces sp. JP95]
  misc_feature (33)..(538): SWISSPROT Homolog: EC 1.14.13.20 2,4-dichlorophenol 6-monooxygenase
MATPQKTSVIIVGGSTVGLTTALLLAAKRVPFILLERHPSSSSHPRAIGWTHRTMEIFRSVGLDKSIPMPKGAGKPRRVATKTLNREWSDETHWTKANDSGAKDGKPQGGAGPRGPPGPPDLSSITPVRDAAIAQDALEPIIRNKVLELGGDLRLGYKMTSWSQDANGVSATATKADGSEFTVIGDYLVACDGARSSIREQLGITESYGVGYLRTLRSILFRCPSIDHYLSRGIHQWSIKNDDVDAFMVTYSDGRWALMSYDADQDALDEECQKSYIQKAIGEPVTDIELLSYGKWDLGASIFDSFSSGRVFLAGDAAHTLPPSRGGYGANTGIADAHNIAWKLAAVISGESKASLLETYDAERRSIALVRHDQIFARDDYKAYAGDSDWARTNKFAEVIDDIAMELGQIYRSSAILGSEDKSLPDAKTPAEWIGQPGTRAPHVALKFPTDDNEISSLDLFNDGWTVLSYDAKWLIPQCRLIQIGTDVKEVKNGAFASAFGVDSTGAVLVRPDGYIAARWQQAPNNPGQEIKEAFIRVAHVANEWKQ

SEQ ID NO: 27193 - DNA, 2635 bp, Muscodor strobelii
  misc_feature: SGI EST ID NO. CUFF.64162.0
  misc_feature: Variant of the nucleotide sequence at SEQ ID NO 27191
gctgcgtctcggtcccgacagaagcacgcccgctggcatttaaccagtattctctggcctccaggtcggctgaggttctcgacttaagccctcgaaccttaaacctctgtgccttaatccaactcgggattttctaaataccgttataatctcttccatgccgatgaatctctaggcaacacagtttcataaacgctcactctaggaaatgtatcactcggtggctgcaatcatgcgagcaatacgtataaagatgcattcatggacctcataccaagagatggtgttctcatccccatcttcatacccgacgacaccctcgagctaatagcaaataaatcattatcatttccgccataattcaggtacatcttattgttatacttcaaagcagacgttagcaccaaacaatggctacaccacaaaagacatcggtcattatcgtaggcgggagcactgtcggtctaacgactgcgctgcttctcgctgccaaacgagtcccgttcattctgctcgagcggcatccctccagttcgtcacatccgcgagcgattggttggacgcaccgtactatggagatatttcggtcggtcggccttgataaatcaattcccatgcctaaaggggccggaaagccgcgtcgcgtggctacgaagacattgaatagagaatggtctgatgagacacattggacaaaggcgaatgattccggtgcaaaggacgggaaaccgcagggaggagcaggtcccagaggtcctcccggtcctcctgacctcagcagcatcactccggtgcgtgatgcggctattgcccaggatgccttggaacccatcatcagaaacaaggtccttgaactcggcggtgaccttcgactgggctataaaatgacttcttggtctcaagacgcgaacggcgtcagcgctaccgccaccaaggccgatggaagtgaattcaccgtaattggagattatctggtcgcatgcgacggtgctcgcagctcaatccgcgaacagctcggtattacagaatcatatggggtgggatatctgcgcacgttacgtagtattctgttccggtgcccaagcatcgaccactatctctcgcgcgggattcatcaatggtctataaaaaacgatgacgttgatgccttcatggtcacctattctgatgggcgatgggctctcatgtcatacgatgctgatcaagacgcacttgatgaagaatgccagaaatcctatatccagaaagcaattggagagcccgtgacagacatcgagctgctgtcctacggtaaatgggacttaggtgcatctatcttcgactccttttcatctggtcgcgtgttccttgcgggtgatgcagctcacacgttacctcccagtcgtggtggctacggtgccaacacaggaatcgcagatgcgcacaacattgcgtggaaattagcagcagtgatctccggagagtcgaaggcctcgcttctcgagacatatgatgcggagcgtcgatcaatcgcattagtacgccatgatcagatctttgcgcgcgacgattacaaggcatacgctggagattctgactgggctcgaacgaataaattcgcagaagtcattgacgacattgctatggaacttggtcagatctatcgctcatcagccattctaggctcggaagacaagtctcttcctgacgcgaagacacctgccgaatggattggacagcctgggacccgagcgccacatgttgctctcaagttccctacagacgacaacgagatctcgagtttagatttgtttaatgatggatggactgtgctttcttatgatgccaagtggctgataccgcagtgccgattgattcagatcggcacagatgtgaaggaggttaagaacggtgcattcgcaagcgcctttggcgtcgattctacaggagctgtgctggttcgaccggatggatatatcgccgcgaggtggcaacaagcgccgaacaatccgggtcaagagattaaagaggcttttatacgagttgcgcatgtggcaaacgagtggaaacagtagttatacgatcacacctcatagatcgaaagcaaggacgccgtttatagtttgtataaaagcattattatattctgaaatgtgtaatctttccctaccactttggacgtcaagtagaaacaattgtatgtatgtcatcgatgatggtcgatgttttgacttcgaacaaaaaagttgcaaacggtagcgatggtggtcagtagtttatagggatcatatagtcggacagagtcgtaggaagtaggaccggacaatggaagaattgagttggttgtcggtctcgtcggcaaaggcgagaaagggtgatgcaattgacaaaggaaatccattcgctgcattcgggtctgcactcagctctcaccacaaatccaggtaaccctagcagggcaatcactagtgatgcgtccggtctctaagccggcaccaagtctctctgcgagaggtaataaagactctttctttcccggccttgataactctgtgtcggagtgatccactggccgcggttatctatgagagagccacaacgggcagaaggtctcgttagaaacgacctcgtggatgcaaggagtgtttcacctata

SEQ ID NO: 27194 - DNA, 1149 bp, Muscodor strobelii
  misc_feature: SGI cDNA ID NO. 569312
  misc_feature: Encodes the peptide sequence at SEQ ID NO 27195
atgttctggaggatcttggcaggcttagcaaatggtaacgtcagcattatgagaacggtgaccgcagagatcgttagagagcgcaagtatcagaccaaggcttttctgctgttaccattggtattcaattccgggatggttctcagcttggcgttgggcggctgcttggctgagcctgtggtcaacttgcctgaatacccctatgcattacctgcgcttctcaatgcgctattcctcgcgacggcattgctacttgcgggtttgggattaagagagacgctgattgggaaagaagatcgtacagactggggtttgagattcggcgatgccactaggagacttgcgactaagatatggaatagaggcagaaaagggcagtatcatctgtatactgtgatggaaatcgacgaggaggtcataagattagacgaggggcatgatgaactagagaaaccccgaccacttggaatcgcgacacaagcaccgaaagtgccatcccgaggaatctggtcgcgcagagtgatctcggccctggtctcttttggactcctccctctgcacaattcggcatttatgcacattttccctgtatacttaagcagtccaccagccgacaacagcgaggcaacgttcttcgctttctccggtggtcttggactacgatcagcgaccatcggcatttggctctcgacatttggcgtcggaggcattcttttgcagctcttcatctacccgcgattgcagaaacgtattggtacgcgcggcgtatttcgcattgcgctgtttctgttcccactcacttatctcgccgcgccgtacctctcgctactggcgggagatcatgaggcgcgatgggtgtttctgggtttcgttgtttgcgctcaaatcatggcgcgtactatggccatccctagcacggtaattttactcactgaagctgcgcccgctccggtggttcttggaactattcacggggccggcaatatgcttgcgagcctcgctcgcgcggtcggtcctgctgtcggaggctacgtgtttgcattgggtgtcaaagaaggaattgttggccttgtttggtggttatacctggttggcgttgccttgtgtgctctcgcttggtcttattttacagatggtgctggtggctga

SEQ ID NO: 27195 - protein, 382 aa, Muscodor strobelii
  misc_feature: SGI Peptide ID NO. 569312
  misc_feature (1)..(339): Pfam Id: PF07690 Pfam Desc: Major Facilitator Superfamily
  misc_feature (3)..(332): NCBI GI: 169604921 Blast Desc: SNOG_05477 [Phaeosphaeria nodorum SN15] gi|111065421|gb|EAT86541.1| SNOG_05477 [Phaeosphaeria nodorum SN15]
  misc_feature (1)..(382): NCBI GI: 256732145 Blast Desc: NECHADRAFT_41158 [Nectria haematococca mpVI 77-13-4]
  misc_feature (3)..(360): NCBI GI: 238840167 Blast Desc: conserved [Microsporum canis CBS 113480]
  misc_feature (3)..(381): NCBI GI: 154291752 Blast Desc: BC1G_15035 [Botryotinia fuckeliana B05.10] gi|150846614|gb|EDN21807.1| BC1G_15035 [Botryotinia fuckeliana B05.10]
  misc_feature (1)..(381): NCBI GI: 154302583 Blast Desc: BC1G_09868 [Botryotinia fuckeliana B05.10] gi|150855357|gb|EDN30549.1| BC1G_09868 [Botryotinia fuckeliana B05.10]
  misc_feature (3)..(381): NCBI GI: 156034519 Blast Desc: SS1G_13194 [Sclerotinia sclerotiorum 1980] gi|154698598|gb|EDN98336.1| SS1G_13194 [Sclerotinia sclerotiorum 1980]
  misc_feature (3)..(381): NCBI GI: 156055416 Blast Desc: SS1G_05060 [Sclerotinia sclerotiorum 1980] gi|154702844|gb|EDO02583.1| SS1G_05060 [Sclerotinia sclerotiorum 1980]
  misc_feature (1)..(381): NCBI GI: 242801157 Blast Desc: MFS multidrug transporter, [Talaromyces stipitatus ATCC 10500] gi|218717048|gb|EED16469.1| MFS multidrug transporter, [Talaromyces stipitatus ATCC 10500]
  misc_feature (3)..(360): NCBI GI: 169618341 Blast Desc: SNOG_12362 [Phaeosphaeria nodorum SN15] gi|160703598|gb|EAT80175.2| SNOG_12362 [Phaeosphaeria nodorum SN15]
  misc_feature (1)..(380): NCBI GI: 171678027 Blast Desc: protein product [Podospora anserina] gi|170937082|emb|CAP61741.1| protein product [Podospora anserina]
MFWRILAGLANGNVSIMRTVTAEIVRERKYQTKAFLLLPLVFNSGMVLSLALGGCLAEPVVNLPEYPYALPALLNALFLATALLLAGLGLRETLIGKEDRTDWGLRFGDATRRLATKIWNRGRKGQYHLYTVMEIDEEVIRLDEGHDELEKPRPLGIATQAPKVPSRGIWSRRVISALVSFGLLPLHNSAFMHIFPVYLSSPPADNSEATFFAFSGGLGLRSATIGIWLSTFGVGGILLQLFIYPRLQKRIGTRGVFRIALFLFPLTYLAAPYLSLLAGDHEARWVFLGFVVCAQIMARTMAIPSTVILLTEAAPAPVVLGTIHGAGNMLASLARAVGPAVGGYVFALGVKEGIVGLVWWLYLVGVALCALAWSYFTDGAGG

SEQ ID NO: 27196 - DNA, 1527 bp, Muscodor strobelii
  misc_feature: SGI cDNA ID NO. 569313
  misc_feature: Encodes the peptide sequence at SEQ ID NO 27197
atggcggcgttgccgaaagctgtagttcgacttcatttcctttgcgtattttttgctatcggatcgttcgtctggggctacaacgtaggaatcctctcctcagtcctagtccacccaggcttcacattcgcccttgaattcccaacatcatctcaaaagggggtaataacatcgatatactacctcggaacatggacatcctatgtcttcctcgcgcacccagcaagcgactacctggggcgacgatacgcggctctagtaggaatcatcgtcgtcgcagtaggcactgcgatacaatgtgatgctagaccacctgctgcgtacgctatgatgataatcggaaggattgtctcaggtgttggagtcgggttggtttccacttctgtgccgctttatcaaagcgaagtagcaccagcaggcaaaagaggaaaatacgtagtcctcaaccacgtgggattcgtcgcggggctcgcagtaggcttctgggtaggctacgccgtaacattctgggagagaacaccatggaacgactacttcggctggcgattctcactcctcgtgatatacatcccgataataatctttgggctcggactgcccttccttccagagaccccccgctggctaacagaaaacgcataccacgaccgagccctaaaatccctcttctggctgcgcgaggggagtttcacccctgaactcatccaagccgaactagtcacaatccgagacgacataaccacccaccaagcactcggcctaacctggcgaagtctcttcacctcgccaacactcttccgccgcctatggcgagcatccctcctgcaattcatggcgcagatgtgcggcgcaacagcgatgaaatactatctacctactcttctccaaaaattagggctctcgacacgaatcgcgttgatggcgggcggtatcgagtctacgctgaagattggtatgacagttgtggaaatgctgctcattgatcgactgggacgacgagtgacgctcgtgagtgggacggctgctatggggtttgctatgttgttgaatggcgcgctaggccaagcatacccgaacaacacaaatcgcgccgcagatattacctgcgtagtgttcatcttcatctatgccttgggttatagcatgggtttcgggcccgcagcttgggtttacggatcagaaatcttcccaaccgctctccgcgcgcggggtctaagtttctccgcctcaggcggtgcaataggctcgataatagtcgcacaagtctggcccgtaggcatcgacgcgatcggatcgaacatctacttcttcttcatggccatcaatcttatctgcataccaatcattctcctattctatccagagacgaaaggcagggcgctagaggatatggacgcactttttgagcaccacgccagaagaggaagatcaagaagaagagacgaacagattgatgatgcagatgaggcgggtgttcctaagattgtacaaccgagtacccagggtcaaacgattgctgtaccatag

SEQ ID NO: 27197 - protein, 508 aa, Muscodor strobelii
  misc_feature: SGI Peptide ID NO. 569313
  misc_feature (14)..(420): Pfam Id: PF07690 Pfam Desc: Major Facilitator Superfamily
  misc_feature (14)..(468): Pfam Id: PF00083 Pfam Desc: Sugar (and other) transporter
  misc_feature (6)..(468): NCBI GI: 164425532 Blast Desc: NCU05597 [Neurospora crassa OR74A] gi|157070964|gb|EAA31323.2| [Neurospora crassa OR74A]
  misc_feature (6)..(468): NCBI GI: 4959716 Blast Desc: AF136235_1 ascus development protein 3 [Neurospora crassa]
  misc_feature (6)..(471): NCBI GI: 171678062 Blast Desc: protein product [Podospora anserina] gi|170937100|emb|CAP61758.1| protein product [Podospora anserina]
  misc_feature (3)..(501): NCBI GI: 46119635 Blast Desc: FG04783.1 [Gibberella zeae PH-1]
  misc_feature (29)..(343): NCBI GI: 116201695 Blast Desc: CHGG_08732 [Chaetomium globosum CBS 148.51] gi|88177250|gb|EAQ84718.1| CHGG_08732 [Chaetomium globosum CBS 148.51]
  misc_feature (14)..(468): NCBI GI: 119488376 Blast Desc: sugar transporter [Neosartorya fischeri NRRL 181] gi|119410849|gb|EAW20794.1| sugar transporter [Neosartorya fischeri NRRL 181]
  misc_feature (9)..(493): NCBI GI: 169763550 Blast Desc: [Aspergillus oryzae RIB40] gi|83770703|dbj|BAE60836.1| protein product [Aspergillus oryzae]
  misc_feature (13)..(468): NCBI GI: 169784257 Blast Desc: [Aspergillus oryzae RIB40] gi|83775335|dbj|BAE65457.1| protein product [Aspergillus oryzae]
  misc_feature (14)..(472): NCBI GI: 189198281 Blast Desc: sugar carrier protein A [Pyrenophora tritici-repentis Pt-1C-BFP] gi|187981426|gb|EDU48052.1| sugar carrier protein A [Pyrenophora tritici-repentis Pt-1C-BFP]
  misc_feature (307)..(501): NCBI GI: 261361118 Blast Desc: ascus development protein [Verticillium albo-atrum VaMs.102]
MAALPKAVVRLHFLCVFFAIGSFVWGYNVGILSSVLVHPGFTFALEFPTSSQKGVITSIYYLGTWTSYVFLAHPASDYLGRRYAALVGIIVVAVGTAIQCDARPPAAYAMMIIGRIVSGVGVGLVSTSVPLYQSEVAPAGKRGKYVVLNHVGFVAGLAVGFWVGYAVTFWERTPWNDYFGWRFSLLVIYIPIIIFGLGLPFLPETPRWLTENAYHDRALKSLFWLREGSFTPELIQAELVTIRDDITTHQALGLTWRSLFTSPTLFRRLWRASLLQFMAQMCGATAMKYYLPTLLQKLGLSTRIALMAGGIESTLKIGMTVVEMLLIDRLGRRVTLVSGTAAMGFAMLLNGALGQAYPNNTNRAADITCVVFIFIYALGYSMGFGPAAWVYGSEIFPTALRARGLSFSASGGAIGSIIVAQVWPVGIDAIGSNIYFFFMAINLICIPIILLFYPETKGRALEDMDALFEHHARRGRSRRRDEQIDDADEAGVPKIVQPSTQGQTIAVP

SEQ ID NO: 27198 - DNA, 1186 bp, Muscodor strobelii
  misc_feature: SGI EST ID NO. CUFF.64171.0
  misc_feature: Variant of the nucleotide sequence at SEQ ID NO 27196
taggaatcctctcctcagtcctagtccacccaggcttcacattcgcccttgaattcccaacatcatctcaaaagggggtaataacatcgatatactacctcggaacatggacatcctatgtcttcctcgcgcacccagcaagcgactacctggggcgacgatacgcggctctagtaggaatcatcgtcgtcgcagtaggcactgcgatacaatgtgatgctagaccacctgctgcgtacgctatgatgataatcggaaggattgtctcaggtgttggagtcgggttggtttccacttctgtgccgctttatcaaaggtttgtcttctttccgcatacgagcttcatagccttagggatgtatcacttagctaactcccctcacagcgaagtagcaccagcaggcaaaagaggaaaatacgtagtcctcaaccacgtgggattcgtcgcggggctcgcagtaggcttctgggtaggctacgccgtaacattctgggagagaacaccatggaacgactacttcggctggcgattctcactcctcgtgatatacatcccgataataatctttgggctcggactgcccttccttccagagacgtacgtctacactcctcatatttccaagcccccagcaagatctccacgatagtagctaacatgcacgcagcccccgctggctaacagaaaacgcataccacgaccgagccctaaaatccctcttctggctgcgcgaggggagtttcacccctgaactcatccaagccgaactagtcacaatccgagacgacataaccacccaccaagcactcggcctaacctggcgaagtctcttcacctcgccaacactcttccgccgcctatggcgagcatccctcctgcaattcatggcgcagatgtgcggcgcaacagcgatgaaatactatctacctactcttctccaaaaattagggctctcgacacgaatcgcgttgatggcgggcggtatcgagtctacgctgaagattggtatgacagttgtggaaatgctgctcattgatcgactgggacgacgagtgacgctcgtgagtgggacggctgctatggggtttgctatgttgttgaatggcgcgctaggccaagcatacccgaacaacacaaatcgcgccgcagatattacctgcgtagtgttcatcttcatctatgcct

SEQ ID NO: 27199 - DNA, 1887 bp, Muscodor strobelii
  misc_feature: SGI cDNA ID NO. 569314
  misc_feature: Encodes the peptide sequence at SEQ ID NO 27200
atggctgcacttgacacgccttggatgacacacatgtcgactcccaagtccgcagcccgcaccgacgtcgatagtcccaacccctccactatcgatctctccgccccgccctcctacgctcctcccacctacgcatccttctcgcccgccgcaaacctctcctcctcctctgccaacaagcgccgatcgaccattctcgttcaccagaagtcaccactactgctagccacaccgccgcagatcactcgagccctcgcctacagccatcccttcctcctccctctcaacaagctcgtcgggctcttaagctggacgaccggagacccatgggagagctttctactgcttgctagcttctgggcagtggtgctttacggcgatgccatcacacgcttcgccgggcccattgtggtcgtcgccggcataatagccggcatgtacgcccgacggtacagccccctatctagtagcggctgggccgaacatcccaccgtcgcaaacgcaaaagacaagaataaagggaaagcggccactacgggcagtaatgcgacaggccagggacaccaaagaaatgcgagcgaagttacgagcacgcggcatcagaagactctggatgagattgtagatacgctcaagatctttacatcacgatgtaacatcttacttgagccattacttgagatgacagatttcttatctacgcaacggaccgctacgagcgccacggtgcgaccggctcttacgacactgtttgtacggatcatggcggtaaccccgatatggattgcgttaacgctcccgccgttacgcatcatcactacaaaacgaattgtcctcatcttcgggactctagtcctgagctggcactgtaaagtgtgtcgcgtctcgagaacattactatggagaagcgctacgatccggaaactcgctagagccgtaaccgggttgcagttcgaagggccggttaagaaagataaagaaggcgccaatgggaaagctgctgcgggcgcagcgaagacgaaacaggcgcatgaggcggccaagttatcctcctccgcgcttaccgaagctctgaaacgcagtcgttcaggtcttaaagactcgggtgtcaggtttacgtttatactctatgagaatcagagacggtggttaggactgggatggacgaatagtctgtttgcttatgagcggtcggcttggacggatgagcagaataatgcggttccgccgaaagatgagttcgagttacccgaagttgaagatgggagggcgaaatggcggtgggtggagggtagcaagtggagggtggatggtgtgcccgatatggaggagtcggagtttgatgcggaggcgggaaagatggggtggattttttatgataataagtggcagaatggccgaagaggagcggatggctggggcagatggacgaggagacggaaatggtatcgcgacgcagagttggtggaagtatcagaggaagagttgcacgaacccgcgccttctccaccacctccagctcttcccgcgagacctcaacccacgacttcggtaactacaacttccgcctcgttcgataaatcagaccccgctatcttatccacgtcaaatccgtcgacggtaaagagcgatgatgacgcggcgtctattctaagtacatcttcaaaatccgcgagattcaaattacctaccccatctttaaggaggaggccgacgaaccagtctcagcgcggtaggagagcgagcgagacggcgagtttgaagagtttgaggagtaatgaggaagatagcacgcttgatcctgcacttgagctagagatacatggacatagacgggatcaggaacagtgggggattggcgatgaggcgcagatgggccttgagtga

SEQ ID NO: 27200 - protein, 628 aa, Muscodor strobelii
  misc_feature: SGI Peptide ID NO. 569314
  misc_feature (68)..(484): Pfam Id: PF06398 Pfam Desc: Integral peroxisomal membrane peroxin
  misc_feature (376)..(484): Pfam Id: PF06398 Pfam Desc: Integral peroxisomal membrane peroxin
  misc_feature (68)..(151): Pfam Id: PF06398 Pfam Desc: Integral peroxisomal membrane peroxin
  misc_feature (5)..(628): NCBI GI: 46127955 Blast Desc: FG08355.1 [Gibberella zeae PH-1]
  misc_feature (34)..(628): NCBI GI: 256733915 Blast Desc: NECHADRAFT_77532 [Nectria haematococca mpVI 77-13-4]
  misc_feature (12)..(628): NCBI GI: 171681746 Blast Desc: protein product [Podospora anserina] gi|170940832|emb|CAP66481.1| protein product [Podospora anserina]
  misc_feature (1)..(628): NCBI GI: 116201775 Blast Desc: CHGG_08772 [Chaetomium globosum CBS 148.51] gi|88177290|gb|EAQ84758.1| CHGG_08772 [Chaetomium globosum CBS 148.51]
  misc_feature (1)..(628): NCBI GI: 156057777 Blast Desc: SS1G_04620 [Sclerotinia sclerotiorum 1980] gi|154702405|gb|EDO02144.1| SS1G_04620 [Sclerotinia sclerotiorum 1980]
  misc_feature (1)..(628): NCBI GI: 154323522 Blast Desc: BC1G_00160 [Botryotinia fuckeliana B05.10] gi|150842389|gb|EDN17582.1| BC1G_00160 [Botryotinia fuckeliana B05.10]
  misc_feature (5)..(601): NCBI GI: 189204446 Blast Desc: peroxisomal membrane protein PEX31 [Pyrenophora tritici-repentis Pt-1C-BFP] gi|187985657|gb|EDU51145.1| peroxisomal membrane protein PEX31 [Pyrenophora tritici-repentis
  misc_feature (41)..(509): NCBI GI: 225556166 Blast Desc: integral peroxisomal membrane protein [Ajellomyces capsulatus G186AR]
  misc_feature (41)..(509): NCBI GI: 240276755 Blast Desc: integral peroxisomal membrane protein [Ajellomyces capsulatus H143]
  misc_feature (40)..(517): NCBI GI: 239615140 Blast Desc: integral peroxisomal membrane protein [Ajellomyces dermatitidis ER-3]
MAALDTPWMTHMSTPKSAARTDVDSPNPSTIDLSAPPSYAPPTYASFSPAANLSSSSANKRRSTILVHQKSPLLLATPPQITRALAYSHPFLLPLNKLVGLLSWTTGDPWESFLLLASFWAVVLYGDAITRFAGPIVVVAGIIAGMYARRYSPLSSSGWAEHPTVANAKDKNKGKAATTGSNATGQGHQRNASEVTSTRHQKTLDEIVDTLKIFTSRCNILLEPLLEMTDFLSTQRTATSATVRPALTTLFVRIMAVTPIWIALTLPPLRIITTKRIVLIFGTLVLSWHCKVCRVSRTLLWRSATIRKLARAVTGLQFEGPVKKDKEGANGKAAAGAAKTKQAHEAAKLSSSALTEALKRSRSGLKDSGVRFTFILYENQRRWLGLGWTNSLFAYERSAWTDEQNNAVPPKDEFELPEVEDGRAKWRWVEGSKWRVDGVPDMEESEFDAEAGKMGWIFYDNKWQNGRRGADGWGRWTRRRKWYRDAELVEVSEEELHEPAPSPPPPALPARPQPTTSVTTTSASFDKSDPAILSTSNPSTVKSDDDAASILSTSSKSARFKLPTPSLRRRPTNQSQRGRRASETASLKSLRSNEEDSTLDPALELEIHGHRRDQEQWGIGDEAQMGLE

SEQ ID NO: 27201 - DNA, 3082 bp, Muscodor strobelii
  misc_feature: SGI EST ID NO. CUFF.64305.1
  misc_feature: Variant of the nucleotide sequence at SEQ ID NO 27199
tgaatcgtcaatagatgcgatgattacaagtggatttaaatcctttcaatgagattatgtaatgtgtaagactgcgactcacgagcttgtagactcccatctgccatctctgagccacgagcaacggcttctgctttctgcttttctgatgtttcccgttccttctgtttcttgtaccaccactttggctgtcgcatgcacatgacgtcggtcgccaaatgacaaggcagtctacctgagcgacggcagcatcagtggtctacggtgtgagcagaccgtcgcagcccggggtttatggtccttgcgtgttcatcatcgccatagttgagtaatctttgctcatagctgcaagccggaagcttagggaggtgcctgatcccgtcccgtcccgcccgacgtcgtcttctctccctctatccaactccctccaggctccagcccttgatggctgcacttgtaagtctccctaacagtacagtctcgttcaattgcatttcatgatacccaattttattgccctttcgaattcatcagactctgtgagccgtgctcatcactgcatccgacccctatctgggagaggatcgatcgcttgtcagagccgcacagccctggcctcggcatcatcgtcatcaccatcctcactaccatcctcaccaatacctgctgcatctacacacccgccccgccacaattattgtaatcctttcacatactgcagacagacagactgccatgcgataactcaattctcacgcgacataggacacgccttggatgacacacatgtcgactcccaagtccgcagcccgcaccgacgtcgatagtcccaacccctccactatcgatctctccgccccgccctcctacgctcctcccacctacgcatccttctcgcccgccgcaaacctctcctcctcctctgccaacaagcgccgatcgaccattctcgttcaccagaagtcaccactactgctagccacaccgccgcagatcactcgagccctcgcctacagccatcccttcctcctccctctcaacaagctcgtcgggctcttaagctggacgaccggagacccatgggagagctttctactgcttgctagcttctgggcagtggtgctttacggcgatgccatcacacgcttcgccgggcccattgtggtcgtcgccggcataatagccggcatgtacgcccgacggtacagccccctatctagtagcggctgggccgaacatcccaccgtcgcaaacgcaaaagacaagaataaagggaaagcggccactacgggcagtaatgcgacaggccagggacaccaaagaaatgcgagcgaagttacgagcacgcggcatcagaagactctggatgagattgtagatacgctcaagatctttacatcacgatgtaacatcttacttgagccattacttgagatgacagatttcttatctacgcaacggaccgctacgagcgccacggtgcgaccggctcttacgacactgtttgtacggatcatggcggtaaccccgatatggattgcgttaacgctcccgccgttacgcatcatcactacaaaacgaattgtcctcatcttcgggactctagtcctgagctggcactgtaaagtgtgtcgcgtctcgagaacattactatggagaagcgctacgatccggaaactcgctagagccgtaaccgggttgcagttcgaagggccggttaagaaagataaagaaggcgccaatgggaaagctgctgcgggcgcagcgaagacgaaacaggcgcatgaggcggccaagttatcctcctccgcgcttaccgaagctctgaaacgcagtcgttcaggtcttaaagactcgggtgtcaggtttacgtttatactctatgagaatcagagacggtggttaggactgggatggacgaatagtctgtttgcttatgagcggtcggcttggacggatgagcagaataatgcggttccgccgaaagatgagttcgagttacccgaagttgaagatgggagggcgaaatggcggtgggtggagggtagcaagtggagggtggatggtgtgcccgatatggaggagtcggagtttgatgcggaggcgggaaagatggggtggattttttatgataataagtggcagaatggccgaagaggagcggatggctggggcagatggacgaggagacggaaatggtatcgcgacgcagagttggtggaagtatcagaggaagagttgcacgaacccgcgccttctccaccacctccagctcttcccgcgagacctcaacccacgacttcggtaactacaacttccgcctcgttcgataaatcagaccccgctatcttatccacgtcaaatccgtcgacggtaaagagcgatgatgacgcggcgtctattctaagtacatcttcaaaatccgcgagattcaaattacctaccccatctttaaggaggaggccgacgaaccagtctcagcgcggtaggagagcgagcgagacggcgagtttgaagagtttgaggagtaatgaggaagatagcacgcttgatcctgcacttgagctagagatacatggacatagacgggatcaggaacagtgggggattggcgatgaggcgcagatgggccttgagtgattcattcgcaatttatttggtaggaagtgtgctacaagactacaagaacagttcgtttcggaaggtgagaagaggataaacggtgtattactgggcgtgggtttcttagggtacattggagcatatttggcgtctggtctggtctggctggtagataccaacttattgtgccttaggaactttgaaatgactgttatgcttaatcactttgaagtcatactttctttgtattcacggcacttaacttaagttttctagtctgtttcgcggacgtctatggtacagcaatcgtttgaccctgggtactcggttgtacaatcttaggaacacccgcctcatctgcatcatcaatctgttcgtctcttcttcttgatcttcctcttctggcgtggtgctcaaaaagtgcgtccatatcctctagcgccctgcctttcgtctctgg

SEQ ID NO: 27202 - DNA, 2775 bp, Muscodor strobelii
  misc_feature: SGI cDNA ID NO. 569315
  misc_feature: Encodes the peptide sequence at SEQ ID NO 27203
atggaggactcacgagcccaacgggccaatgaaaactggcagaattggcaggagcttaaacgtattaggcaaaagcaatacatcgacgaaattgagcaccttatcaaagaatggggtgatgaagtcaaatcacagcagaaggaattccttcaggactatgagaagaaatggaatatagctcctgccgacttcgacggattcctcacaaagtccagcaacaacttccacgaagctgaattgcaacgtgtcactgatggcatcattaaacgcatccgctcagcaggagatgcccactgtcaagggcagaagggtattcagcttgaatatagtcgagctcttaatcctaatccttacatcaacaacgggcagctatctaccgccactggcacaatccctcatccactcatgcttagccctggtgttgcgagcaccccgatctcgcaatcgcctaaaacaaaagcgactgaatctcactctggccggggtcctaaatcactaccgaccccgaccccgacaatctcgtctacagcagatgagtacagaagaccaaacaacgcgccgatcaagtttgaggacgtattcaagaatggccaggcgcagcaccggattgttgaggcttatcctggcgagtggtacatcttgaaatgcgatgaacatcagaagttctttataggagagcggcctatacaaggcgcggctaagcatcttgacagtctcgctcacgactttataagtccacgcaatcgggacagagccctgatgctgttgggtcataaggtcatcggttgtgaccacgacttggccgcgcttaacaattccttactgccgtctaaaggaatcccaacgaaacccagacccatcggtatcgatggacgctcctcaggggctcccaccaaagccatcatggagactcccgacagtgcggaagagtcaggcgacgagcctccttctgagtggatcaataagactgaggggctaatcaccaagcccaagacatttcacatctattgggcctcttggaaagagaactatgacgatgatccgaaactctggcctgtcatggttcttggctgggacgatcagacatcgggaaagctgcaaggcgatctcgtgggcactggcttgttggatgacacgcgtcctagatgttatagattcaagtcaaacgcgattgttggatgggcgaaagggtttgaggatgatggtcccagggtcacgcagaggaagtttcctgtcatgttctttgatgaggaacagagcgtcgcttgggtttcgccgcgcgacctccgcaaatttccgatccacatggacaatccaccccatcaacacgatcatccagtgaatgccgcgcgccgatggattcttaagaaagacggattcgagtcgtgggacgagtttgaaaaggcttatgatttgaaacaagcagagaaacaaagcactaggagccgagatgaactatcttccgttgatcgtgcgcagctagcaaaaggcacgacgtcgagccctaaggcaagtaccgaagttaagacgatccacggaagtttcccgtcgagtaatagcgaggaggaagtccaacgactgttgcagacagctggtgagataccaggcgatgacgattatcaagactctgatgaagacacggaggacagtaccttgtcgacggaaatggcagaatgggacgaggcacaagacaacaacagaccttggacattctatggcttacgcggcatgcatgacgaaacaccgacggctcagaacgcatcaccgcggaataaggccgagagccctgaaggcgtggacgaagacgacttatccggtcccttgaaagcggccatggcctcggctcgcaatctttctgcacgtgcgtgttcgaagcaaatggccgccgtcgatacgagcgacgatgacgctcccttggcgacccggaagaacgcgtcgtcggcacgccgtgcgggatctccattccggaaccaatcacgagatcgggacgttcctgctggggattcaactaaaaagatccgagggggtaaacgtactccaacttctcatgacattcgtcaacaactagccaagaaagcccgaatagcctcaggaaatacagtctcactgactccaagcgatccaaccaagatgacgccaagcgctagtaaaattccagatcgcgttctggaacaaaagggggtaaaactcagcgatagcccatcggacggagcgcagggagaggagactccgaaaattatcaaagtcgacacaacggcagagtctgaaaagcctactggagattgctcaaatacgataaatacgaccccaggagacagcaatccacagatagcttcgagcgccggagcagtaatcagagacagcccagtcgagccgacattcacaccaagactgcccttaggaatgccactgtttgaggtagctagatacgagaaggggcctgtacaatggactcagaaggggcttggatcactgctgggacttcacccaagcttcgacaaccaagcacttggcacagtaggaggtgatctgccggtgcagattgtcatccgaccgagatccgttaaggagatctcgggcaagcaaatacctggagcaaatggcaattttgagctgacgctaatcagtgacaatgagagcgagcccaacgtgaaactgatcttcgaccgaagcgagacaaacaagaaatttgtcgatccgcctgtcatccaagtccgaaagtttcggcggtggctagagagcctcaacaagagcatcaagacttcgggaggatga

SEQ ID NO: 27203 - protein, 924 aa, Muscodor strobelii
  misc_feature: SGI Peptide ID NO. 569315
  misc_feature (119)..(432): NCBI GI: 164425549 Blast Desc: NCU05565 [Neurospora crassa OR74A] gi|157070971|gb|EAA31291.2| [Neurospora crassa OR74A]
  misc_feature (188)..(456): NCBI GI: 261361082 Blast Desc: conserved [Verticillium albo-atrum VaMs.102]
  misc_feature (142)..(432): NCBI GI: 46139459 Blast Desc: FG11244.1 [Gibberella zeae PH-1]
  misc_feature (190)..(429): NCBI GI: 256724176 Blast Desc: [Nectria haematococca mpVI 77-13-4]
  misc_feature (188)..(424): NCBI GI: 116201777 Blast Desc: CHGG_08773 [Chaetomium globosum CBS 148.51] gi|88177291|gb|EAQ84759.1| CHGG_08773 [Chaetomium globosum CBS 148.51]
  misc_feature (132)..(415): NCBI GI: 256728205 Blast Desc: NECHADRAFT_87755 [Nectria haematococca mpVI 77-13-4]
  misc_feature (209)..(434): NCBI GI: 256728406 Blast Desc: [Nectria haematococca mpVI 77-13-4]
  misc_feature (188)..(479): NCBI GI: 256722813 Blast Desc: NECHADRAFT_87123 [Nectria haematococca mpVI 77-13-4]
  misc_feature (176)..(403): NCBI GI: 171681744 Blast Desc: protein product [Podospora anserina] gi|170940831|emb|CAP66480.1| protein product [Podospora anserina]
  misc_feature (209)..(432): NCBI GI: 145607966 Blast Desc: MGG_09784 [Magnaporthe grisea 70-15] gi|145015433|gb|EDJ99969.1| MGG_09784 [Magnaporthe grisea 70-15]
MEDSRAQRANENWQNWQELKRIRQKQYIDEIEHLIKEWGDEVKSQQKEFLQDYEKKWNIAPADFDGFLTKSSNNFHEAELQRVTDGIIKRIRSAGDAHCQGQKGIQLEYSRALNPNPYINNGQLSTATGTIPHPLMLSPGVASTPISQSPKTKATESHSGRGPKSLPTPTPTISSTADEYRRPNNAPIKFEDVFKNGQAQHRIVEAYPGEWYILKCDEHQKFFIGERPIQGAAKHLDSLAHDFISPRNRDRALMLLGHKVIGCDHDLAALNNSLLPSKGIPTKPRPIGIDGRSSGAPTKAIMETPDSAEESGDEPPSEWINKTEGLITKPKTFHIYWASWKENYDDDPKLWPVMVLGWDDQTSGKLQGDLVGTGLLDDTRPRCYRFKSNAIVGWAKGFEDDGPRVTQRKFPVMFFDEEQSVAWVSPRDLRKFPIHMDNPPHQHDHPVNAARRWILKKDGFESWDEFEKAYDLKQAEKQSTRSRDELSSVDRAQLAKGTTSSPKASTEVKTIHGSFPSSNSEEEVQRLLQTAGEIPGDDDYQDSDEDTEDSTLSTEMAEWDEAQDNNRPWTFYGLRGMHDETPTAQNASPRNKAESPEGVDEDDLSGPLKAAMASARNLSARACSKQMAAVDTSDDDAPLATRKNASSARRAGSPFRNQSRDRDVPAGDSTKKIRGGKRTPTSHDIRQQLAKKARIASGNTVSLTPSDPTKMTPSASKIPDRVLEQKGVKLSDSPSDGAQGEETPKIIKVDTTAESEKPTGDCSNTINTTPGDSNPQIASSAGAVIRDSPVEPTFTPRLPLGMPLFEVARYEKGPVQWTQKGLGSLLGLHPSFDNQALGTVGGDLPVQIVIRPRSVKEISGKQIPGANGNFELTLISDNESEPNVKLIFDRSETNKKFVDPPVIQVRKFRRWLESLNKSIKTSGG

SEQ ID NO: 27204 - DNA, 2885 bp, Muscodor strobelii
  misc_feature: SGI EST ID NO. CUFF.64180.0
  misc_feature: Variant of the nucleotide sequence at SEQ ID NO 27202
gaatatagctcctgccgacttcgacggattcctcacaaagtccagcaacaacttccacgaagctgaattgcaacgtgtcactgatggcatcattaaacgcatccgctcagcaggagatgcccactgtcaagggcagaagggtattcagcttgaatatagtcgagctcttaatcctaatccttacatcaacaacgggcagctatctaccgccactggcacaatccctcatccactcatgcttagccctggtgttgcgagcaccccgatctcgcaatcgcctaaaacaaaagcgactgaatctcactctggccggggtcctaaatcactaccgaccccgaccccgacaatctcgtctacagcagatgagtacagaagaccaaacaacgcgccgatcaagtttgaggacgtattcaagaatggccaggcgcagcaccggattgttgaggcttatcctggcgagtggtacatcttgaaatgcgatgaacatcagaagttctttataggagagcggcctatacaaggcgcggctaagcatcttgacagtctcgctcacgactttataagtccacgcaatcgggacagagccctgatgctgttgggtcataaggtcatcggttgtgaccacgacttggccgcgcttaacaattccttactgccgtctaaaggaatcccaacgaaacccagacccatcggtatcgatggacgctcctcaggggctcccaccaaagccatcatggagactcccgacagtgcggaagagtcaggcgacgagcctccttctgagtggatcaataagactgaggggctaatcaccaagcccaagacatttcacatctattgggcctcttggaaagagaactatgacgatgatccgaaactctggcctgtcatggttcttggctgggacgatcagacatcgggaaagctgcaaggcgatctcgtgggcactggcttgttggatgacacgcgtcctagatgttatagattcaagtcaaacgcgattgttggatgggcgaaagggtttgaggatgatggtcccagggtcacgcagaggaagtttcctgtcatgttctttgatgaggaacagagcgtcgcttgggtttcgccgcgcgacctccgcaaatttccgatccacatggacaatccaccccatcaacacgatcatccagtgaatgccgcgcgccgatggattcttaagaaagacggattcgagtcgtgggacgagtttgaaaaggcttatgatttgaaacaagcagagaaacaaagcactaggagccgagatgaactatcttccgttgatcgtgcgcagctagcaaaaggcacgacgtcgagccctaaggcaagtaccgaagttaagacgatccacggaagtttcccgtcgagtaatagcgaggaggaagtccaacgactgttgcagacagctggtgagataccaggcgatgacgattatcaagactctgatgaagacacggaggacagtaccttgtcgacggaaatggcagaatgggacgaggcacaagacaacaacagaccttggacattctatggcttacgcggcatgcatgacgaaacaccgacggctcagaacgcatcaccgcggaataaggccgagagccctgaaggcgtggacgaagacgacttatccggtcccttgaaagcggccatggcctcggctcgcaatctttctgcacgtgcgtgttcgaagcaaatggccgccgtcgatacgagcgacgatgacgctcccttggcgacccggaagaacgcgtcgtcggcacgccgtgcgggatctccattccggaaccaatcacgagatcgggacgttcctgctggggattcaactaaaaagatccgagggggtaaacgtactccaacttctcatgacattcgtcaacaactagccaagaaagcccgaatagcctcaggaaatacagtctcactgactccaagcgatccaaccaagatgacgccaagcgctagtaaaattccagatcgcgttctggaacaaaagggggtaaaactcagcgatagcccatcggacggagcgcagggagaggagactccgaaaattatcaaagtcgacacaacggcagagtctgaaaagcctactggagattgctcaaatacgataaatacgaccccaggagacagcaatccacagatagcttcgagcgccggagcagtaatcagagacagcccagtcgagccgacattcacaccaagactgcccttaggaatgccactgtttgaggtagctagatacgagaaggggcctgtacaatggactcagaaggggcttggatcactgctgggacttcacccaagcttcgacaaccaagcacttggcacagtaggaggtgatctgccggtgcagattgtcatccgaccgagatccgttaaggagatctcgggcaagcaaatacctggagcaaatggcaattttgagctgacgctaatcagtgacaatgagagcgagcccaacgtgaaactgatcttcgaccgaagcgagacaaacaagaaatttgtcgatccgcctgtcatccaagtccgaaagtttcggcggtggctagagagcctcaacaagagcatcaagacttcgggaggatgaaataaggcactcgacatgatcattttgacggggttaggaagaaaaacaccatggctgacccagagtgtttgagtaccggtccatgtaggactcccatcgtgtataatgtacaatagtaggcgtgccttttagagtcttttaagctcgcgctgtgggctttgagatttcgttgacttaatggttgggtcaacaactcgatttgagcagggaaacgatgatatgatagcaataccctttgttagagtatatgattaggcaagaaaaataaagtgcgttgtcc

SEQ ID NO: 27205 - DNA, 2016 bp, Muscodor strobelii
  misc_feature: SGI cDNA ID NO. 569316
  misc_feature: Encodes the peptide sequence at SEQ ID NO 27206
atgctgttgggtcataaggtcatcggttgtgaccacgacttggccgcgcttaacaattccttactgccgtctaaaggaatcccaacgaaacccagacccatcggtatcgatggacgctcctcaggggctcccaccaaagccatcatggagactcccgacagtgcggaagagtcaggcgacgagcctccttctgagtggatcaataagactgaggggctaatcaccaagcccaagacatttcacatctattgggcctcttggaaagagaactatgacgatgatccgaaactctggcctgtcatggttcttggctgggacgatcagacatcgggaaagctgcaaggcgatctcgtgggcactggcttgttggatgacacgcgtcctagatgttatagattcaagtcaaacgcgattgttggatgggcgaaagggtttgaggatgatggtcccagggtcacgcagaggaagtttcctgtcatgttctttgatgaggaacagagcgtcgcttgggtttcgccgcgcgacctccgcaaatttccgatccacatggacaatccaccccatcaacacgatcatccagtgaatgccgcgcgccgatggattcttaagaaagacggattcgagtcgtgggacgagtttgaaaaggcttatgatttgaaacaagcagagaaacaaagcactaggagccgagatgaactatcttccgttgatcgtgcgcagctagcaaaaggcacgacgtcgagccctaaggcaagtaccgaagttaagacgatccacggaagtttcccgtcgagtaatagcgaggaggaagtccaacgactgttgcagacagctggtgagataccaggcgatgacgattatcaagactctgatgaagacacggaggacagtaccttgtcgacggaaatggcagaatgggacgaggcacaagacaacaacagaccttggacattctatggcttacgcggcatgcatgacgaaacaccgacggctcagaacgcatcaccgcggaataaggccgagagccctgaaggcgtggacgaagacgacttatccggtcccttgaaagcggccatggcctcggctcgcaatctttctgcacgtgcgtgttcgaagcaaatggccgccgtcgatacgagcgacgatgacgctcccttggcgacccggaagaacgcgtcgtcggcacgccgtgcgggatctccattccggaaccaatcacgagatcgggacgttcctgctggggattcaactaaaaagatccgagggggtaaacgtactccaacttctcatgacattcgtcaacaactagccaagaaagcccgaatagcctcaggaaatacagtctcactgactccaagcgatccaaccaagatgacgccaagcgctagtaaaattccagatcgcgttctggaacaaaagggggtaaaactcagcgatagcccatcggacggagcgcagggagaggagactccgaaaattatcaaagtcgacacaacggcagagtctgaaaagcctactggagattgctcaaatacgataaatacgaccccaggagacagcaatccacagatagcttcgagcgccggagcagtaatcagagacagcccagtcgagccgacattcacaccaagactgcccttaggaatgccactgtttgaggtagctagatacgagaaggggcctgtacaatggactcagaaggggcttggatcactgctgggacttcacccaagcttcgacaaccaagcacttggcacagtaggaggtgatctgccggtgcagattgtcatccgaccgagatccgttaaggagatctcgggcaagcaaatacctggagcaaatggcaattttgagctgacgctaatcagtgacaatgagagcgagcccaacgtgaaactgatcttcgaccgaagcgagacaaacaagaaatttgtcgatccgcctgtcatccaagtccgaaagtttcggcggtggctagagagcctcaacaagagcatcaagacttcgggaggatga

SEQ ID NO: 27206 - protein, 671 aa, Muscodor strobelii
  misc_feature: SGI Peptide ID NO. 569316
  misc_feature (73)..(203): NCBI GI: 261361082 Blast Desc: conserved [Verticillium albo-atrum VaMs.102]
  misc_feature (63)..(179): NCBI GI: 164425549 Blast Desc: NCU05565 [Neurospora crassa OR74A] gi|157070971|gb|EAA31291.2| [Neurospora crassa OR74A]
  misc_feature (2)..(176): NCBI GI: 256724176 Blast Desc: [Nectria haematococca mpVI 77-13-4]
  misc_feature (3)..(181): NCBI GI: 256728406 Blast Desc: [Nectria haematococca mpVI 77-13-4]
  misc_feature (98)..(171): NCBI GI: 116201777 Blast Desc: CHGG_08773 [Chaetomium globosum CBS 148.51] gi|88177291|gb|EAQ84759.1| CHGG_08773 [Chaetomium globosum CBS 148.51]
  misc_feature (69)..(179): NCBI GI: 46114598 Blast Desc: FG03141.1 [Gibberella zeae PH-1]
  misc_feature (3)..(224): NCBI GI: 256722813 Blast Desc: NECHADRAFT_87123 [Nectria haematococca mpVI 77-13-4]
  misc_feature (3)..(179): NCBI GI: 46139459 Blast Desc: FG11244.1 [Gibberella zeae PH-1]
  misc_feature (3)..(162): NCBI GI: 256728205 Blast Desc: NECHADRAFT_87755 [Nectria haematococca mpVI 77-13-4]
  misc_feature (97)..(179): NCBI GI: 39967671 Blast Desc: [Magnaporthe grisea 70-15] gi|145012880|gb|EDJ97521.1| [Magnaporthe grisea 70-15]
MLLGHKVIGCDHDLAALNNSLLPSKGIPTKPRPIGIDGRSSGAPTKAIMETPDSAEESGDEPPSEWINKTEGLITKPKTFHIYWASWKENYDDDPKLWPVMVLGWDDQTSGKLQGDLVGTGLLDDTRPRCYRFKSNAIVGWAKGFEDDGPRVTQRKFPVMFFDEEQSVAWVSPRDLRKFPIHMDNPPHQHDHPVNAARRWILKKDGFESWDEFEKAYDLKQAEKQSTRSRDELSSVDRAQLAKGTTSSPKASTEVKTIHGSFPSSNSEEEVQRLLQTAGEIPGDDDYQDSDEDTEDSTLSTEMAEWDEAQDNNRPWTFYGLRGMHDETPTAQNASPRNKAESPEGVDEDDLSGPLKAAMASARNLSARACSKQMAAVDTSDDDAPLATRKNASSARRAGSPFRNQSRDRDVPAGDSTKKIRGGKRTPTSHDIRQQLAKKARIASGNTVSLTPSDPTKMTPSASKIPDRVLEQKGVKLSDSPSDGAQGEETPKIIKVDTTAESEKPTGDCSNTINTTPGDSNPQIASSAGAVIRDSPVEPTFTPRLPLGMPLFEVARYEKGPVQWTQKGLGSLLGLHPSFDNQALGTVGGDLPVQIVIRPRSVKEISGKQIPGANGNFELTLISDNESEPNVKLIFDRSETNKKFVDPPVIQVRKFRRWLESLNKSIKTSGG

SEQ ID NO: 27207 - DNA, 2885 bp, Muscodor strobelii; identical to SEQ ID NO: 27204
  misc_feature: SGI EST ID NO. CUFF.64180.0
  misc_feature: Variant of the nucleotide sequence at SEQ ID NO 27205

SEQ ID NO: 27208 - DNA, 1239 bp, Muscodor strobelii
  misc_feature: SGI cDNA ID NO. 569317
  misc_feature: Encodes the peptide sequence at SEQ ID NO 27209
atgtcgtctgccgtggccgtccctgcccgagagcctcttgttgtgctcgtgggacgctccaacgtggagcagtgggaagctagcattcgagaccatctcaaggtctaccatctggactacctccttgacgatgccactccctacagctcggtgcagagcccaaaatcctacgaactagatctagccatctcgttgatctgcgtctccgtcgcccagcccctgctagcatctgtcatcggttgggcgtctcgctttcatggtcatccccgcacgctttaccttgagcttatcaatgaggtcaatcgccgtgctctagtctatgccccggtccagtttcgttcgctcgtcaccctgcgcccgcgtaacccagaaagggccggctacgctccctttttcagcgaattcatcacgaccgcccgtgtgctggccgagaatggaactcgcatcgatggatttacagcagttggtatggtcgtcaactctgtccgcgaaagcgatcccgagtatgcagctgctctcgacaaacgctattccaacacttctgacggctttgctcgcttctccgccaatgtttactcatgtcaggagaactctaagaagtacatggcgaagtctacagtggctgctagtcgcacttgggcttcaccttcagctagccctcattcctcacccatccctagtcgtgtcgataaccatgactgtggttatgaaaaccacgatggcacacataagaacatctcatctacgaccacacacaccgtctcggatatgaccgacaatggcaacaatgatcacggggctggaggaaatgattccactaccaattatggccgggagcatgtcgccatgggcgacctgggcgcacggttggaggcccttgcacagttggaggcccttagctccgaagagcgcagttccacggaccatggctctattgagggacagactgataacgacaatggctgtgtgatgcctggtacctggggtcactctggcgacgacgcttctggcgatgaatacaactggggaaagactcccgatgccgcttcgaacgaagacactgctgcctatggttcattcgacgacaaccacgataactacgactcctggggcggacacgaccctactgacgacacctcttggtggcagactccaattgctcatgacgctactgagctagcgaagactacctccagcactactacccaggactgcggccgcagagatacgtggtggtag

SEQ ID NO: 27209 - protein, 412 aa, Muscodor strobelii
  misc_feature: SGI Peptide ID NO. 569317
MSSAVAVPAREPLVVLVGRSNVEQWEASIRDHLKVYHLDYLLDDATPYSSVQSPKSYELDLAISLICVSVAQPLLASVIGWASRFHGHPRTLYLELINEVNRRALVYAPVQFRSLVTLRPRNPERAGYAPFFSEFITTARVLAENGTRIDGFTAVGMVVNSVRESDPEYAAALDKRYSNTSDGFARFSANVYSCQENSKKYMAKSTVAASRTWASPSASPHSSPIPSRVDNHDCGYENHDGTHKNISSTTTHTVSDMTDNGNNDHGAGGNDSTTNYGREHVAMGDLGARLEALAQLEALSSEERSSTDHGSIEGQTDNDNGCVMPGTWGHSGDDASGDEYNWGKTPDAASNEDTAAYGSFDDNHDNYDSWGGHDPTDDTSWWQTPIAHDATELAKTTSSTTTQDCGRRDTWW

SEQ ID NO: 27210 - DNA, 2219 bp, Muscodor strobelii
  misc_feature: SGI EST ID NO. CUFF.64196.1
  misc_feature: Variant of the nucleotide sequence at SEQ ID NO 27208
ccgggagcatgtcgccatgggcgacctgggcgcacggttggaggcccttgcacagttggaggcccttagctccgaagagcgcagttccacggaccatggctctattgagggacagactgataacgacaatggctgtgtgatgcctggtacctggggtcactctggcgacgacgcttctggcgatgaatacaactggggaaagactcccgatgccgcttcgaacgaagacactgctgcctatggttcattcgacgacaaccacgataactacgactcctggggcggacacgaccctactgacgacacctcttggtggcagactccaattgctcatgacgctactgagctagcgaagactacctccagcactactacccaggactgcggccgcagagatacgtggtggtagtttctgataatgacactagcatatatggacccagatgagtaagtgtatattttactcgatgcttgcggactacgaactgacaaaagctaggcaggcagatcggcttccatattaaagtgtgatacttgcgatttttccttttctcgctttcctacctacagaatgttcactgaacaagaccgaacctcgggcatcttgcatgccatctgcgcgaagatacagggatttcagtactctcggactaggtagtgtcaggcgacattacctccgcgagatcctcgataggtatctcgaccagcagggtgacacgacatcgagactctacttcattcgaggttaccaaacgaaagagaagccccaacaaaatcaacaaacaagaaaaacaaaacagtgcgcgaaggggaagaatgacatgcaaatcagataatgacagaaaattcccgaaaaacaaagaggactgatggcaaggtgcaggagtataccagtaccaatctcactgatgcataggagcaagagagcagggcagggtctctaatgcaaggtcatagcaccggactcagtctctattccatcccgatagagccataggcataggtcctgacggcatttccatagttgaattcacgatgatttcatgaaatagcatgctcccatgagagtgattcaacgtcgctacgagattccagtgacgttgatgttctgaatactgagctaaagcacttatgatgcgcctaggcgctaatttggtagtgacccaagcattgtaagttgtgtgatgagaaaaactgcacggaacttcgtctttgctttttttttttgcccgaagtgggccacaacattagctgtgcatcgagagcgcggacttagttcggactcgaggtagagtttgtcattccaatgcttcttcccgatctagtgggacattcttggatgtcgatgttagttcaaggttgtagaaatactccggttacactactgtgctgagtgccacgctctgcattcccaagttccaagttgtgcggatgtcactcagtagaccaactcccgagccaatgactaagctctgcgggtgactgcatcactgaagggtgttagcatgcattgacacccgctgtgtgtgacgtgcaatctctgaaatgagatattgctgcatgtgaaaaggtcatccattccgggcagcagaatcatacggctgggctgctcatcgtgaactgtatcagcaaagaagagaggtgaaacgtcatgctcggctgaataaacgactcaacgaggaattgtcggacctcttacatatggagaggacgaatgaagtatcgttggcgggctgcgtcttatcacgggcagccttcgagtgagggtcggataccatgagcaacagtgtgcgatctgtggtcataccgtcgctgatatccggtgattcgccatcgcgcatatctgacggtcgggtcaatgagatggaatctcttggccgccagtgatgccatcatgcacgcgtctccaaagggaaccgacttgcaacacaggtagggaagacgctctaacattggagagggagaggtcaggtcgagacgttggttttgtgagatataaagaaaagaaggcatccacacgatagtttaataggggcaggccttcatcttataccttaagaaaatcacaaaagcaccgacctcgcactagaagattttagccgtttgcatctactttatttcggcaaacacagaatctgaaacgtatcaagtatcagtccggccgtagttacgttcgactactagggtctttgcaagacctcggacgccttgtactaggt

SEQ ID NO: 27211 - DNA, 7410 bp, Muscodor strobelii
  misc_feature: SGI cDNA ID NO. 569318
  misc_feature: Encodes the peptide sequence at SEQ ID NO 27212
atggctatggcgcagcagcagcagctcgcgctcgagacgctcgactccatcacacgcgacctcaagtcaaggcacgacttctccttcaagagcctctccttctcctcagccctctcccacaccatctcccgcgtagtcaccctcgacaccctagacgaaatgctgaccttagacagagcgggcgatgaagtccgcaagcgcgccgctgcccaactccgcgacctcgtcaccgtctgctaccgagacttccacgccgaacagttccatgtcttctacaactcagtcaacaataagattaccaacctgatcctccacggcaatgactcttcggaacgcctgggcggcgtctacgccctcgatgccctcgtcgacttcgacggcgtcgacgtcaccgccaagtacactcgcttcaccgccaacctcaagaccgtcctgcgcggcaaggatatcgtccccatgcagccggccgccatagccctcggcaagctatgtcgaccgggaggctccctcatatccgagttagtcgagtccgaagtgaaaacagccctcgagtggctgcagtccgaccgcatcgaggagaagagatatagtgctgtccttgtcctgcgcgagctggcccgcaacgccccgaccctcatgtacaccttcgtcggcctcatcttcgagctgatctgggtcggcctgcgcgacccccgccacctcatccgcgccacctcgggcgagacagttagcgcctgtttccgcatcatccgcgagcgcgaccccgagctgaaggccctgtggatgggcaagatgtacaccgagatgctcgtcggtctcaagctgaactcggtcgagacggtccacgcatctctgctcgtgctgaaggagctcctcgagcagggcggcatgttcatgcaggaccactaccaggaggcctgcgagattgtcttccgccacaaggaccaccgggacgtgaccatccgtaagacggtcgtcatgctcatccccgacctggccaactactcccccgccgacttcgccctcagctacctgcataagttcatgctcttcctctccggcatgttgaagaaagaaaaggagcgtaacgacgccttcttagccatcggaaacattgctaactcggtcaagagcgccatcgccccctacttggacggggtgctcatatacgtgcgagaaggtctcagcttgcagtcgagaaaaagaggttctgtagacccggtgtttgactgtataagccgactggcagtcgcggtgggccagactctgagcaaatacatggaagcattgcttgacccaatattcgcttgtgagctgactcccaagctcacgcaagccttggtggacatggccttctacatccctcccgtgaaacctaccattcaagagcggttgcttgatatgctcagcaatgtcctgtgtggcgagccgttcaagccccttggcgcacccactcccaacaccctttccgccgtacccataattcctaaagacgccaaggatcctcagatctatgagcacagaaaagcagaaatcaagctggctctcaataccttgggcagctttgacttctctggccacattctgaatgagtttgtgcgtgatgtggccatcaagtatgttgaggacgatgaccccgagattcgtgaggcggcagctttgacctgctgtcaactttatgtacgggatcccattgtaaatcagacaagccatcatgctcttcaagtcgttggcgatgtcatcgagaagctattgactgtgggcgtatctgaccctcagccaaatatccgacggacagtcctggccgcactcgatgagcgatttgaccctcatctggccaaggccgagaacatccgcactctgttcttcgccctaaatgacgaagtattcagtattcgagaggtggccatctccatcataggacgcttggctcggtataaccccgcctatgtcattccctctctccgaaagacattgatccagatgctcactgagctggagttctcggatgtggcgcggaataaggaagaaagtgcgaagcttctcagtcttctagttcagaatgctcagggtctcattcgaccatatgtcgagcctatgatttctgtcctgctacccaaagcaagcgagcccaatcctgccgtagcggctactatccttaaggcaattggcgagcttgccacggtaggaggggaggatatgctaccgtacaaggacaagttgatgcctatcatcatcgacgctttgcaggaccagagctccatcgtgaagcgagaggcagccctacacaccctaggacaactagccagcaattctggctatgtcattgacccctatctggagtatccacagctcctagaactactgcaaaacatcatccgagctgaaccccagcgtggtcctttgcgccaagagactatcaagctcatgggcattctcggcgcgttggatccttaccgacatcagcaagtcgaagagcgcactcccgagaccaagagaagtgccgagaccaaccgcatgacggatatctcgctcatgatgaccggcctcactccctccaacaaggagtactatcctacagtcgtcatcaatgctcttttgaacattctgaaagaccagtctctcgtccagcaccatgccgctgttattgaagctattatgaatatcttccggactctcggcttggaatgtgtttcgtttttggacagaattattcctgcgtttctgttggtcatccggagctcgccaccaacccgtctggagtcatatttcaaccagttagcttcgctcgttagtatcgtgcgacagcatatcaggatatatcttccatccatcgtggagatcttacaggagtactgggaggtttcgtcttctcttcagagcacgatattgtcgttagttgaagcgatttcgagatctctcgagggagaattcaagatctaccttgctggcttattgcccatgatgcttggtatcctcgagaaagattcgactaccaagagaataccttccgagaaggttctgcatgctctgctggtgttcggttccagtagcgaggagtacatgcacctaatcatccccgtcatcgtacgcaccttcgaaaagcagggccagccaacattcctacgcaagtccgctattgagacgattggtaaaatttctcggcaggtaaatctcaacgactacgctgccaagattatacatccactggcgcgagtcctcgcgaatggggagatttccctgcgagtggctgctcttgacaccctttgtgcactgatccagcagcttggtaaggactatctgcactttctcggcaccatcaataaggtattgcagacaagccaaattcaacatcagaactacgatctacttgtttccaagctacaaaaaggggaagtgctaccacaagatctgagctctgagggacgtttcattgatcagcctgatgagcccgcctttgcggagctaggcaacaagaaattagagatgaatgccatacatctgaagacagcttgggatacacgagggaaatctaccaaagaagactggcaggagtggttgcgacgtttcagtaccacgctcctgagcgagtctcccaatcatgccctccgggctactgctgttctagctagtgtctatttgccacttgcccgcgagctcttcaactctgcctttgtctcatgctggagtgacctgtacgaacagtttcaagatgaacttattcagaacattgagaatgctattcgatcagagaatgtccctccggatctgcttggtcttcttctgaatcttgcggagttcatggaacatgacgacaaggctttgcccatcgacattagaatccttggcagggaggctgcccgctgccacgcgtatgccaaggctctacactacaaggagttagagttcttacaagaccagagcggcccagctgtggaggctttgattgttatcaacaaccagctgcaacagtatgatgctgccattggtattctccgcaaggcacagctatacaaagatggcatccagctccgtgaaacttggttcgagaaactagagcgatgggaagaagccctcgctttctatgacaaacgagagtccgaaattccagaggaccaagccattcccattgacattgtcatgggcaaaatgcgctgtctacacgcacttactgagtgggatgcacttgccgggttggcagccaacacttgggccaatgctgcgccagaggtccaaagacgcattgcacctttggccacgggtgctgcatggagtttgggtaaatgggatgccatggagatttatctgtcgtcgatgagacgaaactcacccgaccgttctttcttcggcgctatacttgctctgcaccggaaccaattccgggaagcaacacaaaacattcagcaggcgcgagaaggcttggacacagaacttagtgcgcttgtcagcgagtcctataatcgtgcctatcaggttgtcgtccgtgttcaaatgcttgccgaactggaggagctgatcgtctacaaacaagcagacgagaagaagaagtccacgatgcgacgtacctgggagattcgtctaaagggatgtcaaaggaatgtagaggtgtggcaacgcatgctccgactccgagctctggttatctctcccgaagagaacatgcatatgtggatcaagtttgccaatctttgtagaaagtcgggacgcatgggacttgccgagaagtccttgaaacagctcattggcactgagcatcccctcgaggaggtgatcccttactggacccagaatggtccggcgtcaaatgcggcctcccggaggatacctccccaagtcgtttatgctgtactcaaattctactgggagtttggccaacagccagtaatgcggcagtccgggcatgcagagaaaactctctacagtcttcggcaattcaccgccgatacggtacagcatttagacattgctcgagcctcgttacaatccgttccgaacggcgtcgatcctatgtccgactatggattccacaacggtgtcgaacccaatgtctctcgactgaggtcccaaaaagaataccaagaccacaccgttctcttggcgaaatgttatctcaagcagggcgagtggcaggccgtcttgaacaagagcgattggcagaaccagagcgtacaggaaatactgacgtcttattccaaagctacgcactacaaccccaagtggtacaaggcctggcatgcgtgggccctggccaacttcgagattgttcaagctctcatgtctccaacggacaggaacacgccaaggccagactcatcggtggtgatcagccatgttgtaccggctgtgcagggtttcttcaagtccattgccttatcctctggcagttccttacaagacactcttcgcctcctcaccttatggtttgctcatggcggcagtagtgaagtcaacacggctgtcactcaaggttttggaactgttagtgttgatacctggttggaagtgataccacagcttatcgcacgaatcaaccagccgaaccctagagtccggcaatccatccacaacctactcgcggatgtcggtcgcaaccatccacaggcgttggtgtaccctctcacagtcgcatcgaaatccccgcagaacactaggaggtcaagatctgcggctctcatcatggacagcatgcgggcacacagcgccaatctcgtggagcaagcggatgttgtcagccacgagctcatccgtgtcgcggtgttgtggcacgagcagtggcacgaagctatcgaggacgcttcgcgcttgtggttctccgaccataatgtggaaggcatgctcgcgcttttgacaccgatgcacgagcaactcgagaggggtcccgagacattgcgtgaaattagcttcgcacagacgttcggaagggatctcacagaagcccgggagtggtgtcggcagtatgaaactagtggtgacgttaccgatatcaccggtgcatgggatctgtactaccaagtgttccgccgtatcggaaggcaactcccccaaatgacatctcttgacctcacctattgctccccacggcttctcaacgccaagaatttggacctcgctgttccgggcacataccgcagcggcatgccgattgtacgaattctgtctttcgaaaccactttcagcgtcatcaactccaaacaaagacctcgaaagctcaacaccgcaggtagtgatggtgtgacctacgcattcttactgaagggtcatgaggacatccgacaggacgaacgtgtaatgcagctctttggtctctgtaatacgctgctttcgaacgactccgaatgttacaaacgccatctcaacatccagcgatacccagctataccactcagtcagaactcgggtctcctcggatgggttcctaatagtgacacactacatgtgctcatccgcgaataccgtgagagtcgcaagatcttgctcaacattgagcatcgtatcatgttacaaatggcacccgattatgacaatctcactctcatgcaaaaggtagaagtgttcggttacgctctggacaacactactggccaagatctttaccgtgttctgtggctgaagagcaagagttcagaagcctggttggagcgacgtaccaattacacccgtagtcttggtgtgatgagtatggtcggctacattttaggtctgggtgatcgccaccctagcaatctgatgcttgaccgcatcacgggcaagatcatccatattgatttcggagactgcttcgaggtggccatgaagcgtgacaaatatcccgaaagagttcctttccgtctgacccgtatgctcacgtacgccatggaggttagcaacatcgagggtagtttccgcatcacttgcgagcacgtcatgcgcgtcttgcgagacaacaaagaaagtgtgatggctgttcttgaagctttcattcatgatcccctgctcacctggcgtctcacaaacactgcttcggctaacggcccgaacttccattctgaacgtgaggcagcccttggggcaggcgctcagcgcgcgcggcgacccagtatcctagacgcagaacacccgccttccgagctactaggtgtgaaccacagcggtcttgaatcaatacaacaaggcggtatcccaggtcgcgcccgcgctcgcacaaattctagtctcgtcaacggtgtgacacagatggatggcgagatgacggaaatccaaaacgcacgcgctgtcgaggtgctcgatcgcgtgaaccaaaaactgactggtcgggacttcaagcctactgaggagctcgaggtggtgcaacaggtcaataagttgatcatggaggctaccaagctcgagaacttatgccagcactacattggctggtgctcattctggtaa

SEQ ID NO: 27212 - protein, 2469 aa, Muscodor strobelii
  misc_feature: SGI Peptide ID NO. 569318
  misc_feature (735)..(772): Pfam Id: PF02985 Pfam Desc: HEAT repeat
  misc_feature (1416)..(1807): Pfam Id: PF02259 Pfam Desc: FAT domain
  misc_feature (2437)..(2469): Pfam Id: PF02260 Pfam Desc: FATC domain
  misc_feature (2079)..(2329): Pfam Id: PF00454 Pfam Desc: Phosphatidylinositol 3- and 4-kinase
  misc_feature (1913)..(2012): Pfam Id: PF08771 Pfam Desc: Rapamycin binding domain
  misc_feature (1416)..(1646): Pfam Id: PF02259 Pfam Desc: FAT domain
  misc_feature (3)..(2469): NCBI GI: 46127511 Blast Desc: FG08133.1 [Gibberella zeae PH-1]
  misc_feature (3)..(2469): NCBI GI: 116010468 Blast Desc: TOR kinase [Gibberella fujikuroi]
  misc_feature (3)..(2469): NCBI GI: 261361112 Blast Desc: phosphatidylinositol 3-kinase tor2 [Verticillium albo-atrum VaMs.102]
  misc_feature (60)..(2469): NCBI GI: 85098066 Blast Desc: phosphatidylinositol 3-kinase tor2 [Neurospora crassa OR74A] gi|28922063|gb|EAA31334.1| phosphatidylinositol 3-kinase tor2 [Neurospora crassa OR74A]
  misc_feature (47)..(2469): NCBI GI: 156036516 Blast Desc: SS1G_12947 [Sclerotinia sclerotiorum 1980] gi|154698352|gb|EDN98090.1| SS1G_12947 [Sclerotinia sclerotiorum 1980]
  misc_feature (65)..(2469): NCBI GI: 82409047 Blast Desc: target of rapamycin [Podospora anserina]
  misc_feature (3)..(2469): NCBI GI: 154297812 Blast Desc: BC1G_11880 [Botryotinia fuckeliana B05.10] gi|150858321|gb|EDN33513.1| BC1G_11880 [Botryotinia fuckeliana B05.10]
  misc_feature (62)..(2286): NCBI GI: 145615460 Blast Desc: MGG_13130 [Magnaporthe grisea 70-15] gi|145022282|gb|EDK06302.1| MGG_13130 [Magnaporthe grisea 70-15]
  misc_feature (57)..(2469): NCBI GI: 71001358 Blast Desc: TOR pathway phosphatidylinositol 3-kinase TorA [Aspergillus fumigatus Af293] gi|66852998|gb|EAL93322.1| TOR pathway phosphatidylinositol 3-kinase TorA, [Aspergillus Af293]
  misc_feature (57)..(2469): NCBI GI: 119480961 Blast Desc: TOR pathway phosphatidylinositol 3-kinase TorA, [Neosartorya fischeri NRRL 181] gi|119408663|gb|EAW18612.1| TOR pathway phosphatidylinositol 3-kinase TorA, [Neosartorya fischeri
  misc_feature (61)..(2469): SWISSPROT Homolog: EC 2.7.1.137 Phosphatidylinositol 3-kinase
MAMAQQQQLALETLDSITRDLKSRHDFSFKSLSFSSALSHTISRVVTLDTLDEMLTLDRAGDEVRKRAAAQLRDLVTVCYRDFHAEQFHVFYNSVNNKITNLILHGNDSSERLGGVYALDALVDFDGVDVTAKYTRFTANLKTVLRGKDIVPMQPAAIALGKLCRPGGSLISELVESEVKTALEWLQSDRIEEKRYSAVLVLRELARNAPTLMYTFVGLIFELIWVGLRDPRHLIRATSGETVSACFRIIRERDPELKALWMGKMYTEMLVGLKLNSVETVHASLLVLKELLEQGGMFMQDHYQEACEIVFRHKDHRDVTIRKTVVMLIPDLANYSPADFALSYLHKFMLFLSGMLKKEKERNDAFLAIGNIANSVKSAIAPYLDGVLIYVREGLSLQSRKRGSVDPVFDCISRLAVAVGQTLSKYMEALLDPIFACELTPKLTQALVDMAFYIPPVKPTIQERLLDMLSNVLCGEPFKPLGAPTPNTLSAVPIIPKDAKDPQIYEHRKAEIKLALNTLGSFDFSGHILNEFVRDVAIKYVEDDDPEIREAAALTCCQLYVRDPIVNQTSHHALQVVGDVIEKLLTVGVSDPQPNIRRTVLAALDERFDPHLAKAENIRTLFFALNDEVFSIREVAISIIGRLARYNPAYVIPSLRKTLIQMLTELEFSDVARNKEESAKLLSLLVQNAQGLIRPYVEPMISVLLPKASEPNPAVAATILKAIGELATVGGEDMLPYKDKLMPIIIDALQDQSSIVKREAALHTLGQLASNSGYVIDPYLEYPQLLELLQNIIRAEPQRGPLRQETIKLMGILGALDPYRHQQVEERTPETKRSAETNRMTDISLMMTGLTPSNKEYYPTVVINALLNILKDQSLVQHHAAVIEAIMNIFRTLGLECVSFLDRIIPAFLLVIRSSPPTRLESYFNQLASLVSIVRQHIRIYLPSIVEILQEYWEVSSSLQSTILSLVEAISRSLEGEFKIYLAGLLPMMLGILEKDSTTKRIPSEKVLHALLVFGSSSEEYMHLIIPVIVRTFEKQGQPTFLRKSAIETIGKISRQVNLNDYAAKIIHPLARVLANGEISLRVAALDTLCALIQQLGKDYLHFLGTINKVLQTSQIQHQNYDLLVSKLQKGEVLPQDLSSEGRFIDQPDEPAFAELGNKKLEMNAIHLKTAWDTRGKSTKEDWQEWLRRFSTTLLSESPNHALRATAVLASVYLPLARELFNSAFVSCWSDLYEQFQDELIQNIENAIRSENVPPDLLGLLLNLAEFMEHDDKALPIDIRILGREAARCHAYAKALHYKELEFLQDQSGPAVEALIVINNQLQQYDAAIGILRKAQLYKDGIQLRETWFEKLERWEEALAFYDKRESEIPEDQAIPIDIVMGKMRCLHALTEWDALAGLAANTWANAAPEVQRRIAPLATGAAWSLGKWDAMEIYLSSMRRNSPDRSFFGAILALHRNQFREATQNIQQAREGLDTELSALVSESYNRAYQVVVRVQMLAELEELIVYKQADEKKKSTMRRTWEIRLKGCQRNVEVWQRMLRLRALVISPEENMHMWIKFANLCRKSGRMGLAEKSLKQLIGTEHPLEEVIPYWTQNGPASNAASRRIPPQVVYAVLKFYWEFGQQPVMRQSGHAEKTLYSLRQFTADTVQHLDIARASLQSVPNGVDPMSDYGFHNGVEPNVSRLRSQKEYQDHTVLLAKCYLKQGEWQAVLNKSDWQNQSVQEILTSYSKATHYNPKWYKAWHAWALANFEIVQALMSPTDRNTPRPDSSVVISHVVPAVQGFFKSIALSSGSSLQDTLRLLTLWFAHGGSSEVNTAVTQGFGTVSVDTWLEVIPQLIARINQPNPRVRQSIHNLLADVGRNHPQALVYPLTVASKSPQNTRRSRSAALIMDSMRAHSANLVEQADVVSHELIRVAVLWHEQWHEAIEDASRLWFSDHNVEGMLALLTPMHEQLERGPETLREISFAQTFGRDLTEAREWCRQYETSGDVTDITGAWDLYYQVFRRIGRQLPQMTSLDLTYCSPRLLNAKNLDLAVPGTYRSGMPIVRILSFETTFSVINSKQRPRKLNTAGSDGVTYAFLLKGHEDIRQDERVMQLFGLCNTLLSNDSECYKRHLNIQRYPAIPLSQNSGLLGWVPNSDTLHVLIREYRESRKILLNIEHRIMLQMAPDYDNLTLMQKVEVFGYALDNTTGQDLYRVLWLKSKSSEAWLERRTNYTRSLGVMSMVGYILGLGDRHPSNLMLDRITGKIIHIDFGDCFEVAMKRDKYPERVPFRLTRMLTYAMEVSNIEGSFRITCEHVMRVLRDNKESVMAVLEAFIHDPLLTWRLTNTASANGPNFHSEREAALGAGAQRARRPSILDAEHPPSELLGVNHSGLESIQQGGIPGRARARTNSSLVNGVTQMDGEMTEIQNARAVEVLDRVNQKLTGRDFKPTEELEVVQQVNKLIMEATKLENLCQHYIGWCSFW

SEQ ID NO: 27213 - DNA, 8193 bp, Muscodor strobelii
  misc_feature: SGI EST ID NO. CUFF.64209.0
  misc_feature: Variant of the nucleotide sequence at SEQ ID NO 27211
cgcaatacgagcaggtctgggcagctttcaagaccttattcttagcttaggtgcatttgcagtcactgaatctgacgccgtctcaacatcgccgttggaggaactgacttgaatctgtctaattctcacgacctctcctcccattgccgtctgaaacgcaacagcacatccaactctcgccgtccaaccgcgcacgagtccatggtgacataaccgagccaacacgtcctattccatcccatcccgcgccgtccatttcagccgagtcgacacaagcctcctccctcgccgagccctcacttgctactagctataagcattgcatcttcgcagccagcccccgtcgagatccccatccccgtcctccctccaactacttctgccttgtgatccagcatcacaagtgtctgtctccgtcccacccttctccatgcagctgtaatcctgcttgtcgcaaagctgtctggcgcggctgagggaatacacacacacgcagtgattcctgattgcccgtcatggctatggcgcagcagcagcagctcgcgctcgagacgctcgactccatcacacgcgacctcaagtcaagagcgggcgatgaagtccgcaagcgcgccgctgcccaactccgcgacctcgtcaccgtctgctaccgagacttccacgccgaacagttccatgtcttctacaactcagtcaacaataagattaccaacctgatcctccacggcaatgactcttcggaacgcctgggcggcgtctacgccctcgatgccctcgtcgacttcgacggcgtcgacgtcaccgccaagtacactcgcttcaccgccaacctcaagaccgtcctgcgcggcaaggatatcgtccccatgcagccggccgccatagccctcggcaagctatgtcgaccgggaggctccctcatatccgagttagtcgagtccgaagtgaaaacagccctcgagtggctgcagtccgaccgcatcgaggagaagagatatagtgctgtccttgtcctgcgcgagctggcccgcaacgccccgaccctcatgtacaccttcgtcggcctcatcttcgagctgatctgggtcggcctgcgcgacccccgccacctcatccgcgccacctcgggcgagacagttagcgcctgtttccgcatcatccgcgagcgcgaccccgagctgaaggccctgtggatgggcaagatgtacaccgagatgctcgtcggtctcaagctgaactcggtcgagacggtccacgcatctctgctcgtgctgaaggagctcctcgagcagggcggcatgttcatgcaggaccactaccaggaggcctgcgagattgtcttccgccacaaggaccaccgggacgtgaccatccgtaagacggtcgtcatgctcatccccgacctggccaactactcccccgccgacttcgccctcagctacctgcataagttcatgctcttcctctccggcatgttgaagaaagaaaaggagcgtaacgacgccttcttagccatcggaaacattgctaactcggtcaagagcgccatcgccccctacttggacggggtgctcatatacgtgcgagaaggtctcagcttgcagtcgagaaaaagaggttctgtagacccggtgtttgactgtataagccgactggcagtcgcggtgggccagactctgagcaaatacatggaagcattgcttgacccaatattcgcttgtgagctgactcccaagctcacgcaagccttggtggacatggccttctacatccctcccgtgaaacctaccattcaagagcggttgcttgatatgctcagcaatgtcctgtgtggcgagccgttcaagccccttggcgcacccactcccaacaccctttccgccgtacccataattcctaaagacgccaaggatcctcagatctatgagcacagaaaagcagaaatcaagctggctctcaataccttgggcagctttgacttctctggccacattctgaatgagtttgtgcgtgatgtggccatcaagtatgttgaggacgatgaccccgagattcgtgaggcggcagctttgacctgctgtcaactttatgtacgggatcccattgtaaatcagacaagccatcatgctcttcaagtcgttggcgatgtcatcgagaagctattgactgtgggcgtatctgaccctcagccaaatatccgacggacagtcctggccgcactcgatgagcgatttgaccctcatctggccaaggccgagaacatccgcactctgttcttcgccctaaatgacgaagtattcagtattcgagaggtggccatctccatcataggacgcttggctcggtataaccccgcctatgtcattccctctctccgaaagacattgatccagatgctcactgagctggagttctcggatgtggcgcggaataaggaagaaagtgcgaagcttctcagtcttctagttcagaatgctcagggtctcattcgaccatatgtcgagcctatgatttctgtcctgctacccaaagcaagcgagcccaatcctgccgtagcggctactatccttaaggcaattggcgagcttgccacggtaggaggggaggatatgctaccgtacaaggacaagttgatgcctatcatcatcgacgctttgcaggaccagagctccatcgtgaagcgagaggcagccctacacaccctaggacaactagccagcaattctggctatgtcattgacccctatctggagtatccacagctcctagaactactgcaaaacatcatccgagctgaaccccagcgtggtcctttgcgccaagagactatcaagctcatgggcattctcggcgcgttggatccttaccgacatcagcaagtcgaagagcgcactcccgagaccaagagaagtgccgagaccaaccgcatgacggatatctcgctcatgatgaccggcctcactccctccaacaaggagtactatcctacagtcgtcatcaatgctcttttgaacattctgaaagaccagtctctcgtccagcaccatgccgctgttattgaagctattatgaatatcttccggactctcggcttggaatgtgtttcgtttttggacagaattattcctgcgtttctgttggtcatccggagctcgccaccaacccgtctggagtcatatttcaaccagttagcttcgctcgttagtatcgtgcgacagcatatcaggatatatcttccatccatcgtggagatcttacaggagtactgggaggtttcgtcttctcttcagagcacgatattgtcgttagttgaagcgatttcgagatctctcgagggagaattcaagatctaccttgctggcttattgcccatgatgcttggtatcctcgagaaagattcgactaccaagagaataccttccgagaaggttctgcatgctctgctggtgttcggttccagtagcgaggagtacatgcacctaatcatccccgtcatcgtacgcaccttcgaaaagcagggccagccaacattcctacgcaagtccgctattgagacgattggtaaaatttctcggcaggtaaatctcaacgactacgctgccaagattatacatccactggcgcgagtcctcgcgaatggggagatttccctgcgagtggctgctcttgacaccctttgtgcactgatccagcagcttggtaaggactatctgcactttctcggcaccatcaataaggtattgcagacaagccaaattcaacatcagaactacgatctacttgtttccaagctacaaaaaggggaagtgctaccacaagatctgagctctgagggacgtttcattgatcagcctgatgagcccgcctttgcggagctaggcaacaagaaattagagatgaatgccatacatctgaagacagcttgggatacacgagggaaatctaccaaagaagactggcaggagtggttgcgacgtttcagtaccacgctcctgagcgagtctcccaatcatgccctccgggctactgctgttctagctagtgtctatttgccacttgcccgcgagctcttcaactctgcctttgtctcatgctggagtgacctgtacgaacagtttcaagatgaacttattcagaacattgagaatgctattcgatcagagaatgtccctccggatctgcttggtcttcttctgaatcttgcggagttcatggaacatgacgacaaggctttgcccatcgacattagaatccttggcagggaggctgcccgctgccacgcgtatgccaaggctctacactacaaggagttagagttcttacaagaccagagcggcccagctgtggaggctttgattgttatcaacaaccagctgcaacagtatgatgctgccattggtattctccgcaaggcacagctatacaaagatggcatccagctccgtgaaacttggttcgagaaactagagcgatgggaagaagccctcgctttctatgacaaacgagagtccgaaattccagaggaccaagccattcccattgacattgtcatgggcaaaatgcgctgtctacacgcacttactgagtgggatgcacttgccgggttggcagccaacacttgggccaatgctgcgccagaggtccaaagacgcattgcacctttggccacgggtgctgcatggagtttgggtaaatgggatgccatggagatttatctgtcgtcgatgagacgaaactcacccgaccgttctttcttcggcgctatacttgctctgcaccggaaccaattccgggaagcaacacaaaacattcagcaggcgcgagaaggcttggacacagaacttagtgcgcttgtcagcgagtcctataatcgtgcctatcaggttgtcgtccgtgttcaaatgcttgccgaactggaggagctgatcgtctacaaacaagcagacgagaagaagaagtccacgatgcgacgtacctgggagattcgtctaaagggatgtcaaaggaatgtagaggtgtggcaacgcatgctccgactccgagctctggttatctctcccgaagagaacatgcatatgtggatcaagtttgccaatctttgtagaaagtcgggacgcatgggacttgccgagaagtccttgaaacagctcattggcactgagcatcccctcgaggaggtgatcccttactggacccagaatggtccggcgtcaaatgcggcctcccggaggatacctccccaagtcgtttatgctgtactcaaattctactgggagtttggccaacagccagtaatgcggcagtccgggcatgcagagaaaactctctacagtcttcggcaattcaccgccgatacggtacagcatttagacattgctcgagcctcgttacaatccgttccgaacggcgtcgatcctatgtccgactatggattccacaacggtgtcgaacccaatgtctctcgactgaggtcccaaaaagaataccaagaccacaccgttctcttggcgaaatgttatctcaagcagggcgagtggcaggccgtcttgaacaagagcgattggcagaaccagagcgtacaggaaatactgacgtcttattccaaagctacgcactacaaccccaagtggtacaaggcctggcatgcgtgggccctggccaacttcgagattgttcaagctctcatgtctccaacggacaggaacacgccaaggccagactcatcggtggtgatcagccatgttgtaccggctgtgcagggtttcttcaagtccattgccttatcctctggcagttccttacaagacactcttcgcctcctcaccttatggtttgctcatggcggcagtagtgaagtcaacacggctgtcactcaaggttttggaactgttagtgttgatacctggttggaagtgataccacagcttatcgcacgaatcaaccagccgaaccctagagtccggcaatccatccacaacctactcgcggatgtcggtcgcaaccatccacaggcgttggtgtaccctctcacagtcgcatcgaaatccccgcagaacactaggaggtcaagatctgcggctctcatcatggacagcatgcgggcacacagcgccaatctcgtggagcaagcggatgttgtcagccacgagctcatccgtgtcgcggtgttgtggcacgagcagtggcacgaagctatcgaggacgcttcgcgcttgtggttctccgaccataatgtggaaggcatgctcgcgcttttgacaccgatgcacgagcaactcgagaggggtcccgagacattgcgtgaaattagcttcgcacagacgttcggaagggatctcacagaagcccgggagtggtgtcggcagtatgaaactagtggtgacgttaccgatatcaccggtgcatgggatctgtactaccaagtgttccgccgtatcggaaggcaactcccccaaatgacatctcttgacctcacctattgctccccacggcttctcaacgccaagaatttggacctcgctgttccgggcacataccgcagcggcatgccgattgtacgaattctgtctttcgaaaccactttcagcgtcatcaactccaaacaaagacctcgaaagctcaacaccgcaggtagtgatggtgtgacctacgcattcttactgaagggtcatgaggacatccgacaggacgaacgtgtaatgcagctctttggtctctgtaatacgctgctttcgaacgactccgaatgttacaaacgccatctcaacatccagcgatacccagctataccactcagtcagaactcgggtctcctcggatgggttcctaatagtgacacactacatgtgctcatccgcgaataccgtgagagtcgcaagatcttgctcaacattgagcatcgtatcatgttacaaatggcacccgattatgacaatctcactctcatgcaaaaggtagaagtgttcggttacgctctggacaacactactggccaagatctttaccgtgttctgtggctgaagagcaagagttcagaagcctggttggagcgacgtaccaattacacccgtagtcttggtgtgatgagtatggtcggctacattttaggtctgggtgatcgccaccctagcaatctgatgcttgaccgcatcacgggcaagatcatccatattgatttcggagactgcttcgaggtggccatgaagcgtgacaaatatcccgaaagagttcctttccgtctgacccgtatgctcacgtacgccatggaggttagcaacatcgagggtagtttccgcatcacttgcgagcacgtcatgcgcgtcttgcgagacaacaaagaaagtgtgatggctgttcttgaagctttcattcatgatcccctgctcacctggcgtctcacaaacactgcttcggctaacggcccgaacttccattctgaacgtgaggcagcccttggggcaggcgctcagcgcgcgcggcgacccagtatcctagacgcagaacacccgccttccgagctactaggtgtgaaccacagcggtcttgaatcaatacaacaaggcggtatcccaggtcgcgcccgcgctcgcacaaattctagtctcgtcaacggtgtgacacagatggatggcgagatgacggaaatccaaaacgcacgcgctgtcgaggtgctcgatcgcgtgaaccaaaaactgactggtcgggacttcaagcctactgaggagctcgaggtggtgcaacaggtcaataagttgatcatggaggctaccaagctcgagaacttatgccagcactacattggctggtgctcattctggtaataccgtgtccaccggagctaatagcaatagagtgggactctgttggcgttatgatttgaggaatgactggcgtttggtgtcaggtccctgcgaccaatccggaatatccttgttgcgtgatatccacgcgccttcgccgtacgttacgttatgaataattacattgagagagtatgagtatgagatgcggaggaaatattcagtgattcgactcgctcggtcgagatttcgtgttagtgtacagctcaacgtcgacatagatggctgtttcaaaacagtacggccgctgtacatatctagctgcatcgatagtctcacgataggaatgacttgaacatgatgcagattattaataactaccttctacctgcct

SEQ ID NO: 27214 - DNA, 660 bp, Muscodor strobelii
  misc_feature: SGI cDNA ID NO. 569319
  misc_feature: Encodes the peptide sequence at SEQ ID NO 27215
atggctttccaacctgagattgtcggacatgttgtcgtacctgttcctggacctgctcctgtgccggctcccggacctgtcctcgtacctgctcccgcacctgttctcctacctgttcccgcacctgttcctgtaccttgggaaggtccaagattagtggaattcttcacccgggctgggcacgctcagactgccggctcgccagatgaggacagcttgcaggagtatgcagtcagaactgacgttctccacgataacgaggaattcatggtcaaaatcaaatggcccggcgtggttcaaacatgcccaacttcggctactaccttggtcatccagagacgacccgaagatccaaaccctgcgtcagacttctcgcagcgatcgccaccaaccccttcgatcgtggccatggcctatacctatgaaccatttgtgcatgggccaatgcgacatggtgccgcatgcaatgccttcttccaaagactgcgtcttccgagaggccattacaccctaacggctgcgtattctgaaaacagaatgccatgctaccatgaaaatatggtgattgtcaaggagtttgtagttcaaaggcggcgacggactccaccagcacccctggagctggagattgataccgatgactcggattcgttgatttaa

SEQ ID NO: 27215 - protein, 219 aa, Muscodor strobelii
  misc_feature: SGI Peptide ID NO. 569319
MAFQPEIVGHVVVPVPGPAPVPAPGPVLVPAPAPVLLPVPAPVPVPWEGPRLVEFFTRAGHAQTAGSPDEDSLQEYAVRTDVLHDNEEFMVKIKWPGVVQTCPTSATTLVIQRRPEDPNPASDFSQRSPPTPSIVAMAYTYEPFVHGPMRHGAACNAFFQRLRLPRGHYTLTAAYSENRMPCYHENMVIVKEFVVQRRRRTPPAPLELEIDTDDSDSLI

SEQ ID NO: 27216 - DNA, 588 bp, Muscodor strobelii
  misc_feature: SGI cDNA ID NO. 569320
  misc_feature: Elevated expression when VOC is produced
  misc_feature: Encodes the peptide sequence at SEQ ID NO 27217
atgaacaacgacccaagtgtcagggccttcctgagcaagaaggacctattgtggaccttgcacaaccatgagcaacaactagtcacaatttttaacaatccaaatgtattcaaggttcttggtaacaagaatctgatcaatgcgctgaacgatcccaatgtattcaaggttcttagtaacaagaatctgatcaatgcgctgaccgattccgtcatactttcggcgctcctggacattgagaagattgatcgtaacgttccggagctcctcaaaagtcgaacaattgaccttagcgactgccagcttgttaaggtccatgcccaaagtgcccaaaatgccggaatccagcgtagcacctggcaagatatcaagtgtgggcacacgtactctctttccattcattgggtacgtttcgcctaccgaaagtctaagctagatgagttgaatgctgactactggctagccaagcgtaaagactccaccaaagcagttacggagttccttgattatctcccgccagcatcagaattctggggcgacggacgaagaaaaatcgattggagtgaaaattctcgtaaaagcccataa

SEQ ID NO: 27217 - protein, 195 aa, Muscodor strobelii
  misc_feature: SGI Peptide ID NO. 569320
  misc_feature: Useful for introducing or modulating the production of volatile compounds
MNNDPSVRAFLSKKDLLWTLHNHEQQLVTIFNNPNVFKVLGNKNLINALNDPNVFKVLSNKNLINALTDSVILSALLDIEKIDRNVPELLKSRTIDLSDCQLVKVHAQSAQNAGIQRSTWQDIKCGHTYSLSIHWVRFAYRKSKLDELNADYWLAKRKDSTKAVTEFLDYLPPASEFWGDGRRKIDWSENSRKSP

SEQ ID NO: 27218 - DNA, 878 bp, Muscodor strobelii
  misc_feature: SGI EST ID NO. CUFF.64229.0
  misc_feature: Variant of the nucleotide sequence at SEQ ID NO 27216
aataactctctaaattatcactatatttattgcccttgagtttctctatattttctttcacgatgaacaacgacccaagtgtcagggccttcctgagcaagaaggacctattgtggaccttgcacaaccatgagcaacaactagtcacaatttttaacaatccaaatgtattcaaggttcttggtaacaagaatctgatcaatgcgctgaacgatcccaatgtattcaaggttcttagtaacaagaatctgatcaatgcgctgaccgattccgtcatactttcggcgctcctggacattgagaagattgatcgtaacgttccggagctcctcaaaagtcgaacaattgaccttagcgactgccagcttgttaaggtccatgcccaaagtgcccaaaatgccggaatccagcgtagcacctggcaagatatcaagtgtgggcacacgtactctctttccattcattggccaagcgtaaagactccaccaaagcagttacggagttccttgattatctcccgccagcatcagaattctggggcgacggacgaagaaaaatcgattggagtgaaaattctcgtaaaagcccataaatctgaagaaaatggtgtttttgttttcacggttgttttcgtggagcctggccagcatgctctagaggctgcgctgtttgatgccgatcgtccatcggaaattcctcttcaagttaatagcttcgaattccatgtagactcatgattttcaagggaataagacgataggaaggtggttgagtgcggctggctgaaattcaaagattctacagaagaatagatctacggcacataatgctatgctacaagacccaatagacgtaaccatactatgtgtatagtttgc

SEQ ID NO: 27219 - DNA, 873 bp, Muscodor strobelii
  misc_feature: SGI cDNA ID NO. 569321
  misc_feature: Encodes the peptide sequence at SEQ ID NO 27220
atgtctccctccacaaagccactcacctggctcgtcacaggagcctcgtcaggtatcggccaggcaatctgtatagcagcactcgcagcaggacacaaagttgcaggtgcgacacgtgatgttgcaaaggcaagtgctgcaaatcctgacttcgggactcgaggtggcatttgggttactctcgaccccgggcacccagactcagcggctgcatttgcggtagctgacgaggaactcggtggcatcgacatattggtgaacaatgctggatattggtatctagcgggcgtcgaagacatgagtgagtccctacttcgccagcagatggaggtcaacttctttggaccaatgcgcggcgtgcggactttgctgcctagaatgcgtggccgtggtcgtggacatatcgtgttgattagcagtggtgcaggctttacaggtcgccctagtcggggtgcgtatgcctcgagcaagtgggctgctgaagcaatgcatgaggtcctcagccgcgaagtaggggataagctcgggattaacgtacttattgtcgaacctggcggcttccgtactactttcacctcgactggaatcgtggatcccgtcaatgcagcatacaagggcacggagctcgataaggcgatcagcctcgtgtctaattttgatgaagagggtttagatacctatttcaagggagacactgcgaaagccgcacgagcaattctcaacgctattgttgacgggcacgatggatatctccgattagtgctaggaccggactgtgttgctgctatggagcagaagatagtcgagttacagcgagatcttgatgcgacgcgtgaggtctctatgtccaccaacttagagcgttggaactga

SEQ ID NO: 27220 - protein, 290 aa, Muscodor strobelii
  misc_feature: SGI Peptide ID NO. 569321
  misc_feature (8)..(172): Pfam Id: PF00106 Pfam Desc: short chain dehydrogenase
  misc_feature (69)..(172): Pfam Id: PF00106 Pfam Desc: short chain dehydrogenase
  misc_feature (4)..(286): NCBI GI: 154312985 Blast Desc: BC1G_05494 [Botryotinia fuckeliana B05.10] gi|150849579|gb|EDN24772.1| BC1G_05494 [Botryotinia fuckeliana B05.10]
  misc_feature (7)..(287): NCBI GI: 156052565 Blast Desc: SS1G_06448 [Sclerotinia sclerotiorum 1980] gi|154704228|gb|EDO03967.1| SS1G_06448 [Sclerotinia sclerotiorum 1980]
  misc_feature (9)..(287): NCBI GI: 145239859 Blast Desc: An08g04580 [Aspergillus niger] gi|134077090|emb|CAK45431.1| protein product [Aspergillus niger]
  misc_feature (7)..(264): NCBI GI: 115383994 Blast Desc: conserved [Aspergillus terreus NIH2624] gi|114196236|gb|EAU37936.1| conserved [Aspergillus terreus NIH2624]
  misc_feature (7)..(286): NCBI GI: 159130409 Blast Desc: short chain oxidoreductase/dehydrogenase, [Aspergillus fumigatus A1163]
  misc_feature (9)..(288): NCBI GI: 145233649 Blast Desc: An02g10680 [Aspergillus niger] gi|134057129|emb|CAK44417.1| protein product [Aspergillus niger]
  misc_feature (7)..(286): NCBI GI: 70990156 Blast Desc: short chain oxidoreductase/dehydrogenase [Aspergillus fumigatus Af293] gi|66847559|gb|EAL87889.1| short chain oxidoreductase/dehydrogenase, [Aspergillus fumigatus Af293]
  misc_feature (7)..(286): NCBI GI: 119497429 Blast Desc: short chain oxidoreductase/dehydrogenase, [Neosartorya fischeri NRRL 181] gi|119413635|gb|EAW23576.1| short chain oxidoreductase/dehydrogenase, [Neosartorya fischeri NRRL 181]
  misc_feature (8)..(274): NCBI GI: 67523589 Blast Desc: AN2250.2 [Aspergillus nidulans FGSC A4] gi|40744779|gb|EAA63935.1| AN2250.2 [Aspergillus nidulans FGSC A4] gi|259487641|tpe|CBF86465.1| TPA: conserved [Aspergillus FGSC
  misc_feature (9)..(285): NCBI GI: 121703399 Blast Desc: short chain oxidoreductase/dehydrogenase, [Aspergillus clavatus NRRL 1] gi|119398107|gb|EAW08538.1| short chain oxidoreductase/dehydrogenase, [Aspergillus clavatus NRRL 1]
  misc_feature (4)..(171): SWISSPROT Homolog: EC 1.1.1.102 3-dehydrosphinganine reductase
MSPSTKPLTWLVTGASSGIGQAICIAALAAGHKVAGATRDVAKASAANPDFGTRGGIWVTLDPGHPDSAAAFAVADEELGGIDILVNNAGYWYLAGVEDMSESLLRQQMEVNFFGPMRGVRTLLPRMRGRGRGHIVLISSGAGFTGRPSRGAYASSKWAAEAMHEVLSREVGDKLGINVLIVEPGGFRTTFTSTGIVDPVNAAYKGTELDKAISLVSNFDEEGLDTYFKGDTAKAARAILNAIVDGHDGYLRLVLGPDCVAAMEQKIVELQRDLDATREVSMSTNLERWN

SEQ ID NO: 27221 - DNA, 1746 bp, Muscodor strobelii
  misc_feature: SGI cDNA ID NO. 569322
  misc_feature: Encodes the peptide sequence at SEQ ID NO 27222
atgtcggagaaaatgaggcgctatttgactacgggctacctgctgggctgctacactgcactggtgtccgcaggcggcaaatgcgccaaggcaccaaacatcgtcttcatcttgtccgatgaccaagacctacagatggactcgctggactatatgcccctactcgacaagtatctcacgcagcatggtaccaagtataagcgacattattgtactactgccctttgctgtcctgctcgagcgagcatcctcacaggaaagctatctcacaatcacaacgttacagacacagctgtgccttatggaggataccccaaagttgtagctgagggcatcaatgacgattatctaccgctctggcttcagaaggctggctgggacacttattactctggcaagctgtggaacgctcatagtgtcgataattataataagccatttgctagaggctggaatggcagtgaattcctattagacccatttacctatgagtactggaatcctaccatggcccgcaacttcgacgagcctgtttcatacgagggacagtatagtaccgatcttattttagagaaagcaatgggatttcttgacgacgctgtcagaaacccccgtccgttttacttgcaactttctcccatcgcgcctcatagcgatgtgcgattcaccggacagaatgattctaacggcataccggaagttgtcactagtcctccattcgcggctgagcgtcacgagaatctgttcccggatgtgattgtgcctcggactccaaacttcaacccagagacgccatcgtcagtctactgggtgcgcaatcttcctcgcctgaatgcaacgcacattgaatttaacgatcattactaccgccaacgcctgagagcactgcagtctgtcgacgaaatgattgaaacagttgtgcagaaattagaaaaccacgacatcttagataacacatatattgtattcagcaccgacaatggcttccatgtgggacaacatcgtctccagcctggaaagtattgtccatttgaagaagatatccacattccgctcattatccgcggtcctggcattccttcgaaccactcaacggaaattttgacgacgcatacggatctagcaccgacgtttctttgtatgattggcgctccgttacgtagtgactttgatggggaagccattcccttgacaaaagatcacatgaacgcggctgtagatgacagatatgaacatgttcaagtcgagtactggggctatgcactttcggaaaccaagtatcgctatgaaggtcgtcgcataccgaacaatacgtacaaggcacttcgagtgatcagcgaagattacaatctttactactcaatctggtgcaacaacgagcacgaactctacgacatgaagaatgatccgtaccagattgccaatatctatcccaatagcgacggccaatacagtagcaataataccgcgctactcggtcgaccgctaactgatgtcttgcaacgtctcgatgccctaacgatggtgctgaaaacgtgtaagggtgaaacctgcgttaaaccttggattgcattgcatcctaaaggaaatgtcaaatctctacgggacgcaatgaatcctaagtacgacgacttttacgtcaatgatgttccggacgttaagtatgaccactgtgctgaaggttatatccttgaacttgagggtccgacgtgggactcgatcgggcagccatttgcgcccggatga

SEQ ID NO: 27222 - protein, 581 aa, Muscodor strobelii
  misc_feature: SGI Peptide ID NO. 569322
  misc_feature (30)..(475): Pfam Id: PF00884 Pfam Desc: Sulfatase
  misc_feature (27)..(581): NCBI GI: 171680767 Blast Desc: protein product [Podospora anserina] gi|27764278|emb|CAD60558.1| protein product [Podospora anserina] gi|170940011|emb|CAP65237.1| protein product [Podospora anserina]
  misc_feature (19)..(581): NCBI GI: 256726163 Blast Desc: NECHADRAFT_94512 [Nectria haematococca mpVI 77-13-4]
  misc_feature (30)..(581): NCBI GI: 2873363 Blast Desc: arylsulfatase [Neurospora crassa]
  misc_feature (32)..(573): NCBI GI: 145251061 Blast Desc: An15g05130 [Aspergillus niger] gi|134082572|emb|CAK42487.1| protein product [Aspergillus niger]
  misc_feature (28)..(581): NCBI GI: 261354177 Blast Desc: arylsulfatase [Verticillium albo-atrum VaMs.102]
  misc_feature (29)..(581): NCBI GI: 256724341 Blast Desc: NECHADRAFT_53397 [Nectria haematococca mpVI 77-13-4]
  misc_feature (11)..(581): NCBI GI: 171693357 Blast Desc: protein product [Podospora anserina] gi|170946627|emb|CAP73430.1| protein product [Podospora anserina]
  misc_feature (1)..(575): NCBI GI: 46126687 Blast Desc: FG07721.1 [Gibberella zeae PH-1]
  misc_feature (32)..(569): NCBI GI: 67902708 Blast Desc: AN8341.2 [Aspergillus nidulans FGSC A4] gi|40747747|gb|EAA66903.1| AN8341.2 [Aspergillus nidulans FGSC A4] gi|259484268|tpe|CBF80344.1| TPA: arylsulfatase, [Aspergillus
  misc_feature (9)..(569): NCBI GI: 145240837 Blast Desc: An08g09550 [Aspergillus niger] gi|134077589|emb|CAK96733.1| protein product [Aspergillus niger]
  misc_feature (51)..(558): SWISSPROT Homolog: EC 3.1.6.1 Arylsulfatase
MSEKMRRYLTTGYLLGCYTALVSAGGKCAKAPNIVFILSDDQDLQMDSLDYMPLLDKYLTQHGTKYKRHYCTTALCCPARASILTGKLSHNHNVTDTAVPYGGYPKVVAEGINDDYLPLWLQKAGWDTYYSGKLWNAHSVDNYNKPFARGWNGSEFLLDPFTYEYWNPTMARNFDEPVSYEGQYSTDLILEKAMGFLDDAVRNPRPFYLQLSPIAPHSDVRFTGQNDSNGIPEVVTSPPFAAERHENLFPDVIVPRTPNFNPETPSSVYWVRNLPRLNATHIEFNDHYYRQRLRALQSVDEMIETVVQKLENHDILDNTYIVFSTDNGFHVGQHRLQPGKYCPFEEDIHIPLIIRGPGIPSNHSTEILTTHTDLAPTFLCMIGAPLRSDFDGEAIPLTKDHMNAAVDDRYEHVQVEYWGYALSETKYRYEGRRIPNNTYKALRVISEDYNLYYSIWCNNEHELYDMKNDPYQIANIYPNSDGQYSSNNTALLGRPLTDVLQRLDALTMVLKTCKGETCVKPWIALHPKGNVKSLRDAMNPKYDDFYVNDVPDVKYDHCAEGYILELEGPTWDSIGQPFAPG

SEQ ID NO: 27223 - DNA, 1224 bp, Muscodor strobelii
  misc_feature: SGI cDNA ID NO. 569323
  misc_feature: Encodes the peptide sequence at SEQ ID NO 27224
atgccaagctttaatggcaatgattatcgtaatctagttgcctttctcccaagagaacacactggcccgtatcttgagcgtccgttcgtacctatatggcatgcgccgaaagccaatgaggatgtatacattagagtggcttggcttagccgaatgattccgcccagtgatgcgcttgaaagtgtgatcgcctggtatcccccgaagggacccaaacccatggcctctcttgctattcagaacgacgtctacttcgacattacgatcaaatccaaagatgctccgattgcccaaatttcaagcttgatgaacagttctgatttcaagacaatcaactgtggctcttatctgtgcacatttcacggaaataacactgtcgctgtcgacccgcgaaaaatttcagacaataatgatgcacttattcgactcgctgagggtacctataacttcaaggctgaatggtatcattacctcgaagggaagaaggcagacataccagcaatcgatatcagcttcactttcgaagtagacaaggacacgacaaatgtgccccatgacaagcaatcgacgaattcagactggcctgtctgcgacatctgcaatagtgaggaggcagatcagattgctgcgcatctatctgaggtgcaatcacgcataccacgtagattcatgcttgatgtcgtaccgcccttggaatttccaacgtgtgacgaagccatattcgtttttaactacgaaggaaaagcacaccatttcaagacagactcgtttgacttcaagcccgaatacccagttcgcgtgaaagatctgcgacaaatcatagcgaatactctgtggcgtcctgtacaaaacgagcaggataaaaatgctgatcacatcaattacgagagtttcatcgaacaacttaagtatcaggactgtgttctcgatgatcctgagcgagaacttagtgactgtgggatggaaaggtggaactggctcaaactgcaggccagcaagaagccctttgaccgggatcttgagcaagctaatgccacatctcttcggaatgcccttatcagaccccagcggagaggcgtggattcggccataggaagcgatgattcaagtgaatggaccgatgatacgggatgcgaagaagaaaccgatgaagagactgcaatacgtacgcgctctttcacggaatctaatacattaagtgatacggacaacgcgtcagattga

SEQ ID NO: 27224 - protein, 407 aa, Muscodor strobelii
  misc_feature: SGI Peptide ID NO. 569323
MPSFNGNDYRNLVAFLPREHTGPYLERPFVPIWHAPKANEDVYIRVAWLSRMIPPSDALESVIAWYPPKGPKPMASLAIQNDVYFDITIKSKDAPIAQISSLMNSSDFKTINCGSYLCTFHGNNTVAVDPRKISDNNDALIRLAEGTYNFKAEWYHYLEGKKADIPAIDISFTFEVDKDTTNVPHDKQSTNSDWPVCDICNSEEADQIAAHLSEVQSRIPRRFMLDVVPPLEFPTCDEAIFVFNYEGKAHHFKTDSFDFKPEYPVRVKDLRQIIANTLWRPVQNEQDKNADHINYESFIEQLKYQDCVLDDPERELSDCGMERWNWLKLQASKKPFDRDLEQANATSLRNALIRPQRRGVDSAIGSDDSSEWTDDTGCEEETDEETAIRTRSFTESNTLSDTDNASD

SEQ ID NO: 27225 - DNA, 1025 bp, Muscodor strobelii
  misc_feature: SGI EST ID NO. CUFF.64259.0
  misc_feature: Variant of the nucleotide sequence at SEQ ID NO 27223
atttcagacaataatgatgcacttattcgactcgctgagggtacctataacttcaaggctgaatggtatcattacctcgaagggaagaaggcagacataccagcaatcgatatcagcttcactttcgaagtagacaaggacacgacaaatgtgccccatgacaagcaatcgacgaattcagactggcctgtctgcgacatctgcaatagtgaggaggcagatcagattgctgcgcatctatctgaggtgcaatcacgcataccacgtagattcatgcttgatgtcgtaccgcccttggaatttccaacgtgtgacgaagccatattcgtttttaactacgaaggaaaagcacaccatttcaagacagactcgtttgacttcaagcccgaatacccagttcgcgtgaaagatctgcgacaaatcatagcgaatactctgtggcgtcctgtacaaaacgagcaggataaaaatgctgatcacatcaattacgagagtttcatcgaacaacttaagtatcaggactgtgttctcgatgatcctgagcgagaacttagtgactgtgggatggaaaggtggaactggctcaaactgcaggccagcaagaagccctttgaccgggatcttgagcaagctaatgccacatctcttcggaatgcccttatcagaccccagcggagaggcgtggattcggccataggaagcgatgattcaagtgaatggaccgatgatacgggatgcgaagaagaaaccgatgaagagactgcaatacgtacgcgctctttcacggaatctaatacattaagtgatacggacaacgcgtcagattgaaaatagccagctggtgttattgaaaaggatcaacagtggccagacaacttgcgacctacctagtattggccgtcgctggtggccgtgagcagcttgtctttcctctatgggtatcttaccactttgttttctagtcttgttcgtagtcaactatactttgggttccttctttacactagttttttcgtcaaggttgc

SEQ ID NO: 27226 - DNA, 864 bp, Muscodor strobelii
  misc_feature: SGI cDNA ID NO. 569324
  misc_feature: Encodes the peptide sequence at SEQ ID NO 27227
atgggcaacgacggcggctcgatccccaagcgtcgcgaactagtaaaagaagccgcacgcctccccacctcctccgaactaaaagccaccgccctcgaatccctccaacactcctggagcgtctgccccatctcatcaacccccctcgacctacacaacacatgttccgactaccgcggcagattatacaactacgagacgatcctccaaaacctcatgcccaccgacgtctcccccgaggacgagaagtccatagaagcggccgagttcgctaagaccggcatcaagagtctgaaagatgtcgtgaaggtcaggttcaacgtgaggaaggataggaagggagaggtccctgtttgtccgctaagcatgaaggagcttggtcctgcgacgaaggcgtgctatgttgtgccgtgtggtcatgtctttgcggaggggggcatgagggaactcctcaccgccgagtcaggccctacacctaacggcgacagcccagaaaggaaagacaagaaaagagcatgtccagaatgcagcgagatattcctcgaccgggatatcatccccatacttcccgttgacgagacagaactcgagaaatgcacagcgaggatagaggagttgagagcgctgggtttggcgcataatctgaagaaggataagagtgttaatgggaagaaaaagaagagaaaggccgaagaggaaaatggtgaggagggggacaagaaagagaagaagccaaagaaggagaaggcgggtattgagagcaggatcaataattctatgacggcttctcttacggccaaggttctggcggagcaggatgagttgagcaggaggaggaagatgggcactacttctttgcgatga

SEQ ID NO: 27227 - protein, 287 aa, Muscodor strobelii
  misc_feature: SGI Peptide ID NO. 569324
  misc_feature (1)..(17): Pfam Id: PF04641 Pfam Desc: Domain of function, DUF602
  misc_feature (1)..(285): NCBI GI: 261361111 Blast Desc: DUF602 domain-containing protein [Verticillium albo-atrum VaMs.102]
  misc_feature (1)..(282): NCBI GI: 171678038 Blast Desc: protein product [Podospora anserina] gi|170937088|emb|CAP61746.1| protein product [Podospora anserina]
  misc_feature (1)..(284): NCBI GI: 39941384 Blast Desc: MGG_05603 [Magnaporthe grisea 70-15] gi|145022281|gb|EDK06301.1| MGG_05603 [Magnaporthe grisea 70-15]
  misc_feature (1)..(287): NCBI GI: 256722503 Blast Desc: [Nectria haematococca mpVI 77-13-4]
  misc_feature (1)..(236): NCBI GI: 164425523 Blast Desc: NCU05607 [Neurospora crassa OR74A] gi|157070960|gb|EAA31333.2| conserved [Neurospora crassa OR74A]
  misc_feature (1)..(287): NCBI GI: 46127513 Blast Desc: FG08134.1 [Gibberella zeae PH-1]
  misc_feature (1)..(283): NCBI GI: 116201673 Blast Desc: CHGG_08721 [Chaetomium globosum CBS 148.51] gi|88177239|gb|EAQ84707.1| CHGG_08721 [Chaetomium globosum CBS 148.51]
  misc_feature (1)..(282): NCBI GI: 156036514 Blast Desc: SS1G_12946 [Sclerotinia sclerotiorum 1980] gi|154698351|gb|EDN98089.1| SS1G_12946 [Sclerotinia sclerotiorum 1980]
  misc_feature (1)..(280): NCBI GI: 238837681 Blast Desc: DUF602 domain-containing protein [Microsporum canis CBS 113480]
  misc_feature (1)..(281): NCBI GI: 226283361 Blast Desc: DUF602 domain-containing protein [Paracoccidioides brasiliensis Pb01]
MGNDGGSIPKRRELVKEAARLPTSSELKATALESLQHSWSVCPISSTPLDLHNTCSDYRGRLYNYETILQNLMPTDVSPEDEKSIEAAEFAKTGIKSLKDVVKVRFNVRKDRKGEVPVCPLSMKELGPATKACYVVPCGHVFAEGGMRELLTAESGPTPNGDSPERKDKKRACPECSEIFLDRDIIPILPVDETELEKCTARIEELRALGLAHNLKKDKSVNGKKKKRKAEEENGEEGDKKEKKPKKEKAGIESRINNSMTASLTAKVLAEQDELSRRRKMGTTSLR

SEQ ID NO: 27228 - DNA, 1683 bp, Muscodor strobelii
  misc_feature: SGI cDNA ID NO. 569325
  misc_feature: Encodes the peptide sequence at SEQ ID NO 27229
atgcggcaatctcaggcattgatgcttatgggcatcatagcccagaatgggattgccacagccttgtccatacctagaggcgtcggccctgaatttgtcaagttctatgagatcaaggaaacgttcgcatgcatagcccatccttccatcatcctgtccgcttctcaagtcaacgacaatacctgcgattgtcccgatggctcagacgaaccaggcaccgccgcctgtgcactccttgaccgtctatcacccatacaacctctcccatcctctttgtcaggatccacaaacacaaccaatgccttgcccggcttctggtgtgagaacaagggccacattggtgcctacgtcccctttatgtacgtgaacgacggtgtctgtgactacgacctgtgctgtgacggcaccgaagaatacagagttggtggcacgaagtgcgagaacagatgtgcagaaatcggcaaggagtggcggcaagtcgagaagcagagacaggagaactttgacaaagccaacaagaagcgtgtcgtcatggccaaggagtctcaggatctccgtaaagaagtggagaagaaagtgaagagcctcgagtctgagatcaaagatctcgagaacaaacagtctgagttgaagaccaagctcgaggatgctgagcgcgcggataggggacgcgtggtcaagagcgagggtcctggaaagcttggggtgctagctggtctagccaagacaagggtcaatgagctgagagaggcactgagcggcgtcgtcgacgagcggaaagtcctgcaagacaaggttgctgagcttgagggtatcttgtctgcgttcaaggaggagtataatcctaacttcaatgacgagggtgtcaagaaggctgtcagagcttgggaagaatacgccgccaataaggtcgaggaggccgcggaagcgtttaccgagtctgatcttgctgagattgttaaggaagacagcgagtcctctggtatcaactgggatgaattcaaagaggatgatgtgtccgacacagatatcctatacacgttcgaggcctacctcccaggcccagtccgcgactacgtccacggcaaaatcaacgatctccgcgtctggttgatcgagaacggcatgattgctgacgtccgcagcaaagacggggaatccagcctcgtcaaagccgcccgcgaggctcacgacgctgccaagcgagacgttaactcgaagcgtcgcgctctcgacaccgagaaggataacttgaataaagactacggccacgaagacattttccgcgccctcgacggaaaatgcacatccgtcgaatcaggcgagtatgaatacgagctctgctggatgacctccacctcgcagaagagcaaaaagggaggttcacgaacaaatatgggcaagtacgagaaaatcacattccgtgattccgatgaggatgatcgccacgacggcaaggggttaggtaggggaaagaggatggtactggagtataacaatggtcaacattgctggaacgggcctaacaggcgcacagatgtctggctcgcttgtgcggagacggaggagctgtggagggtgagcgagcaggagaagtgtgtttataagatggaggttgggacgccggctgcttgtgtgcagtttgttgatccgcccgttgagcatgctaaggatgagttgtga

SEQ ID NO: 27229 - protein, 560 aa, Muscodor strobelii
  misc_feature: SGI Peptide ID NO. 569325
  misc_feature (433)..(501): Pfam Id: PF07915 Pfam Desc: Glucosidase II beta subunit-like protein
  misc_feature (1)..(551): NCBI GI: 85098057 Blast Desc: NCU05606 [Neurospora crassa OR74A] gi|28922061|gb|EAA31332.1| conserved [Neurospora crassa OR74A]
  misc_feature (1)..(560): NCBI GI: 171678040 Blast Desc: protein product [Podospora anserina] gi|170937089|emb|CAP61747.1| protein product [Podospora anserina]
  misc_feature (1)..(560): NCBI GI: 39941382 Blast Desc: MGG_05602 [Magnaporthe grisea 70-15] gi|145022280|gb|EDK06300.1| MGG_05602 [Magnaporthe grisea 70-15]
  misc_feature (1)..(545): NCBI GI: 256722504 Blast Desc: NECHADRAFT_66980 [Nectria haematococca mpVI 77-13-4]
  misc_feature (1)..(528): NCBI GI: 46127497 Blast Desc: FG08126.1 [Gibberella zeae PH-1]
  misc_feature (1)..(560): NCBI GI: 116201675 Blast Desc: CHGG_08722 [Chaetomium globosum CBS 148.51] gi|88177240|gb|EAQ84708.1| CHGG_08722 [Chaetomium globosum CBS 148.51]
  misc_feature (1)..(560): NCBI GI: 261361110 Blast Desc: glucosidase 2 subunit beta [Verticillium albo-atrum VaMs.102]
  misc_feature (1)..(560): NCBI GI: 154297826 Blast Desc: BC1G_11887 [Botryotinia fuckeliana B05.10] gi|150858328|gb|EDN33520.1| BC1G_11887 [Botryotinia fuckeliana B05.10]
  misc_feature (4)..(560): NCBI GI: 169598704 Blast Desc: SNOG_02157 [Phaeosphaeria nodorum SN15] gi|160704453|gb|EAT90369.2| SNOG_02157 [Phaeosphaeria nodorum SN15]
  misc_feature (1)..(560): NCBI GI: 156036512 Blast Desc: SS1G_12945 [Sclerotinia sclerotiorum 1980] gi|154698350|gb|EDN98088.1| SS1G_12945 [Sclerotinia sclerotiorum 1980]
MRQSQALMLMGIIAQNGIATALSIPRGVGPEFVKFYEIKETFACIAHPSIILSASQVNDNTCDCPDGSDEPGTAACALLDRLSPIQPLPSSLSGSTNTTNALPGFWCENKGHIGAYVPFMYVNDGVCDYDLCCDGTEEYRVGGTKCENRCAEIGKEWRQVEKQRQENFDKANKKRVVMAKESQDLRKEVEKKVKSLESEIKDLENKQSELKTKLEDAERADRGRVVKSEGPGKLGVLAGLAKTRVNELREALSGVVDERKVLQDKVAELEGILSAFKEEYNPNFNDEGVKKAVRAWEEYAANKVEEAAEAFTESDLAEIVKEDSESSGINWDEFKEDDVSDTDILYTFEAYLPGPVRDYVHGKINDLRVWLIENGMIADVRSKDGESSLVKAAREAHDAAKRDVNSKRRALDTEKDNLNKDYGHEDIFRALDGKCTSVESGEYEYELCWMTSTSQKSKKGGSRTNMGKYEKITFRDSDEDDRHDGKGLGRGKRMVLEYNNGQHCWNGPNRRTDVWLACAETEELWRVSEQEKCVYKMEVGTPAACVQFVDPPVEHAKDEL

SEQ ID NO: 27230 - DNA, 3167 bp, Muscodor strobelii
  misc_feature: SGI EST ID NO. CUFF.64318.0
  misc_feature: Variant of the nucleotide sequence at SEQ ID NO 27228
ctcgatctggtgtcgcgaaatgtcacttcccccaacaccgccttccgccgcgatcaccaattgaccaaaatgcggcaatctcaggcattgatgcttatgggcatcatagcccagaatgggattgccacagccttgtccatacctagaggcgtcggccctgaatttgtcaagttctatgagatcaaggaaacgttcgcatgcatagcccatccttccatcatcctgtccgcttctcaagtcaacgacaatacctgcgattgtcccgatggctcagacgaaccaggcaccgccgcctgtgcactccttgaccgtctatcacccatacaacctctcccatcctctttgtcaggatccacaaacacaaccaatgccttgcccggcttctggtgtgagaacaagggccacattggtgcctacgtcccctttatgtacgtgaacgacggtgtctgtgactacgacctgtgctgtgacggcaccgaagaatacagagttggtggcacgaagtgcgagaacagatgtgcagaaatcggcaaggagtggcggcaagtcgagaagcagagacaggagaactttgacaaagccaacaagaagcgtgtcgtcatggccaaggagtctcaggatctccgtaaagaagtggagaagaaagtgaagagcctcgagtctgagatcaaagatctcgagaacaaacagtctgagttgaagaccaagctcgaggatgctgagcgcgcggataggggacgcgtggtcaagagcgagggtcctggaaagcttggggtgctagctggtctagccaagacaagggtcaatgagctgagagaggcactgagcggcgtcgtcgacgagcggaaagtcctgcaagacaaggttgctgagcttgagggtatcttgtctgcgttcaaggaggagtataatcctaacttcaatgacgagggtgtcaagaaggctgtcagagcttgggaagaatacgccgccaataaggtcgaggaggccgcggaagcgtttaccgagtctgatcttgctgagattgttaaggaagacagcgagtcctctggtatcaactgggatgaattcaaagaggatgatgtgtccgacacagatatcctatacacgttcgaggcctacctcccaggcccagtccgcgactacgtccacggcaaaatcaacgatctccgcgtctggttgatcgagaacggcatgattgctgacgtccgcagcaaagacggggaatccagcctcgtcaaagccgcccgcgaggctcacgacgctgccaagcgagacgttaactcgaagcgtcgcgctctcgacaccgagaaggataacttgaataaagactacggccacgaagacattttccgcgccctcgacggaaaatgcacatccgtcgaatcaggcgagtatgaatacgagctctgctggatgacctccacctcgcagaagagcaaaaagggaggttcacgaacaaatatgggcaagtacgagaaaatcacattccgtgattccgatgaggatgatcgccacgacggcaaggggttaggtaggggaaagaggatggtactggagtataacaatggtcaacattgctggaacgggcctaacaggcgcacagatgtctggctcgcttgtgcggagacggaggagctgtggagggtgagcgagcaggagaagtgtgtttataagatggaggttgggacgccggctgcttgtgtgcagtttgttgatccgcccgttgagcatgctaaggatgagttgtgaagagcggcatgattgatatcaagcggtgtttttgcgttgggttgatcaggatgtgtaagatgtagtactacatggcatttggggatgtggtatagatgtgtggacaaaatagacaggcgatgaatcactgcattgtgcaacaccatattctaaggctcttgtgatttcgtcaatttcatgatgagatatgtacagcaatgcttcgcaacaaagccgttggcgccatatgatgtgcgaaccgtcgtcacacatctgtaccctcggcttccaagacaccatgcccatgtccagccgtattcatcatcgcaaagaagtagtgcccatcttcctcctcctgctcaactcatcctgctccgccagaaccttggccgtaagagaagccgtcatagaattattgatcctgctctcaatacccgccttctccttctttggcttcttctctttcttgtccccctcctcaccattttcctcttcggcctttctcttctttttcttcccattaacactcttatccttcttcagattatgcgccaaacccagcgctctcaactcctctatcctcgctgtgcatttctcgagttctgtctcgtcaacgggaagtatggggatgatatcccggtcgaggaatatctcgctgcattctggacatgctcttttcttgtctttcctttctgggctgtcgccgttaggtgtagggcctgactcggcggtgaggagttccctcatgcccccctccgcaaagacatgaccacacggcacaacatagcacgccttcgtcgcaggaccaagctccttcatgcttagcggacaaacagggacctctcccttcctatccttcctcacgttgaacctgaccttcacgacatctttcagactcttgatgccggtcttagcgaactcggccgcttctatggacttctcgtcctcgggggagacgtcggtgggcatgaggttttggaggatcgtctcgtagttgtataatctgccgcggtagtcggaacatgtgttgtgtaggtcgaggggggttgatgagatggggcagacgctccaggagtgttggagggattcgagggcggtggcttttagttcggaggaggtggggaggcgtgcggcttcttttactagttcgcgacgcttggggatcgagccgccgtcgttgcccatcttgaggaggctgtgagaggatgggcggcttggggcggtttgctggtcgttggatgatgggaggcgaggactaagtttcgtggagagcggcgcgcggatggtcttgatgtagcgagtttggggggatctatgcgcaggatgagctcaagtgctgctagtgttttgcaatgcgttggatgatatggagtcgtgttgcggctagacaatgttttggatgttttttgattgggataggctggttgaggctagcg

SEQ ID NO: 27231 - DNA, 801 bp, Muscodor strobelii
  misc_feature: SGI cDNA ID NO. 569326
  misc_feature: Encodes the peptide sequence at SEQ ID NO 27232
atggctgattgggattctttggccgacgagaacggtaatccgctcccgcgcatcaacggcatgaacgacgtccggaactacggtttgcttacgatgcgagcatacgacgcggttccccagctgcagccgaacgacttcccgaatccgcaggagatgaaggatgacaccttagccgtcatgcgagcaatgctcgaccagcggttcacttctcaggccgctgctaagcaagcctgggatgccatttacggcgacgccagcggtaacaagcccaaggagcctcgctaccccttgagtgaactcaaggccatggctatgactcttgtagagtgcgttatacttgccacgaacggtatttgctcctggtcgccgttcgaggatgcggtttttcctccttacggacagcttgctggctataggccgcgccttgccatgctcataagagtgctcagaatcaacaagggcctcgtaaagcaatgctttgatagcaactccttccctgccaagcttacttggaaccttacggggcgccttcagcgcggcaagttgaattcgaacagcaacagggagaaggctattcgatacgaacccgtaaggcccaaagttgacgaaggcaaaggcaaggctcgcgcccctttggccgcgccggaggcgaacacgcctatctcgccggaggacgatcaggtgaaaatcgtcaacgatgggccacagttcctcgctgttggtcttctaccagcccgcactgagaatctcgatgggtggctagcgaacgcgaatgcaggtgcagatggttcccagaactag

SEQ ID NO: 27232 - protein, 266 aa, Muscodor strobelii
  misc_feature: SGI Peptide ID NO. 569326
MADWDSLADENGNPLPRINGMNDVRNYGLLTMRAYDAVPQLQPNDFPNPQEMKDDTLAVMRAMLDQRFTSQAAAKQAWDAIYGDASGNKPKEPRYPLSELKAMAMTLVECVILATNGICSWSPFEDAVFPPYGQLAGYRPRLAMLIRVLRINKGLVKQCFDSNSFPAKLTWNLTGRLQRGKLNSNSNREKAIRYEPVRPKVDEGKGKARAPLAAPEANTPISPEDDQVKIVNDGPQFLAVGLLPARTENLDGWLANANAGADGSQN

SEQ ID NO: 27233 - DNA, 2967 bp, Muscodor strobelii
  misc_feature: SGI cDNA ID NO. 569327
  misc_feature: Encodes the peptide sequence at SEQ ID NO 27234
tgcccgggctacaccctcgtccagccctacgccgcccagggctacgacgtcgcctacgccttcgcccgcgacaccgccgtccccacgaccgtctgggcctggaacaagacgtactcgttcctcgacgccgccgtctggccccatctgcgcgaggtctacgtggccaaggtagagccccagctcgtccgcatcggcgagcgcctcggacgctacaagacgaggctcgaccacgccgctccggatgccgagactaccatccccagatctacgtttgtgaagcctaccatgtccgtcacctcctcggcaacctctattgccagcgaagtcaccgggtccgcgacccctatccccgccaaggaggatgccaagaccgccgagtctgctgcagaggtcaagtcggaccccgacgcgcccaagtcgcgggaggagatccgcgagctggccgccaagacggtcgccgaagacctggagctgtgggagggcaagttcagcaaggtcgccgaggaaggggcttcggagatcgaggatcgcgtcgacgacatctccacccgcatggtccagaaccacgccaacggcatgggcaaggccttgctgaaccagctggaaaccacggtcaactcggagatcgacttcctgaagaagaccatcctgcgcattctcgaaaacgcgcgggcaaacaaggacgaagacgtcgctgcggccgtccggagcgcgggcctgaagattaagaacaaggcccaggacatccgtgactggcgccagcgctacgagcaggagaccgagatcgccgtcaccaaggctgccgaggagcacttcaccattctcgaccagactagggatctggccctgcagaagatcggcatgaagtgggcgtggatggacggcgtcacctacaaggactggcagaagtaccatcagctccgcgctcgcttcgacgagtggaccaacgacctcaagcacctcatcaccacccaccccggcctcatcaccgctgaggcggccggcgtcgagactgaagacgaagccatggccatcgcccacgacgccgctgtcgagctgggacgactgaagcaggtcgctgcttggaaggcgacggctgaggattttagcgacgacttcgacagcaacaccatgcagctggccgccgaggccgctgagaagagactggctgaggctgccgaggtcgccaagcagaagctggccgaggaggctgaagccgcgcgattggctgccagcgaggtagttgacactgttgcatccggtgctcagtctgtgagcgaggctgttggtgaagctgtatcgagcgttgtctcgcccgatgtcagtgaagccagcaccaccaccgtcaccaacagcgagcagtcggagactgtcaccgtttcgctgtcccacggcgatgatgctccagcagattccgaaacgtctgctctgccacccatggaaagtctggcatctgagcctaccgagagtgcgactgatctcaccgttgaatccaccaaccccgccgagccagtcgagccgctgcccacatctgatcctgttgacggaccagaacagatggaggagaccctgttggaatcgagcgatctgcccatccacaccgttgaccccgaagctactcatgcccctgtcaagtcggcgttcctgggagctgctgccgagtctgttcccacaagatcgcccatcctcgatgatgaagtcgtctcctcggcatctagcgcattctccgttgtgcagtccaatgtccccgccagcatcacctctgccgcgcaggcggcctatacggcagccattgtcggggccgctgataactatgccaaagccatctctgcagtctcggctcagattcacggcgagcccaagcctgcccacgaggaaatgcttagctctgtctccagcggttattttagcgctatggctgcggccaactcgcagctcagtgtcgtcatggacgcagcatcgaagagcgtctacggcactccaacgacgaaatggatgcccgagatgcccaccgtaccatccgtggactgggagaaagtccaatccatcgcacagcagaatctacatgattctgtaaactgggcatctgaccagtatgaagctgccaaggtagctattggtgctgctgagcccacgcccagcacgtacctcgaagcggctgaaaagagagccgagaagctggccgatcaagccaaacacaactactatgctggtgttggcatcgctcatgctcgttactccgaattcttgtcggcagcctccactgcaatgagctctctcacagccaccccgacacccaccgacattcaaggatctgcatcgtcggtcgcctctgtcgcaagcgaatccgctgcgtctgccgtgtccgctgcgagcgatgctgccgagtcggttgcctcgtctgtaggcggtgttgcggccgacgctaaagaagccgctggtcagaattgggatgcactcgtcagtcgcgtaagctctcaagtgtacggcgccccaacaccaacagtctggtacgaggacctgtacgcagctgctggtgactacgcatcgcaagccggcgactatgccgccgccgctaccgacgcggccgccgaccagatttctgccgcctcctcgttcgccggggattacgcctcgtccgctgctgagcaaatggccattgcctcgtcgcttgctgaagactatgcagcatccgcaagctctgctgcttcgtctcagtatgctgccgtgagctcattggtttctgaactcattatcggcaaggagcctacgttcactgagtctgtgttcgcacgactgggggaggcttacacaacgggcttcgcctcggcatccagcatcgccagcgtggcctccgctaccattgtcagcgccgcagctgaagtcacggatgcagcaggcgaaatgtacgccgaggccacggacaaggtcaaggaaactgtggagtatctcaaagacgagctatga

SEQ ID NO: 27234 - protein, 988 aa, Muscodor strobelii
  misc_feature: SGI Peptide ID NO. 569327
  misc_feature (2)..(988): NCBI GI: 256726392 Blast Desc: NECHADRAFT_68795 [Nectria haematococca mpVI 77-13-4]
  misc_feature (1)..(988): NCBI GI: 145609011 Blast Desc: MGG_09082 [Magnaporthe grisea 70-15] gi|145016474|gb|EDK00904.1| MGG_09082 [Magnaporthe grisea 70-15]
  misc_feature (1)..(772): NCBI GI: 171685248 Blast Desc: protein product [Podospora anserina] gi|170942585|emb|CAP68237.1| protein product [Podospora anserina]
  misc_feature (1)..(776): NCBI GI: 85090325 Blast Desc: NCU07514 [Neurospora crassa OR74A] gi|28919719|gb|EAA29126.1| [Neurospora crassa OR74A]
  misc_feature (1)..(379): NCBI GI: 261354202 Blast Desc: conserved [Verticillium albo-atrum VaMs.102]
  misc_feature (2)..(385): NCBI GI: 46124411 Blast Desc: FG06583.1 [Gibberella zeae PH-1]
  misc_feature (1)..(406): NCBI GI: 154298823 Blast Desc: BC1G_11303 [Botryotinia fuckeliana B05.10] gi|150857699|gb|EDN32891.1| BC1G_11303 [Botryotinia fuckeliana B05.10]
  misc_feature (544)..(988): NCBI GI: 261354202 Blast Desc: conserved [Verticillium albo-atrum VaMs.102]
  misc_feature (1)..(836): NCBI GI: 189188730 Blast Desc: conserved [Pyrenophora tritici-repentis Pt-1C-BFP] gi|187972310|gb|EDU39809.1| conserved [Pyrenophora tritici-repentis Pt-1C-BFP]
  misc_feature (537)..(988): NCBI GI: 116208758 Blast Desc: CHGG_03672 [Chaetomium globosum CBS 148.51] gi|88184269|gb|EAQ91737.1| CHGG_03672 [Chaetomium globosum CBS 148.51]
CPGYTLVQPYAAQGYDVAYAFARDTAVPTTVWAWNKTYSFLDAAVWPHLREVYVAKVEPQLVRIGERLGRYKTRLDHAAPDAETTIPRSTFVKPTMSVTSSATSIASEVTGSATPIPAKEDAKTAESAAEVKSDPDAPKSREEIRELAAKTVAEDLELWEGKFSKVAEEGASEIEDRVDDISTRMVQNHANGMGKALLNQLETTVNSEIDFLKKTILRILENARANKDEDVAAAVRSAGLKIKNKAQDIRDWRQRYEQETEIAVTKAAEEHFTILDQTRDLALQKIGMKWAWMDGVTYKDWQKYHQLRARFDEWTNDLKHLITTHPGLITAEAAGVETEDEAMAIAHDAAVELGRLKQVAAWKATAEDFSDDFDSNTMQLAAEAAEKRLAEAAEVAKQKLAEEAEAARLAASEVVDTVASGAQSVSEAVGEAVSSVVSPDVSEASTTTVTNSEQSETVTVSLSHGDDAPADSETSALPPMESLASEPTESATDLTVESTNPAEPVEPLPTSDPVDGPEQMEETLLESSDLPIHTVDPEATHAPVKSAFLGAAAESVPTRSPILDDEVVSSASSAFSVVQSNVPASITSAAQAAYTAAIVGAADNYAKAISAVSAQIHGEPKPAHEEMLSSVSSGYFSAMAAANSQLSVVMDAASKSVYGTPTTKWMPEMPTVPSVDWEKVQSIAQQNLHDSVNWASDQYEAAKVAIGAAEPTPSTYLEAAEKRAEKLADQAKHNYYAGVGIAHARYSEFLSAASTAMSSLTATPTPTDIQGSASSVASVASESAASAVSAASDAAESVASSVGGVAADAKEAAGQNWDALVSRVSSQVYGAPTPTVWYEDLYAAAGDYASQAGDYAAAATDAAADQISAASSFAGDYASSAAEQMAIASSLAEDYAASASSAASSQYAAVSSLVSELIIGKEPTFTESVFARLGEAYTTGFASASSIASVASATIVSAAAEVTDAAGEMYAEATDKVKETVEYLKDEL

SEQ ID NO: 27235 - DNA, 3674 bp, Muscodor strobelii
  misc_feature: SGI EST ID NO. CUFF.64388.1
  misc_feature: Variant of the nucleotide sequence at SEQ ID NO 27233
ccgggctacaccctcgtccagccctacgccgcccagggctacgacgtcgcctacgccttcgcccgcgacaccgccgtccccacgaccgtctgggcctggaacaagacgtactcgttcctcgacgccgccgtctggccccatctgcgcgaggtctacgtggccaaggtagagccccagctcgtccgcatcggcgagcgcctcggacgctacaagacgaggctcgaccacgccgctccggatgccgagactaccatccccagatctacgtttgtgaagcctaccatgtccgtcacctcctcggcaacctctattgccagcgaagtcaccgggtccgcgacccctatccccgccaaggaggatgccaagaccgccgagtctgctgcagaggtcaagtcggaccccgacgcgcccaagtcgcgggaggagatccgcgagctggccgccaagacggtcgccgaagacctggagctgtgggagggcaagttcagcaaggtcgccgaggaaggggcttcggagatcgaggatcgcgtcgacgacatctccacccgcatggtccagaaccacgccaacggcatgggcaaggccttgctgaaccagctggaaaccacggtcaactcggagatcgacttcctgaagaagaccatcctgcgcattctcgaaaacgcgcgggcaaacaaggacgaagacgtcgctgcggccgtccggagcgcgggcctgaagattaagaacaaggcccaggacatccgtgactggcgccagcgctacgagcaggagaccgagatcgccgtcaccaaggctgccgaggagcacttcaccattctcgaccagactagggatctggccctgcagaagatcggcatgaagtgggcgtggatggacggcgtcacctacaaggactggcagaagtaccatcagctccgcgctcgcttcgacgagtggaccaacgacctcaagcacctcatcaccacccaccccggcctcatcaccgctgaggcggccggcgtcgagactgaagacgaagccatggccatcgcccacgacgccgctgtcgagctgggacgactgaagcaggtcgctgcttggaaggcgacggctgaggattttagcgacgacttcgacagcaacaccatgcagctggccgccgaggccgctgagaagagactggctgaggctgccgaggtcgccaagcagaagctggccgaggaggctgaagccgcgcgattggctgccagcgaggtagttgacactgttgcatccggtgctcagtctgtgagcgaggctgttggtgaagctgtatcgagcgttgtctcgcccgatgtcagtgaagccagcaccaccaccgtcaccaacagcgagcagtcggagactgtcaccgtttcgctgtcccacggcgatgatgctccagcagattccgaaacgtctgctctgccacccatggaaagtctggcatctgagcctaccgagagtgcgactgatctcaccgttgaatccaccaaccccgccgagccagtcgagccgctgcccacatctgatcctgttgacggaccagaacagatggaggagaccctgttggaatcgagcgatctgcccatccacaccgttgaccccgaagctactcatgcccctgtcaagtcggcgttcctgggagctgctgccgagtctgttcccacaagatcgcccatcctcgatgatgaagtcgtctcctcggcatctagcgcattctccgttgtgcagtccaatgtccccgccagcatcacctctgccgcgcaggcggcctatacggcagccattgtcggggccgctgataactatgccaaagccatctctgcagtctcggctcagattcacggcgagcccaagcctgcccacgaggaaatgcttagctctgtctccagcggttattttagcgctatggctgcggccaactcgcagctcagtgtcgtcatggacgcagcatcgaagagcgtctacggcactccaacgacgaaatggatgcccgagatgcccaccgtaccatccgtggactgggagaaagtccaatccatcgcacagcagaatctacatgattctgtaaactgggcatctgaccagtatgaagctgccaaggtagctattggtgctgctgagcccacgcccagcacgtacctcgaagcggctgaaaagagagccgagaagctggccgatcaagccaaacacaactactatgctggtgttggcatcgctcatgctcgttactccgaattcttgtcggcagcctccactgcaatgagctctctcacagccaccccgacacccaccgacattcaaggatctgcatcgtcggtcgcctctgtcgcaagcgaatccgctgcgtctgccgtgtccgctgcgagcgatgctgccgagtcggttgcctcgtctgtaggcggtgttgcggccgacgctaaagaagccgctggtcagaattgggatgcactcgtcagtcgcgtaagctctcaagtgtacggcgccccaacaccaacagtctggtacgaggacctgtacgcagctgctggtgactacgcatcgcaagccggcgactatgccgccgccgctaccgacgcggccgccgaccagatttctgccgcctcctcgttcgccggggattacgcctcgtccgctgctgagcaaatggccattgcctcgtcgcttgctgaagactatgcagcatccgcaagctctgctgcttcgtctcagtatgctgccgtgagctcattggtttctgaactcattatcggcaaggagcctacgttcactgagtctgtgttcgcacgactgggggaggcttacacaacgggcttcgcctcggcatccagcatcgccagcgtggcctccgctaccattgtcagcgccgcagctgaagtcacggatgcagcaggcgaaatgtacgccgaggccacggacaaggtcaaggaaactgtggagtatctcaaagacgagctatgatctgaactctagcagattcacctcaacaaggctggaggtacattcttaacatggccgattgcaagaccctacttgatgcagatgaatgagtactagccgcgcttcatccacgcatacaaggtctctggacttcatatctttttactattcgacctatttttacccatcgcattctactgacgagtctcaacaagcatatcggcgctctttctattgcatatacccaatccatccttgtcactggtatgactctgagaatcacgcgaaatactgaacgcgttgtgtctcggaagtattgggggggctttgcgctacggtcagtaatgatctactttctggatgagagccgagaactgggaacgtcatgagggaagaactgcttgtattaccactcgacttgaggacgtgaagcatgagaacaacagaagcgagagagcggataatggaactcggggatgcagagaacatctgcgaggctggctagctatggttgagtgtgcacaatggggatgtgacaatattgggaagagggtagacggacggagaggcgagcagaaatgaagtcttatgatcaacctttattacgcatgttgtacatggatatatatgtattattgaggatacctcatttcaggcccaggcaaaactgatgaccaatgctgtgttattccaaacgtaacccaattttgctatcttactaaggaactaag

SEQ ID NO: 27236 - DNA, 702 bp, Muscodor strobelii
  misc_feature: SGI cDNA ID NO. 569328
  misc_feature: Encodes the peptide sequence at SEQ ID NO 27237
atggcgcaagttctatccccagcagagattcaacgagcggcgtcactgcaagaagcccaagacaaggcccttcacttatttgacgacatagccaaggagttgatacgtccaggtgttagcgaaaaagagcttacgaaagagatttacgagctgggcgaacgcaagcacggcattaagacgcactggcacaaacgagttgtgcgatccggccccaacactcttaaaccatacgctgagaacccggaggatcgtgtcatacaggaggacgatattctgttcgtggacttgggccctgtgtttgaggcatgggaggcagattttggtcgcacgtacgtgctgggcaacgacccggccaagatcaagcttcgtgatgcgctcgagccaatgtggaaaaacgtcaaggcacaattcgatgcgaaccccgatatgacgggcgaagaactgtacaatatttcatgtcaagctgcaaaagcagagggctacgagtatggtggcccgctcgctggccatttggttggcgatttccctcacgagcgcattcccaaggacaagatagctttgtacgctactcccggaaacacggacgtcattcgatcgctaggcaaggatggacacaagcggcattggattttggagattcatctggttgaccgcgagaagcagataggaggattttttgagcaactgcttacggttgattga

SEQ ID NO: 27237 - protein, 233 aa, Muscodor strobelii
  misc_feature: SGI Peptide ID NO. 569328
  misc_feature (14)..(232): Pfam Id: PF00557 Pfam Desc: metallopeptidase family M24
  misc_feature (8)..(233): NCBI GI: 256723222 Blast Desc: NECHADRAFT_97195 [Nectria haematococca mpVI 77-13-4]
  misc_feature (5)..(233): NCBI GI: 255941806 Blast Desc: Pc16g13730 [Penicillium chrysogenum Wisconsin 54-1255] gi|211586295|emb|CAP94043.1| Pc16g13730 [Penicillium chrysogenum Wisconsin 54-1255]
  misc_feature (9)..(231): NCBI GI: 145241496 Blast Desc: An09g00700 [Aspergillus niger] gi|134077932|emb|CAL00330.1| protein product [Aspergillus niger]
  misc_feature (9)..(233): NCBI GI: 115389372 Blast Desc: conserved [Aspergillus terreus NIH2624] gi|114194587|gb|EAU36287.1| conserved [Aspergillus terreus NIH2624]
  misc_feature (11)..(232): NCBI GI: 169771017 Blast Desc: [Aspergillus oryzae RIB40] gi|238486484|ref|XP_002374480.1| conserved [Aspergillus flavus NRRL3357] gi|83767837|dbj|BAE57976.1| protein product oryzae]
  misc_feature (5)..(231): NCBI GI: 212537895 Blast Desc: conserved [Penicillium marneffei ATCC 18224] gi|210068845|gb|EEA22936.1| conserved [Penicillium marneffei ATCC 18224]
  misc_feature (1)..(202): NCBI GI: 157488551 Blast Desc: [Claviceps fusiformis]
  misc_feature (5)..(233): NCBI GI: 226310024 Blast Desc: BBR47_04370 [Brevibacillus brevis NBRC 100599] gi|226092972|dbj|BAH41414.1| conserved [Brevibacillus brevis NBRC 100599]
  misc_feature (12)..(232): NCBI GI: 280964672 Blast Desc: peptidase M24 [Frankia sp. EuI1c] gi|270731248|gb|EFA59485.1| peptidase M24 [Frankia sp. EuI1c]
  misc_feature (5)..(232): NCBI GI: 118464660 Blast Desc: aminopeptidase [Mycobacterium avium 104] gi|118165947|gb|ABK66844.1| aminopeptidase [Mycobacterium avium 104]
  misc_feature (16)..(178): SWISSPROT Homolog: EC 3.4.13.9 Xaa-Pro dipeptidase
MAQVLSPAEIQRAASLQEAQDKALHLFDDIAKELIRPGVSEKELTKEIYELGERKHGIKTHWHKRVVRSGPNTLKPYAENPEDRVIQEDDILFVDLGPVFEAWEADFGRTYVLGNDPAKIKLRDALEPMWKNVKAQFDANPDMTGEELYNISCQAAKAEGYEYGGPLAGHLVGDFPHERIPKDKIALYATPGNTDVIRSLGKDGHKRHWILEIHLVDREKQIGGFFEQLLTVD

SEQ ID NO: 27238 - DNA, 1926 bp, Muscodor strobelii
  misc_feature: SGI cDNA ID NO. 569329
  misc_feature: Reduced expression when VOC is produced
  misc_feature: Encodes the peptide sequence at SEQ ID NO 27239
atggcggcggaaccccaggaaaaacgacaatcgccgggcaccctgaccccagacgggaacgcggacagttctgcttcttctaatcacgacgctaatgccaccaagaaagagaacaccggcgaaaaacgggaactcaaggaagaggattgtgagagcgagctgggctatgccttctcggagaagaagaaatggtggattctgaccgtcatattcctcgttcagacctccatgaacttcaacacttcactttactcaaatggtatcgtcggaatttcagatcatttcaacgtcagcgagcaagctgcgcgtgccggtgccgccatctatcttatcacttatgcctttggatgcgagctatgggcgccctggtccgaagaattcggtcgaaagcccattttgcaactctccctcttcctcacgaatctttggaacttgccagttgttttggctcccaactttggctctctgctcgtgggcagagctctgggtggactgtccaccgctggtggcagtgtcacgttgggtatgatcgctgatttatatgaagccgacaggcaacaatatgctgtggcctatattgttttctcgtcagtcggcgggtcggttcttgggcccattgttggaggctttgtcgagattttagctcccgggcaagcctggaagtggtgtgtctggatccagctcatcttcggcggtgctgtccaagtcctccatttcttcaccgttcccgagacgcgaacgaccgtgatgatgaacgggatcgccaagaggcgaagaaagaccggccaggacccgaacgtttacggtcccgacgagatcgagtcagtctggaaacgtttcacgatgaaagaactgctcattacctggatgcgacccttccgcatgttcataaccgaacctatcgtcctctcactgtctttgctctctggtttctctgatgccctcatcttcgttcagattcaatctcttgcacttgtgtacaagcaatggggcttcaacagctggcaaataggtttggcttttgttggctttggcgtgggttacttactcgcctggcttatctttatcccatccttcagcagaaacaagaagaagagagagcagaatccagacgacgagcatgctcagtatgaatccaggatgtctctactgctctggttggcacccttgcttcccattggtcttctcatcttcgcttttgtgagctccgggccccctcttcactggattggtcctgtgattgccaccgccatcatcggtattgccaactatgctatctatatggctacaattgattacatgatttgcgcgtacggtccatactctgcgtctgctactggtggcaatggttgggctcgagacttcctagcaggtgttcttaccgtcccggccactccgttctacacgaacatcggcgcagcccagcataaaaatttcgagtacccttctctcatattgtttgctatctcggtagtgctcgttgcagctgtttactgggtgtattggaaaggtcccacgctccgaaaacggtcaccattcgcgcagagtctggcacaaggcaccgctgaagtcagtggccgccgcgtcagcaatgcgacgcgccggtctagtactgcgacagcaggaggtatgatgccaccgaatgccggcattgaaaccgacgtggagcgtcaagcggcagtgtcgcatataactagaacgcccaaccgccctaggttcgggcccgaatcccgtcgcagctcatacgagtctagccacaacgctacttctcgtcgccagagtcgcaacgcatcgcgtaacgtcagcaggaggaatagcgcggaggcggagcgcgatgaccaattaggagatctgagcggcgagacgttgcataaccgtctgcatcacaatttgactacgataccgtcagtgcaagacagccattaa

SEQ ID NO: 27239 - protein, 641 aa, Muscodor strobelii
  misc_feature: SGI Peptide ID NO. 569329
  misc_feature (70)..(461): Pfam Id: PF07690 Pfam Desc: Major Facilitator Superfamily
  misc_feature (18)..(607): NCBI GI: 46126373 Blast Desc: FG07564.1 [Gibberella zeae PH-1]
  misc_feature (18)..(603): NCBI GI: 256724790 Blast Desc: [Nectria haematococca mpVI 77-13-4]
  misc_feature (30)..(623): NCBI GI: 71004592 Blast Desc: UM00815.1 [Ustilago maydis 521] gi|46095676|gb|EAK80909.1| UM00815.1 [Ustilago maydis 521]
  misc_feature (16)..(540): NCBI GI: 259479511 Blast Desc: TPA: MFS multidrug transporter, (AFU_orthologue; AFUA_2G12550) [Aspergillus nidulans FGSC A4]
  misc_feature (15)..(617): NCBI GI: 156060961 Blast Desc: SS1G_02623 [Sclerotinia sclerotiorum 1980] gi|154700027|gb|EDN99765.1| SS1G_02623 [Sclerotinia sclerotiorum 1980]
  misc_feature (7)..(606): NCBI GI: 145231624 Blast Desc: An02g01480 [Aspergillus niger] gi|134056190|emb|CAK96365.1| protein product [Aspergillus niger]
  misc_feature (28)..(606): NCBI GI: 121715856 Blast Desc: MFS multidrug transporter, [Aspergillus clavatus NRRL 1] gi|119403694|gb|EAW14111.1| MFS multidrug transporter, [Aspergillus clavatus NRRL 1]
  misc_feature (7)..(546): NCBI GI: 189192414 Blast Desc: multidrug transporter [Pyrenophora tritici-repentis Pt-1C-BFP] gi|187974152|gb|EDU41651.1| multidrug transporter [Pyrenophora tritici-repentis Pt-1C-BFP]
  misc_feature (13)..(606): NCBI GI: 212542495 Blast Desc: MFS multidrug transporter, [Penicillium marneffei ATCC 18224] gi|210066309|gb|EEA20402.1| MFS multidrug transporter, [Penicillium marneffei ATCC 18224]
  misc_feature (7)..(606): NCBI GI: 169774727 Blast Desc: [Aspergillus oryzae RIB40] gi|83769694|dbj|BAE59829.1| protein product [Aspergillus oryzae]
  misc_feature: Useful for introducing or modulating the production of volatile compounds
MAAEPQEKRQSPGTLTPDGNADSSASSNHDANATKKENTGEKRELKEEDCESELGYAFSEKKKWWILTVIFLVQTSMNFNTSLYSNGIVGISDHFNVSEQAARAGAAIYLITYAFGCELWAPWSEEFGRKPILQLSLFLTNLWNLPVVLAPNFGSLLVGRALGGLSTAGGSVTLGMIADLYEADRQQYAVAYIVFSSVGGSVLGPIVGGFVEILAPGQAWKWCVWIQLIFGGAVQVLHFFTVPETRTTVMMNGIAKRRRKTGQDPNVYGPDEIESVWKRFTMKELLITWMRPFRMFITEPIVLSLSLLSGFSDALIFVQIQSLALVYKQWGFNSWQIGLAFVGFGVGYLLAWLIFIPSFSRNKKKREQNPDDEHAQYESRMSLLLWLAPLLPIGLLIFAFVSSGPPLHWIGPVIATAIIGIANYAIYMATIDYMICAYGPYSASATGGNGWARDFLAGVLTVPATPFYTNIGAAQHKNFEYPSLILFAISVVLVAAVYWVYWKGPTLRKRSPFAQSLAQGTAEVSGRRVSNATRRSSTATAGGMMPPNAGIETDVERQAAVSHITRTPNRPRFGPESRRSSYESSHNATSRRQSRNASRNVSRRNSAEAERDDQLGDLSGETLHNRLHHNLTTIPSVQDSH

SEQ ID NO: 27240 - DNA, 3590 bp, Muscodor strobelii
  misc_feature: SGI EST ID NO. CUFF.64354.0
  misc_feature: Variant of the nucleotide sequence at SEQ ID NO 27238
cgcctccaaagacaaactgggtcactgtcagcatgcttccaaaacttgcgccgtaacacgcttaatttgtcgtgcggtagaaaatctaaactgtaaactgcaggtgtaagcgtgcatgtagcccggtattaatagtccataactcctcaacgctttccccatccccagagaagtttagatttctccccagaccttccgcaaactccctccgtgcttcatccccccaaaataacatcatcggctactgacttacccattatcacacacaacaaccatatctcagcatcgtcattcgggttacactttatcagatcgcccattatggcggcggaaccccaggaaaaacgacaatcgccgggcaccctgaccccagacgggaacgcggacagttctgcttcttctaatcacgacgctaatgccaccaagaaagagaacaccggcgaaaaacgggaactcaaggaagaggattgtgagagcgagctgggctatgccttctcggagaagaagaaatggtggattctgaccgtcatattcctcgttcagacctccatgaacttcaacacttcactttactcaaatggtatcgtcggaatttcagatcatttcaacgtcagcgagcaagctgcgcgtgccggtgccgccatctatcttatcacttatgcctttggatgcgagctatgggcgccctggtccgaagaattcggtcgaaagcccattttgcaactctccctcttcctcacgaatctttggaacttgccagttgttttggctcccaactttggctctctgctcgtgggcagagctctgggtggactgtccaccgctggtggcagtgtcacgttgggtatgatcgctgatttatatgaagccgacaggcaacaatatgctgtggcctatattgttttctcgtcagtcggcgggtcggttcttgggcccattgttggaggctttgtcgagattttagctcccgggcaagcctggaagtggtgtgtctggatccagctcatcttcggcggtgctgtccaagtcctccatttcttcaccgttcccgagacgcgaacgaccgtgatgatgaacgggatcgccaagaggcgaagaaagaccggccaggacccgaacgtttacggtcccgacgagatcgagtcagtctggaaacgtttcacgatgaaagaactgctcattacctggatgcgacccttccgcatgttcataaccgaacctatcgtcctctcactgtctttgctctctggtttctctgatgccctcatcttcgttcagattcaatctcttgcacttgtgtacaagcaatggggcttcaacagctggcaaataggtttggcttttgttggctttggcgtgggttacttactcgcctggcttatctttatcccatccttcagcagaaacaagaagaagagagagcagaatccagacgacgagcatgctcagtatgaatccaggatgtctctactgctctggttggcacccttgcttcccattggtcttctcatcttcgcttttgtgagctccgggccccctcttcactggattggtcctgtgattgccaccgccatcatcggtattgccaactatgctatctatatggctacaattgattacatgatttgcgcgtacggtccatactctgcgtctgctactggtggcaatggttgggctcgagacttcctagcaggtgttcttaccgtcccggccactccgttctacacgaacatcggcgcagcccagcataaaaatttcgagtacccttctctcatattgtttgctatctcggtagtgctcgttgcagctgtttactgggtgtattggaaaggtcccacgctccgaaaacggtcaccattcgcgcagagtctggcacaaggcaccgctgaagtcagtggccgccgcgtcagcaatgcgacgcgccggtctagtactgcgacagcaggaggtatgatgccaccgaatgccggcattgaaaccgacgtggagcgtcaagcggcagtgtcgcatataactagaacgcccaaccgccctaggttcgggcccgaatcccgtcgcagctcatacgagtctagccacaacgctacttctcgtcgccagagtcgcaacgcatcgcgtaacgtcagcaggaggaatagcgcggaggcggagcgcgatgaccaattaggagatctgagcggcgagacgttgcataaccgtctgcatcacaatttgactacgataccgtcagtgcaagacagccattaatttagagaatacagcccaatcagatgcgacgcccaggcattatttgtatatatagggaacacttgtactgtagtgaattgttgcatgataccttttgaagtttacacttaaattcataagaagtttccgagcacgcaaatcctcattgcggcaattgtttgtgaacaatggcccgaagcctactatagggaaatgacagtacgtacatgcatgaaaatagataaggtgaaatatatttttttcgaacagaatagctgcaccgagctgtttatccccaattatcaagaaacgcccctcatgcttctagaagttgaatcccgagcattctatgctatccgtacatctatctaccacctgttaattgaccggatcgacctcaatcaaccgtaagcagttgctcaaaaaatcctcctatctgcttctcgcggtcaaccagatgaatctccaaaatccaatgccgcttgtgtccatccttgcctagcgatcgaatgacgtccgtgtttccgggagtagcgtacaaagctatcttgtccttgggaatgcgctcgtgagggaaatcgccaaccaaatggccagcgagcgggccaccatactcgtagccctctgcttttgcagcttgacatgaaatattgtacagttcttcgcccgtcatatcggggttcgcatcgaattgtgccttgacgtttttccacattggctcgagcgcatcacgaagcttgatcttggccgggtcgttgcccagcacgtacgtgcgaccaaaatctgcctcccatgcctcaaacacagggcccaagtccacgaacagaatatcgtcctcctgtatgacacgatcctccgggttctcagcgtatggtttaagagtgttggggccggatcgcacaactcgtttgtgccagtgcgtcttaatgccgtgcttgcgttcgcccagctcgtaaatctctttcgtaagctctttttcgctaacacctggacgtatcaactccttggctatgtcgtcaaataagtgaagggccttgtcttgggcttcttgcagtgacgccgctcgttgaatctctgctggggatagaacttgcgccatatcgtgagatctcattcggtgcagctttacaactagtttttttttcctatgagtctatcataaacgaatccacgaaatgttgaagatactacttattgtcgagtgcaagaatatgagtctaatgcgtttgtaattcagtgattctgattgcacatatatccagtaggggtaccccgcagtagggtgcgcttatctctgactgacagctgagacacacctcaaaggcaggcccggtacgtcctctcaaccccagagttgagtttta

SEQ ID NO: 27241 - DNA, 312 bp, Muscodor strobelii
  misc_feature: SGI cDNA ID NO. 569330
  misc_feature: Encodes the peptide sequence at SEQ ID NO 27242
atgcaactctcaaatcggatcgccgatgtagacgcatcaccagacgacaatacaccgatcatcctcattccagcatatttgtttctcgttctatgtcctgtcatcgtcagtacacggatctggtcacgaagacgaaccggggggaaattaggtcccgatgactattctatcctcgcatctcttgtttttggaatcgcttcagacgtcacaatgatagtcggctgtcactttggctacggcaagcatgccaaaactctgacagaatctcagagatacggcgcattcatggtacaaaagatagccttggtctag

SEQ ID NO: 27242 - protein, 103 aa, Muscodor strobelii
  misc_feature: SGI Peptide ID NO. 569330
  misc_feature (11)..(95): NCBI GI: 256726386 Blast Desc: NECHADRAFT_100276 [Nectria haematococca mpVI 77-13-4]
  misc_feature (21)..(91): NCBI GI: 255937079 Blast Desc: Pc13g11490 [Penicillium chrysogenum Wisconsin 54-1255] gi|211584186|emb|CAP92218.1| Pc13g11490 [Penicillium chrysogenum Wisconsin 54-1255]
  misc_feature (7)..(91): NCBI GI: 46108224 Blast Desc: FG00994.1 [Gibberella zeae PH-1]
  misc_feature (1)..(82): NCBI GI: 238837520 Blast Desc: integral membrane protein [Microsporum canis CBS 113480]
  misc_feature (15)..(82): NCBI GI: 119194057 Blast Desc: CIMG_01403 [Coccidioides immitis RS]
  misc_feature (8)..(103): NCBI GI: 261360518 Blast Desc: integral membrane protein [Verticillium albo-atrum VaMs.102]
  misc_feature (7)..(101): NCBI GI: 261357381 Blast Desc: integral membrane protein [Verticillium albo-atrum VaMs.102]
  misc_feature (16)..(89): NCBI GI: 119483064 Blast Desc: plasma membrane protein Pth11, [Neosartorya fischeri NRRL 181] gi|119409715|gb|EAW19663.1| plasma membrane protein Pth11, [Neosartorya fischeri NRRL 181]
  misc_feature (15)..(103): NCBI GI: 255943321 Blast Desc: Pc18g06020 [Penicillium chrysogenum Wisconsin 54-1255] gi|211587162|emb|CAP94826.1| Pc18g06020 [Penicillium chrysogenum Wisconsin 54-1255]
  misc_feature (16)..(89): NCBI GI: 146324862 Blast Desc: plasma membrane protein Pth11-like [Aspergillus fumigatus Af293] gi|129556622|gb|EAL86859.2| plasma membrane protein Pth11-like, [Aspergillus fumigatus Af293] plasma membrane
MQLSNRIADVDASPDDNTPIILIPAYLFLVLCPVIVSTRIWSRRRTGGKLGPDDYSILASLVFGIASDVTMIVGCHFGYGKHAKTLTESQRYGAFMVQKIALV

SEQ ID NO: 27243 - DNA, 1524 bp, Muscodor strobelii
  misc_feature: SGI cDNA ID NO. 569331
  misc_feature: Encodes the peptide sequence at SEQ ID NO 27244
atgccgcattctctcacctccgacggcttgtcggaggagcatcccaccaaagtcgacatgacacccatcgtgaatgacaccgagaaagcaatctcgattactgaagacatcgccaatgtacctggcggtgcaatcgaccccgccgccgagcgccgactgcttttcaagatcgacatgcacgtttaccctatcctcttcattgtgtatgccctctcgttcctcgatcgcatcaacatcagcaatgcacgcatccaaggcctcaccgaagagctcgatctctatggcaatcggttcaatattgccctcttcgtttacttcattccttacatcctactggagatcccaagtaacatgctcatccagagagtgcgcccatcctggtatctcgcagggctcatggctgcatggggtcttatcaacatgtccatgggtttcgtcaaaacctatggccagcttgtggctctccgtttcctgctcggcatatttgaggctggggtcatgcctggtatcatttatctgacttccatgtattatcgtcgtcacgtctttcaagtccgcatgagctcatacttttgctctgtcgttgtcgcaggagcattcggagggttgctcgcgtacgggatctctgatttgcaggggcagcgaggacttgctgcttggcgctggatcttcatcatcgagggggccattactgtcttcgtctcgattatctctgcattcttgatagtggactggcccgatcaatgtcggttcttgaacgccgaggataagaacctgcttaaagcaatcttagcccaagatggtgccgaggaggcccgcatggacacactgaaccgcgacgcataccgacgcattttcaaggattggaagatatacctaggctcttttgtatatctaggtgtgggcatcaccgggtactcgctcgtgtactttctgccaacaatccttgttgaatttggctggaaggctgccgaagcccagattcacacgattcctgtttacgccgtcactgctgttgccatgatttctgtcgcgtgggtctcggatcgatatcagcatcgttacggctttatcatctttggctgcgtgttggctactataggctatgccatgctcctcggacaagatggcttaggtcgtaatgccaaatacggcgcggtattcctcgtatcaattggtggttacatcggcaccccaatggcactcgcttggcttgccaacaacgtctcgggtcattggaagcgctcgtttagcgctagcatgcaaatcacgattggcaacattactggtattgctgcgtctaatattttccttgagagcgaatcacctcgctatcctactggatatggcacggcactagcactgacatggttcggaggactcactgctaccattttattcttcaaactcaagcgtgagaacaagttacgcggggctgggggtagagattatcgactgttgtgcccgaaggaggaactagagaacatgggagacgatcatccttctttcaggttcactacatga

SEQ ID NO: 27244 - protein, 507 aa, Muscodor strobelii
  misc_feature: SGI Peptide ID NO. 569331
  misc_feature (65)..(434): Pfam Id: PF07690 Pfam Desc: Major Facilitator Superfamily
  misc_feature (19)..(506): NCBI GI: 256726522 Blast Desc: NECHADRAFT_39621 [Nectria haematococca mpVI 77-13-4]
  misc_feature (32)..(506): NCBI GI: 121701653 Blast Desc: MFS transporter, [Aspergillus clavatus NRRL 1] gi|119397234|gb|EAW07665.1| MFS transporter, [Aspergillus clavatus NRRL 1]
  misc_feature (35)..(506): NCBI GI: 70995586 Blast Desc: MFS transporter [Aspergillus fumigatus Af293] gi|66850183|gb|EAL90510.1| MFS transporter, [Aspergillus fumigatus Af293] gi|159131303|gb|EDP56416.1| MFS transporter,
  misc_feature (18)..(506): NCBI GI: 255936967 Blast Desc: Pc13g10900 [Penicillium chrysogenum Wisconsin 54-1255] gi|211584130|emb|CAP92159.1| Pc13g10900 [Penicillium chrysogenum Wisconsin 54-1255]
  misc_feature (26)..(506): NCBI GI: 258568832 Blast Desc: conserved [Uncinocarpus reesii 1704] gi|237906606|gb|EEP81007.1| conserved [Uncinocarpus reesii 1704]
  misc_feature (20)..(506): NCBI GI: 115491679 Blast Desc: conserved [Aspergillus terreus NIH2624] gi|114197327|gb|EAU39027.1| conserved [Aspergillus terreus NIH2624]
  misc_feature (26)..(506): NCBI GI: 240109869 Blast Desc: Major Facilitator Superfamily protein [Coccidioides posadasii C735 delta SOWgp]
  misc_feature (27)..(506): NCBI GI: 238841332 Blast Desc: conserved [Microsporum canis CBS 113480]
  misc_feature (25)..(506): NCBI GI: 169768880 Blast Desc: [Aspergillus oryzae RIB40] gi|83766768|dbj|BAE56908.1| protein product [Aspergillus oryzae]
  misc_feature (42)..(506): NCBI GI: 225555871 Blast Desc: conserved [Ajellomyces capsulatus G186AR]
MPHSLTSDGLSEEHPTKVDMTPIVNDTEKAISITEDIANVPGGAIDPAAERRLLFKIDMHVYPILFIVYALSFLDRINISNARIQGLTEELDLYGNRFNIALFVYFIPYILLEIPSNMLIQRVRPSWYLAGLMAAWGLINMSMGFVKTYGQLVALRFLLGIFEAGVMPGIIYLTSMYYRRHVFQVRMSSYFCSVVVAGAFGGLLAYGISDLQGQRGLAAWRWIFIIEGAITVFVSIISAFLIVDWPDQCRFLNAEDKNLLKAILAQDGAEEARMDTLNRDAYRRIFKDWKIYLGSFVYLGVGITGYSLVYFLPTILVEFGWKAAEAQIHTIPVYAVTAVAMISVAWVSDRYQHRYGFIIFGCVLATIGYAMLLGQDGLGRNAKYGAVFLVSIGGYIGTPMALAWLANNVSGHWKRSFSASMQITIGNITGIAASNIFLESESPRYPTGYGTALALTWFGGLTATILFFKLKRENKLRGAGGRDYRLLCPKEELENMGDDHPSFRFTT
